United States Patent Application Publication US 2018/0126003 A1 - sequence listing, part 130

SEQ ID NO: 227762 - DNA, 10695 bp, Artificial Sequence
  derived and/or modified sequence
atgaccgcctggcgtcgattccagtctctgttattgcttcttgggctactggtcctctgcgctcgcctcctgaccgcagctaagggccagaattgtggaggcctcgtgcagggtcctaacggcactatcgaatctccaggcttcccccacggttaccccaattatgcaaactgcacctggattatcattacgggtgaacgaaaccggatccagctttcgttccacactttcgctctggaagaggatttcgacatcctctctgtgtacgacggtcagcctcagcagggcaacctgaaggtccgcctgagtggcttccagctcccgtcctccattgtttcaactgggtctattttgaccctctggttcaccacagactttgcagtatccgcccagggctttaaggctctttacgaggttctgccaagccacacatgcggcaatcccggcgaaattctgaagggcgtgctacacggaacaagatttaatattggggacaagattaggtatagttgtttgccaggttatatcctggagggccacgcgattctcacatgcatcgtcagtcccggcaatggtgcaagctgggatttcccagcaccattctgtagagcagaaggcgcttgcggaggcaccctgcgaggcacgtccagcagtatttcctcaccgcactttcctagcgagtacgagaacaatgcagactgtacgtggaccatcttagctgaacctggggacaccatcgcactcgtatttacggattttcagttggaggagggttacgatttcctcgagatcagcggaacggaggcaccctctatctggctgaccggaatgaatctgccatcccctgtcatcagtagcaagaattggttgcgattgcactttacatctgacagcaatcaccgccgtaagggatttaacgctcaattccaagtgaaaaaggcaatagaacttaaaagccggggcgtaaagatgctgccttctaaagacggcagtcacaagaacagcgtcctgagccagggaggcgttgctttagtcagcgacatgtgtcctgatcccggaattcccgagaacggcaggagagctggctccgactttagagtcggcgccaatgtgcagtttagttgcgaggataactatgtcttgcagggatcaaagagcatcacatgccagcgtgttactgagaccctggcagcgtggtctgatcatagaccaatctgtcgcgcacgcacctgcggttctaacctgaggggccccagtggtgtaattaccagtcctaactaccccgtccaatatgaagacaacgctcactgcgtgtgggtcatcaccactaccgatccggataaagtgattaagctagccttcgaagagtttgagcttgagcgaggatacgatacccttacagtgggagatgctggaaaagtcggagatactaggtctgttctttacgtgctcaccggaagtagcgtgccagatcttatcgttagcatgagtaatcagatgtggctccatctgcagtccgacgattcaattgggtcaccggggtttaaagccgtgtatcaagaaattgagaaaggagggtgtggggaccctggaatccccgcttacggtaagcgcaccggaagcagctttctccatggtgataccttaacattcgaatgtcccgccgcattcgaactggtgggggagagggtgattacctgtcagcagaacaaccagtggtcgggaaacaaaccatcgtgtgtgttctcctgcttttttaacttcaccgcatcatctgggatcattctttctccaaattacccagaagagtacggcaacaacatgaattgcgtttggctcatcataagtgagccggggtcgcggattcaccttattttcaatgacttcgatgttgagccccaattcgactttctggctgtaaaggacgacgggatttctgacataaccgtgctggggacattctcaggaaacgaagtcccttcacagttagcttcatcaggtcacatagtgcggctggagtttcagagtgatcacagcactacagggagagggtttaatatcacttacaccaccttcggtcagaatgagtgccatgatccaggcatccctattaatggtcgccggttcggggatcgtttcttgctgggtagctcagtaagtttccactgcgatgacgggttcgttaagacccaggggtcagagagcatcacgtgcatactccaggacggaaatgtagtttggtcatctacagtgccgagatgcgaagccccctgtggtggacacctgactgcttcaagcggggtgattctaccccctggctggcctgggtactacaaagactctctacattgtgaatggattattgaggccaagccagggcactctatcaaaatcacgtttgacagatttcagactgaagtaaactatgacacacttgaggttagagacgggccggcatccagctcacccctgatcggcgagtaccacggcacacaggccccccagttcctcatctcgacagggaacttcatgtacctgctcttcacaaccgataacagtagatctagtatcggtttcctgatccattacgagtccgtgactttagaatctgacagctgtctcgaccccggaataccagtaaacggtcacaggcacgggggggactttggcatacggtctacagtgacattttcttgtgatccaggctatacactctctgacgatgagcctctcgtgtgcgagaggaatcatcagtggaatcacgccttgccctcctgcgatgccctgtgcggtgggtatatccagggaaagtcaggtaccgtcctctcaccaggattcccggatttctacccgaattcactgaactgcacatggacgattgaggtctcacatggtaaaggagtccagatgattttccacacttttcacctcgaatctagtcatgactatctcctaatcaccgaggacggatcattctctgaacccgtggctcggttgactggctcagtcctgccacacactattaaggcaggactgtttggcaattttaccgctcaactgaggtttatctccgatttttcaattagttatgagggattcaatattaccttcagcgagtacgatctcgaaccatgtgatgatcccggcgttccagcattttcccgccggatcggcttccattttggtgtcggtgactcgctgacattcagttgcttcctgggttatcgcttggaaggcgccacaaaactcacttgtctcggcggaggaaggcgggtgtggtcagccccacttcctcggtgtgtcgcagaatgtggagccagcgtgaagggaaatgagggtacattgctttcacctaatttcccttcgaactatgataataatcatgagtgtatctataaaattgaaacggaagcaggcaagggcatacacttgcgcacccggtcttttcaactgtttgagggtgacactttaaaggtctacgacggtaaggattcgtcgtcacgcccgctgggcaccttcacaaagaacgagctgttgggcctcatactgaactccacatctaatcacttatggctcgagttcaacacgaacgggtccgacacagatcaggggttccagctgacttatacctcgtttgatctagtgaagtgtgaggacccgggtatacccaattatgggtataggatacgggacgaggggcactttaccgacacagtagtattgtacagctgtaaccctggctatgcaatgcacgggagcaatactctgacatgtctgtcgggagacaggcgggtctgggataagccgctgccctcatgtatcgccgagtgtggcggccagatccacgctgccacctccggcaggatcctgagccctgggtaccccgcaccctacgacaacaatctgcattgtacatggatcatcgaggctgatcccggcaagaccatctctttacacttcattgtgtttgacacagaaatggcccatgatatcctcaaagtctgggatgggccagtagactctgacatcctactcaaggagtggagtggctcagctctgcctgaagatatccacagcaccttcaactcccttacacttcaatttgattctgacttctttatatcaaaatccggattctctatccaattctctacctcgattgctgcgacctgcaacgaccccgggatgccccagaatggtacccggtacggagactcgagggaagcgggtgatactgtgacattccaatgtgatcctggataccagctgcagggtcaagccaagattacatgcgtacagctgaataaccgctttttttggcagccagaccctccgacgtgtatcgccgcttgcgggggaaatctcactggccctgccggggtaatcttgagccccaactatcctcagccatatcctcccggtaaggaatgcgactggagagtaaaggtcaatccggactttgtgatcgccctcatttttaagtcattcaatatggagccctcttatgactttctacacatatacgagggcgaagatagtaattctccactgattggaagctaccagggcagccaggcccccgagaggatcgaatcttcggggaactctctctttctagccttccggagtgacgcctctgtcggtttgagtggttttgctatcgagttcaaggaaaaaccaagagaggcctgcttcgacccagggaatatcatgaacggtacacgcgtgggaaccgacttcaaactggggagcacaattacctaccagtgcgattccggctacaaaattctcgatccgtcttcgatcacctgcgtcattggggcagacggtaaaccctcttgggaccaagtcctgccctcctgcaacgcaccttgcggcggacagtacacagggtctgaaggagtggtactttcccctaattaccctcacaattacactgctggccagatttgcctgtactctatcaccgtccctaaggagtttgtggtgttcggccagtttgcttacttccagaccgcgctcaatgacttggccgagttgttcgacggaacgcacgctcaggcacgcctattgtccagtcttagcgggtcacactctggagaaacactccctttagcaacatccaatcagatcctcctgaggtttagcgccaagtccggggcctccgcgagagggttccatttcgtgtaccaggcggttcctagaacttctgacacgcaatgttcctcagttccggagccacgatatggacgacggatcgggtctgaattttccgctggcagtatcgttcgatttgagtgtaatccaggatacctgctgcaagggagcacagcactgcactgccagagtgtgcccaacgctttggctcaatggaacgatacaatcccgagctgtgtggtcccctgctcaggaaactttactcagcggcggggcaccattctttccccggggtacccggagccttatgggaataatctaaattgcatttggaaaattatcgtcaccgaaggatccggtatccaaatccaagtgatatcgttcgctacagaacagaattgggactcgttggagatccatgacggtggggatgtcacagcacctcgactgggatctttttccgggaccacagtgcctgctttacttaacagcacatccaatcaactgtatctgcactttcagagcgacatttccgtcgcagctgccggattccacctagagtataagaccgtggggcttgcagcatgtcaggagcctgccttgccctccaattctataaaaatcggggatcgatacatggtaaacgatgtgctgtccttccagtgcgaaccagggtacaccctgcagggtcggagtcacatatcctgtatgccagggacagtgcgcaggtggaactaccctagccccctctgcatcgccacatgtggaggtactctctcaaccctgggcggagtgatactgtcaccaggatttcctggatcataccccaacaatctggattgtacctggagaatctcattaccaattggttacggcgcacacattcagttcctaaatttctctacagaggctaaccacgacttcctggaaatccagaacgggccataccatactagccctatgataggacagttttcaggaactgacctgcctgcggctctgctgtctacaacccatgaaaccctcatccatttctatagtgatcacagccagaatcgacagggctttaaactcgcctatcaggcgtacgagcttcagaattgccctgatccacccccgttccagaatggctacatgattaactctgattactccgttgggcagagtgtcagcttcgagtgttatcctggttacattctgattgggcatcccgtgttaacctgccagcatggtatcaaccggaactggaactacccctttccgaggtgtgacgccccttgcggctacaatgtgaccagtcagaatggaactatctattctcctggctttcctgacgagtatccaatactcaaagactgtatatggctgataacagtacctcctggtcacggagtgtatatcaacttcacccttcttcagacggaggctgtgaatgattatattgcagtctgggacggtcctgatcagaattctccgcagctgggtgtattttctggtaatactgcccttgagaccgcttactcatccacaaaccaggtgttgctgaagtttcattccgacttcagtaatggtggatttttcgtccttaattttcacgcgtttcagctcaaaaagtgccagcctcctccagctgttccacaagccgaaatgctgacggaagacgacgacttcgagataggggacttcgtcaagtaccagtgccatcctggctacactctggttggaaccgacatcctcacttgtaagctgtcctcacagctgcagttcgaggggagtctacctacttgtgaggcccagtgccctgccaatgaagtgcggaccggttcctcaggtgtgatcttgtcccctgggtaccccggaaactactttaactctcagacatgctcatggtcaataaaggttgagccaaattataacattacgatcttcgtggatacctttcaaagtgagaaacagttcgatgcccttgaggtcttcgacgggtcctccgggcagtccccattgttagtggtgctgtccgggaatcataccgaacagtctaatttcactagtcggagcaatcagttgtatttgcggtggagtacagaccatgccacttctaagaagggattcaagataagatatgcggctccctactgttccctgacgcatcccctcaagaatggcggaattctaaaccggactgccggcgctgtcggatcgaaggtccactatttctgcaaaccgggttaccgtatggtggggcacagcaacgccacttgtagacgcaatccacttgggatgtaccaatgggactcgctcacccccctgtgtcaagccgtatcctgcggcatccccgaaagccctggtaatggaagctttaccgggaatgagttcaccctggactctaaagttgtgtacgagtgtcatgaagggtttaagctcgagtcatcacagcaggccaccgccgtttgtcaggaggatggtctctggtctaataaaggaaaaccaccaacttgtaagccggtcgcttgtccctctatcgaagctcagctatcagagcacgtaatttggcgcctcgtaagcgggagccttaacgagtacggagcccaagtccttctctcatgttctccagggtactacctggaggggtggaggctgcttaggtgtcaggccaacggcacatggaacattggcgatgaaagaccatcatgtcgggtgatttcgtgcggttctctgtctttccctcctaacgggaataaaattggaacactgacagtgtacggggccaccgcaattttcacctgcaacactggatacaccctagtgggttcacatgttcgcgagtgcctggcaaacgggttgtggtcaggctccgagacacggtgtttggcagggcattgcggaagccctgatcctattgtcaacggccacattagcggcgacgggttttcttaccgcgatacggtggtgtaccagtgcaacccaggcttccgccttgtcgggacctcggtgagaatatgcctacaagatcacaaatggtccggccaaacgcccgtgtgtgtgccaatcacttgtggtcaccccggcaatccagctcacggcttcaccaatgggtctgaatttaatttaaacgacgtcgtcaattttacctgtaacactggttatctcctccagggagttagtcgagcccagtgcaggtctaatgggcagtggtcttctccccttccaacctgtagggtggtgaattgcagtgaccccggttttgtggagaacgctatcagacacggtcagcagaactttcccgagtctttcgagtatgggatgagcattctttaccattgcaagaagggcttttatctgttagggtcttccgctctgacttgcatggccaatggcctgtgggaccggtctttacctaaatgcctggcgatctcttgtggccacccaggagtgcctgctaatgccgtgttgaccggcgagctcttcacatacggtgccgtggtacactactcctgcaggggatcggagtctctgattggcaacgacacccgggtgtgccaggaagattcacactggagcggggcactccctcactgtaccggcaacaatccgggattctgcggcgaccccggcactccagcccatggaagccgcctgggcgatgacttcaagactaagtccctgttgcgattctcctgcgagatgggacatcagctgcgtggatcccccgaacgcacatgtcttctcaacggctcatggagcggacttcaaccagtgtgcgaggcagttagttgcggaaaccccggaaccccgaccaatggaatgatcgtaagttccgatggcatcttatttagctcaagtgtcatctacgcctgctgggaaggctacaagacctcagggcttatgacaagacactgcacagccaatgggacttggacaggcacagctcccgattgtacgattatttcatgcggggaccctggaaccctcgccaatggcattcagtttgggactgattttacctttaataaaacagtgagctaccagtgtaatcctggctacgtaatggaagccgtcacatcagctaccattcgatgcactaaagacggcaggtggaacccaagcaaacccgtttgtaaagccgtcctgtgtccccagccaccgccagtgcagaacggaacagtggagggaagcgacttcaggtgggggtcttccatctcctacagctgcatggatggatatcagctctcacactccgcgatattgagctgtgaggggagaggcgtctggaagggcgaaatacctcagtgtctgcctgttttctgtggcgatcctggcattcccgctgagggacggttgagcgggaagtcctttacatataagtcagaggtcttctttcagtgtaagagcccatttatcctggtcgggtcaagcaggcgagtgtgccaagctgatgggacttggtctggcatacagcccacttgcatagatcctgctcataacacctgccctgaccctgggacaccccattttgggatccagaacagttctagaggctacgaagtggggagcaccgttttctttaggtgccgcaaaggataccacatacagggaagtactacacgcacctgcctcgccaacctcacctggtcaggcatccaaaccgaatgtattcctcacgcttgcaggcaacctgagaccccagcgcacgcagacgtgcgggcgatcgatctgcccacctttggttacaccctggtgtacacctgccacccaggtttcttccttgccggaggctctgaacaccggacctgcaaagccgacatgaagtggacgggtaaaagtcccgtctgtaaatcaaaaggagtacgggaggtcaacgagaccgttactaaaacacccgtcccttccgacgtattcttcgtgaacagtttgtggaagggttactacgagtacctgggcaagcgtcagccagctacactcaccgtggattggtttaacgcaacctcttcaaaggtgaacgctactttctccgaggcctcaccggttgagctcaaattaactggcatatacaagaaagaggaagcacacctcctccttaaggcattccagatcaaaggtcaagcggatatctttgtcagtaagttcgaaaacgacaactggggactagacggctatgttagctccggcttggagagaggtggattcaccttccagggcgatatacacggcaaagatttcggaaaatttaagctggagcggcaggatccactgaatccagaccaggacagctctagtcattatcacggtactagctctggttcggtggcggccgccatcctagtgccttttttcgccctcattctgagtggattcgctttctacctctacaaacatcggactagacctaaggttcaatataatggatatgctgggcatgagaattctaacgggcaggcttctttcgagaatccgatgtacgacaccaacctcaaaccaacagaggccaaagccgtgcggtttgacacaacccttaatactgtttgcactgtcgtgtag

SEQ ID NO: 227763 - DNA, 6330 bp, Artificial Sequence
  derived and/or modified sequence
atgactgcctggcggcgattccagagcctgctgctcctgctaggcttgctcgtgctgtgtgctaggctgttaacagctgctaaagggcaaaactgcggcggcttggtccaggggccaaatgggaccatagaatccccgggcttccctcacggataccccaactatgccaattgcacctggatcataataactggtgaacgaaatcgtatccagctgtcttttcacaccttcgccctcgaggaggattttgacatcctaagtgtttacgatgggcagcctcagcaggggaatttaaaggttcggctttccggctttcagctgcccagttccatagtcagcaccggatctattctaactctgtggttcaccacggactttgctgtgagtgctcagggattcaaggctttatatgaggtgctgccatcccatacgtgcggtaatccaggcgagatcttgaaaggggtgcttcacggcactcgcttcaatatcggggataaaattaggtactcctgcctgccaggttacatcctggagggtcacgcgatattaacttgcatagtgtcacccgggaacggagcatcttgggatttccccgcacccttctgcagggccgaaggagcttgtggagggacattgcgaggcactagctctagcatctcctctccacactttcctagtgaatacgagaacaatgccgactgtacatggaccatcctggcagagcctggcgataccatagccctggtatttacggacttccagctggaagagggatatgactttttagagatttccgggaccgaggctccatctatttggttgactggaatgaatctgccatcccccgtgatttcatccaaaaattggcttaggctgcattttacatcagacagcaatcaccggcgcaaagggttcaacgctcagttccaggtaaagaaggccatcgagctgaagtctcgcggagttaaaatgcttccctcgaaagacggttcccataagaacagcgtgctgtcacaggggggagtggcgctcgtcagcgacatgtgtcctgatccaggcattccagagaatggacgccgtgccggttccgactttagggtcggcgctaatgtgcagttctcctgcgaggataattacgtcttgcaggggtcaaaaagcattacttgccagcgggttacagaaactctcgccgcgtggagtgaccacagacccatatgcagggcgagaacctgtggcagcaacctgcgtggcccctcaggcgtcataacctctcctaattaccccgtgcagtatgaagataatgctcattgcgtgtgggtgattacaacaaccgaccctgacaaagttattaagctggcttttgaagagttcgagctcgaaagaggttacgacactttaacggtcggtgacgccggcaaggtgggtgatactcgatctgtgttgtatgtgctaacgggcagcagcgtacctgacttaatcgtgtccatgagtaatcagatgtggctgcacctgcagagcgatgacagcatcggctctcccggcttcaaagcagtttaccaggaaattgagaagggtggatgcggtgacccaggtattccagcctacggtaaacggactggatcaagcttcctgcatggagatactcttacattcgagtgcccagctgcctttgagctggtcggtgagcgggtgatcacctgtcagcagaacaaccagtggagcggcaataaaccttcatgcgtatttagctgtttcttcaacttcactgcgtcctccggcataatcctgtcaccaaattatccggaggaatacggaaacaatatgaactgtgtatggctgattatcagcgaaccgggcagtaggatccatcttattttcaacgatttcgatgtggagcctcagtttgatttcctggctgtgaaagacgacggaatatcggacatcacagtgctgggaaccttctccggtaatgaggttccgagtcagctggccagcagcggccacatcgttagactcgaattccagtcggatcattccactactggaaggggcttcaatatcacatatacgaccttcggccagaatgaatgccatgatcctggcattcctatcaacgggcggcggttcggcgaccggttcctattaggaagctccgtctcattccactgtgatgatggattcgttaagacgcagggctctgaaagcatcacgtgcatcctgcaggatggaaatgtggtctggtccagtacggtgccccggtgcgaggccccatgtggggggcacctaacagcttcatccggcgtgatactgccaccggggtggcctgggtactataaggacagcctgcactgtgagtggattattgaggccaaacctggccacagcattaagataacattcgataggtttcagaccgaggtgaactatgacacactggaagtccgggatggccctgcctcctcctcccccttaattggagaatatcacgggacccaagctccacagtttctaattagcacgggtaatttcatgtacctgctttttacaactgacaactctcggagctctataggctttcttattcactacgaatcagtgactctcgaaagcgatagctgtcttgaccccggtattcctgtcaacggtcaccgtcacggcggggactttggaattcgctccaccgtgaccttttcttgtgacccaggatacacgctgtccgacgacgaacctctcgtgtgcgagcgaaaccaccagtggaatcatgctcttccctcatgtgacgcgctttgcggcggctacattcagggcaaatccgggacagtgctgagccccgggtttccagacttttacccgaatagcctgaattgtacatggaccattgaagtgtctcatggtaagggagtgcagatgatctttcatacgttccacttggagagtagccatgattacctgctgatcactgaggacggttctttcagcgagccagtggcacggcttactggcagcgttctaccccataccatcaaagccggcctcttcggaaattttaccgctcagttgaggttcatctccgacttctcaatcagctatgaagggttcaacattactttttccgagtacgacctagagccatgtgacgacccaggagtgccagctttttccagacgtattggcttccatttcggagtgggtgactctctcacctttagttgctttctcggatatcgcctggagggtgctaccaaactcacttgtctcggtggaggcaggagagtctggtccgccccactgcctcggtgtgttgcagaatgcggagctagcgttaagggcaatgagggcacactgctgtctccgaattttccgtcaaactacgataacaatcatgaatgtatttacaagatcgagactgaggctggcaagggcatacatctccgtaccaggtccttccagctctttgaaggagacacccttaaagtgtacgacggcaaagattcctctagccgccctctaggtaccttcacaaagaatgagcttctgggcttgatcctcaattctacaagcaatcatctgtggcttgaattcaacacgaacggatcggacacagatcagggcttccagctgacgtataccagttttgacctcgttaagtgcgaggacccagggatccccaattacgggtatcgaatcagggatgaggggcacttcactgatactgtggtgctgtatagctgtaatccgggctatgccatgcacggaagtaataccctgacatgtctgtccggggacaggcgcgtctgggataagccacttccgtcttgcatagctgaatgcggtggacaaatccatgccgctacgagcgggagaatactcagccctggatacccagcaccatacgataacaatcttcattgcacctggatcattgaggctgaccctggaaagacgatctcactacattttatcgtgtttgacaccgaaatggcacacgatattctcaaggtatgggacggcccagtcgactctgacatcctcctaaaggagtggtccggcagtgccctccccgaagacatccatagcacctttaacagcttaacgctacagttcgacagcgatttcttcatctctaaaagcggatttagtatccaattttctaccagcatcgccgctacttgcaatgatccggggatgccacaaaatggtacgcggtatggggactcacgcgaggcaggcgataccgttactttccagtgcgatccaggatatcaactccagggccaagcaaagataacctgcgtccagctaaataataggtttttttggcagcctgaccctccgacttgcatcgcagcctgtggagggaatctgacaggacctgccggcgtaatcctaagccccaactacccacagccgtacccccctgggaaagagtgtgactggcgcgtcaaggttaaccctgatttcgtcattgccctgatatttaaatcattcaatatggagccttcgtatgatttcctgcacatctatgagggcgaggatagtaactcacccctgattgggtcttaccagggatcacaagcaccggaacgtatagagtccagcggcaactcactgttcctggccttcaggtccgacgcctcggttggactgtctgggtttgccatcgagttcaaggaaaagcccagagaagcatgttttgacccgggaaatataatgaacgggactcgcgtcggcactgattttaaactgggaagtaccatcacctatcaatgtgacagcggatataagatcctcgatccttccagcataacctgcgtcatcggcgccgacgggaagccaagttgggaccaggtcctccccagttgtaatgctccctgcggcggccaatacacaggatcagagggcgtggtactcagccctaactaccctcacaactacactgctgggcagatctgcctttacagtattaccgtgcctaaagagttcgtcgtgtttgggcagtttgcctatttccagactgcgctgaatgatctggccgagctgttcgacgggacacatgcgcaggccagactactgtcatcactttccggctcacattctggcgaaaccctgcctctggctacctcaaatcaaatcctgttgagattctcagcgaagtctggggcatccgcccgaggattccattttgtctaccaagctgtacccagaacaagcgacacacagtgtagttccgtgccagagccacgctacggaagacggataggctccgagttttcggcaggctccattgtccgtttcgagtgcaacccgggatatttgcttcaggggagcactgccctccactgccagagtgtgccgaatgctctggcgcagtggaacgacaccatccctagctgcgtcgttccatgcagtggaaacttcacacagagaaggggaacaattctgagtcccgggtatccagagccctatggcaataaccttaactgcatatggaaaataattgtcacggaggggtccggcatccagatccaggtcattagttttgcaacagaacagaactgggattccctggagatccatgacggaggagacgttactgcccctagactaggcagcttctccgggacaactgtacctgccctactgaactcaacgtcaaaccaactgtatctccattttcagtcagacatctccgtggcagccgccggttttcacctggagtataagacagtgggcctggctgcttgtcaggagcctgctctgcctagcaacagtatcaaaatcggcgacaggtatatggttaatgacgtcctcagcttccaatgcgaacccggctatactcttcagggtaggtcccacatctcctgcatgccgggaaccgtacggagatggaactacccctctcctctgtgtattgccacctgtggtggaaccctctctaccctgggaggcgtgatattatccccgggctttcccggctcatatccgaacaacctcgattgtacatggagaatcagtctgcctataggatatggcgcccatatacagtttcttaactttagcaccgaggcaaaccacgatttcctcgagatacagaacggaccatatcacacgtctcctatgatcggacagttttccggaacagacctgcccgctgcattactaagtacgacacacgagactctcatacatttctatagcgaccacagccagaatcgccagggattcaaacttgcttatcagggtgggtctggcaatatcgggccagccttcccatgcctggacacgccctttcaggcccgatgtcagggagaggaacggaccttcaactag

SEQ ID NO: 227764 - DNA, 10164 bp, Artificial Sequence
  derived and/or modified sequence
atgactgcctggcggcggtttcaaagcctgctactcctgctgggactccttgtgttgtgcgcacgcttgctcactgctgcgaagggccagaactgcggaggcctggttcagggacccaacggcacgattgagtccccagggtttccgcatgggtatccaaattacgcaaactgtacttggatcattataacaggtgaaaggaaccgaattcagctgtcttttcacacatttgcattggaggaggacttcgatatactgagcgtatatgatgggcagccccagcagggaaatcttaaggtaagactgtctgggtttcagcttccgtcatctatcgtgtctacaggctccattctcactttgtggttcacaactgacttcgccgtatcagcccagggctttaaggccctgtatgaagttttaccctcccacacttgcggcaaccctggagagatcttaaagggggtcctccacggaacaagattcaatatcggtgacaagatccgctactcttgcttacctggctatattctggagggccacgcaatactgacttgcatagtgtctccaggaaatggtgctagctgggatttccccgccccattctgtcgggccgagggggcatgcggcgggactttgcggggcaccagtagctccataagcagcccacatttcccctctgaatatgaaaataacgccgactgcacatggaccatattagccgaacccggagatacaattgctctggtgttcacagatttccagctcgaagaagggtacgacttcctggaaatttctggcacggaagcaccatccatctggctgaccggaatgaatctccccagccccgttatctcttccaaaaattggctgcgcctgcactttacatctgactccaatcaccgtaggaagggcttcaacgcacagttccaggtcaaaaaggctatcgagttaaagagtagaggcgtaaagatgttgcccagcaaggacgggagccacaagaactctgtgctctcccagggcggggtcgctctggtgtccgacatgtgcccagacccaggtattccagagaatggcagaagggctggcagcgacttcagagttggcgccaacgtgcagttcagctgtgaggacaactacgtgctacagggcagtaagagcataacctgtcaaagagtgacagagactcttgctgcctggtccgaccaccgccccatttgtcgcgctagaacatgtgggagcaatctgaggggcccctccggcgtgataacctccccaaattatcccgtgcagtacgaagataacgcgcattgcgtgtgggtaataaccactacagacccagataaagtgatcaagctagcgtttgaggagtttgagctggagaggggttatgataccctgactgtgggcgatgccgggaaggtcggagataccaggagtgtactctacgtgctaacaggatcttccgtgcctgaccttatcgtgtctatgtcaaaccaaatgtggctgcacctgcagtctgacgatagcataggctcaccagggttcaaggctgtttaccaggagatcgagaagggggggtgtggcgatcctggcatccccgcctacggcaagcgcactggatcctcattcctgcatggcgacaccctgacttttgaatgtcccgcagcatttgaattagttggagaaagggtgatcacttgccagcaaaacaaccagtggtcagggaacaaaccaagttgcgtattcagctgtttctttaactttaccgcttcatctggaatcatactatcacccaattaccccgaggagtatggcaacaatatgaactgcgtctggctgattatcagtgaacccggctccaggatccatttgatctttaatgactttgacgtggaacctcagttcgattttttagccgttaaggatgacgggattagtgacattacggtgctcggcactttctccggaaatgaagtgccatcgcagctggcatccagcggccacattgtgaggctggaatttcagagcgatcacagcaccaccggcagaggctttaatatcacttacacaacctttggccaaaacgaatgccatgaccctgggattccgatcaatggccggaggttcggtgatagattcctgttagggtctagtgtaagctttcactgcgacgatggctttgtgaagacacaggggagtgaatccattacctgtatcctgcaggacgggaatgtcgtctggtcttccactgttcctcggtgcgaggcgccttgtggaggtcatctgacagcctcctcaggagtaattctgcctcccgggtggccgggctactataaggattccctgcattgcgagtggattattgaggctaagcctgggcactccatcaaaattacctttgaccgcttccagaccgaggtgaactatgataccctggaggtccgtgatggcccagcaagctctagccctctgattggggagtaccacggcacacaggccccccagtttctgatctcaacaggcaacttcatgtatctgctcttcactacagacaactctcgctcctccattggctttctcattcattacgagtccgtgacactagagtctgactcttgccttgatcccggaattcccgtcaacggacacaggcacggtggagattttggcattcgcagtactgtgacttttagttgtgatccaggatatactctgagcgacgacgagccactagtctgcgaaaggaaccatcagtggaaccacgcattaccttcatgcgacgcgctctgcggtggctacatccaaggcaagagtgggaccgtgttaagtccaggcttcccagatttctacccaaacagcctgaactgtacttggaccatagaggtgtcacacggcaagggcgttcagatgatcttccacaccttccatttagagagctctcatgattatctcctgatcactgaagatggatcctttagcgaacccgtggcacggcttacaggatccgtgctgccccacacaatcaaggcgggtctatttggcaacttcactgcacagttgcgatttatttccgacttctctatcagttacgaaggattcaacatcactttttccgagtacgatctggaaccttgcgatgacccaggcgtccccgcgttttccagacgaatcgggtttcacttcggagttggcgacagtcttaccttttcttgttttttgggctacaggttggaaggtgctaccaaactcacgtgcctgggcggcggacgtagagtctggtccgcaccgcttcctcgttgtgtcgccgagtgcggagcctccgtcaaaggcaacgaggggactctgctgtctccgaacttccctagtaattacgacaataaccacgagtgcatttataaaattgagacagaagccgggaaaggaatccatctgagaacacggagcttccagctgttcgagggcgacacactgaaagtatacgacggaaaggacagctcctcccgtccgcttggaacttttacaaaaaacgaactcttggggttgatcctcaattcaacttctaaccatttatggcttgagttcaacaccaacggctccgatacagaccaaggctttcagcttacatatacgtcatttgaccttgtcaaatgtgaggaccctggtatccctaactacggctatagaatccgggatgaaggccacttcacagacactgtcgttctgtatagctgtaatccaggatacgcaatgcatggttcaaacaccctgacctgtctcagtggagatcgaagagtgtgggataaaccactccctagctgtatcgcggaatgtggcggccaaatccatgccgctacctctggtcgaattcttagccctgggtacccagctccatatgacaataacctgcattgcacctggattatcgaggccgacccaggcaagaccataagcctgcacttcatcgttttcgacacagaaatggctcacgacattctgaaggtctgggacggaccagttgatagcgatatcctcctgaaggagtggagtggaagcgcccttcctgaggacattcattctacattcaattcgctcacccttcagttcgactccgatttcttcatttccaagtctggatttagtatccagttctccacatcgattgccgctacttgtaatgaccctggcatgccacagaatggaaccaggtacggggattcacgcgaggctggcgacaccgtgactttccagtgcgaccccggctaccaactgcagggacaggcaaagatcacatgcgtccagctgaataaccggttcttctggcagccagacccacccacttgcatcgctgcttgtggaggcaacctcaccggaccagcgggagtgattctgtcgccaaactatccccagccctaccctcctggcaaagaatgcgattggcgggtcaaagtgaatcccgattttgtcatagcactcatctttaagagtttcaacatggaaccaagctacgattttctgcacatttacgagggggaggactcaaattcccccttaattggctcataccaaggtagtcaggcccctgaacggattgagtcctctggaaatagcctttttctggcctttcggagcgacgctagcgtgggcctgtcagggttcgccattgagttcaaagaaaaacctcgtgaggcctgcttcgatccagggaatattatgaatggcactcgggtgggcacggattttaaacttgggtcaacgattacttatcagtgcgatagtgggtacaaaatcttggacccatcttctatcacctgcgtcattggcgcagacgggaagccatcttgggaccaagtgttgccatcttgtaatgccccctgtggtggccagtataccggaagcgaaggcgtggtgctgtctcctaattacccccataattatacagcaggccaaatttgcttgtattctattactgtaccgaaagaatttgtcgtgtttggccaatttgcctactttcagacagcactgaatgatctggctgagctgtttgacgggacccatgcccaggccagactgctatcatccttgtcaggatcacacagtggtgaaacactgcccctggccacctccaaccaaattctgctgcggttcagtgcaaagagtggcgcctctgccagggggtttcatttcgtctatcaggctgttcctcgcacaagtgatacccagtgctcttcagtgccggaacctaggtatggacggcgcatcggcagtgagttcagcgcaggctctatagtgaggttcgagtgtaacccaggctatctcctgcaaggttctaccgctctgcactgtcagtctgtgcccaatgccttggcacagtggaacgataccataccctcatgtgtggtgccctgcagtgggaactttacccagcgccgtggcactatcttaagccccgggtaccctgagccttacgggaataatctgaattgtatatggaagatcatcgtgactgagggcagcggaatacagattcaggtcatttcttttgcaacagaacaaaattgggactccctcgagattcatgatggtggggacgtcaccgcccctcgtctaggctcctttagcggcactaccgttcccgccctcctaaactcaacaagtaatcaattgtacctccactttcaatcagatatatccgtggctgccgctggatttcatttggaatataaaactgtcgggctggctgcctgtcaggaaccggccctgccaagcaactccataaagatcggagaccgttacatggtgaacgacgtactgtcatttcagtgcgaacccggatatactctacagggcaggagccacatctcctgtatgcctggcacagtccggcgttggaactacccaagcccgctttgtatcgctacatgcgggggcaccctttcaactcttgggggagtgattctttccccaggttttcctggctcttatccgaataaccttgattgcacttggcgcatttcattaccaattggttacggtgcacatattcagtttctcaatttcagcacagaggccaaccacgattttttggagatccagaatggcccttaccatacatcccccatgatcggccagttttcaggtactgatctgcccgccgctctgctgtccaccacccatgagacccttatccacttttactcagaccatagtcaaaaccgacagggctttaagctagcgtaccaggcctacgagctgcagaactgccccgaccctccgccttttcagaatggctacatgatcaacagtgattacagcgtgggccagtcggtgtcttttgagtgctaccctggctatatacttatcggccaccccgtgctcacgtgccagcacggaatcaaccgcaactggaattatcctttccctaggtgtgacgctccctgtggatacaatgtgacatcccagaatgggaccatttattcgcctggctttccagacgaataccccatactgaaagactgcatatggctcatcacagtcccaccaggtcacggggtgtacatcaatttcacacttctgcagactgaagccgtaaacgattacattgcagtgtgggacggccccgatcagaacagccctcagctcggagtttttagcggaaatacagcacttgaaactgcgtactcttcaaccaatcaggttctgctaaaattccacagcgacttcagcaacggtggctttttcgttctaaacttccacgccttccagcttaagaagtgtcagcccccccccgcagtcccccaagccgagatgcttaccgaggacgatgactttgagatcggagactttgtaaagtaccagtgtcatccggggtatacgttggtgggcactgacatcctaacttgtaaactgagctctcaactccagtttgaaggctcactccccacttgcgaggcccagtgccctgctaatgaagtgagaaccggatcttccggcgttatcctgtccccgggatatcctggcaactattttaatagccagacgtgcagctggagtatcaaggtggaaccgaactacaacatcactatttttgtcgacacttttcaatccgaaaagcagtttgatgcactagaggtcttcgacgggtcctcagggcagagtcccctgctggtggtcctgtctgggaatcataccgagcagagcaatttcacgagccgttccaaccagctgtacttgagatggagcaccgatcatgccacatccaaaaaagggttcaaaatccgctacgctgcaccatactgttcccttacccatcccctgaaaaatggtggcatcctcaataggaccgctggggccgtggggtctaaggtccactacttttgcaagccaggctacagaatggtgggacattcaaacgcgacttgtagacgcaacccactggggatgtatcaatgggactccctcacaccactgtgccaagctgtttcctgtggcattcccgagtcgcctggtaacgggagttttaccggtaatgaatttaccctagattcaaaggtcgtgtatgagtgtcatgaaggcttcaagttggagagcagtcagcaagccactgccgtgtgtcaggaggatggtctatggagcaacaaaggcaaacctccgacctgtaaaccagtggcctgtccgagtatcgaggcacaactctcagagcacgtgatctggcgactcgtgtcaggctctctaaacgaatacggagctcaggttctgcttagctgctcccctggctactatcttgaggggtggaggctcctcagatgtcaggcaaatgggacatggaacattggtgatgaacggcctagctgtcgggctggacactgtggatcaccagaccccattgtgaatggtcatatatctggagatggattcagctacagggacacggtggtgtatcagtgcaacccaggcttccgcctcgtgggcacctcagttaggatctgtctccaggatcacaaatggtctggacaaactccagtatgtgtgccgataacgtgcggacatcccggcaatcccgctcatggctttacaaacggttcagagtttaatttgaacgatgtggtcaactttacatgtaacactggatacctgttgcaaggggtcagccgagcgcagtgcagaagtaatgggcagtggtcgtccccccttcccacctgtagagtggtaaactgcagcgaccctggctttgtggagaatgctataagacacggccaacagaacttcccagagtccttcgagtacggtatgagcatcttgtatcattgcaaaaaaggattttacctgctgggatccagtgcattaacgtgcatggccaatggtctgtgggaccgcagcctccccaagtgtttggcgattagctgtgggcatccaggggtcccagccaacgccgtgctcacgggagagcttttcacctatggcgccgtagttcattactcctgccggggatctgagagcctgatcggaaacgacacaagggtctgtcaggaggattcccattggagtggcgcactcccccactgcaccggcaacaacccaggcttctgcggagaccccggaacgccagcacatggaagcaggctcggcgacgattttaaaaccaagagtttgctgcgattttcttgcgagatgggccaccagctcagaggttcaccagagaggacatgtctccttaacggcagctggtccggactccagccggtctgcgaggctgtgctgtgtccccagcctccccctgtacagaatggcactgtggagggctctgacttcagatgggggtcatccatctcttacagctgcatggacggctaccaactgagtcattccgcaatcctgagctgcgaaggccggggcgtgtggaaaggggaaattcctcagtgtctgcccgtattctgtggcgatccgggcatccctgctgagggccggctgagcggcaaatccttcacttataaatcggaagtgtttttccagtgcaaaagcccttttatcttagttgggagcagcaggcgcgtatgtcaggcggatggaacttggtccggaatccagcccacctgcattgaccccgcacacaatacatgtccagatcccgggacccctcacttcgggatccagaacagttccaggggctacgaagtgggcagtacagtgttttttcggtgtaggaagggatatcacatccagggcagtaccacccgtacatgcctcgccaatctgacatggagcggaatccagactgagtgtattcctcacgcttgccggcagcctgagactcccgcacacgccgatgttcgcgctatcgacctgccaaccttcgggtatacattggtgtacacgtgccatccaggttttttcctggctggcggctccgaacatcgcacctgtaaggccgacatgaaatggacgggcaaaagccccgtgtgcaagtccaaaggcgtgagggaagtaaacgagacagtcaccaaaacacctgtgccaagcgacgtgttctttgtaaatagtctatggaagggttattacgaatacctgggcaagcgccagcccgcaaccctgactgtggactggttcaacgcaacaagcagcaaggtcaatgccacattttcggaggcttcccccgtcgagctgaagctgactggcatatacaagaaggaggaggcgcatctgcttcttaaagccttccaaattaagggccaggccgacatattcgtgagcaagttcgagaacgacaactgggggcttgatggttacgtcagctccggcctcgaacgggggggcttcacgttccagggagacatccacggcaaggattttggtaagttcaagttggagaggcaggacccgttaaaccccgatcaggacagctcttcacactaccacggaacatccagcggcagtgtcgctgcggccatcctagtcccatttttcgccctgatactaagtggatttgccttctatctgtacaaacatcggacaagacccaaggtgcagtataacggctacgccggacacgaaaactcaaacggtcaggccagctttgagaacccgatgtatgatacaaacctgaaacctacagaggctaaggctgttaggttcgacaccaccctcaacacagtgtgcacagtggtgtag

SEQ ID NO: 227765 - DNA, 10281 bp, Artificial Sequence
  derived and/or modified sequence
gtgctgcccagccacacctgtggcaaccctggagagatcctgaagggcgtgctgcacggcacccgcttcaacattggagacaagatccgctacagctgcctgcccggctacatcctggagggccacgccatcctgacctgcatcgtgtccccaggaaatggagcctcctgggacttccctgcccccttctgcagagctgagggcgcctgtggcggcaccctgcggggcaccagcagcagcatcagcagcccccacttccccagtgaatatgaaaataatgctgactgcacctggaccatcctggccgagcccggggacaccatcgccctggtgttcacagacttccagctggaggagggctatgacttcctggagatctctggaacagaggcccccagcatctggctgaccggcatgaacctgcccagccctgtgatcagcagcaagaactggctgcggctgcacttcaccagtgacagcaaccacaggaggaagggcttcaatgcccagttccaggtgaagaaggccatcgagctgaagagcagaggagtgaagatgctgcccagcaaggatggcagccacaagaacagcgtgctgagccagggcggcgtggccctggtgtctgacatgtgcccagaccccggcatcccagaaaatggaagaagagctggcagtgacttcagccgggtgggcgccaacgtgcagttcagctgtgaggacaactacgtgctgcagggcagcaagagcatcacctgccagagggtgacagagaccctggccgcctggagcgaccaccggcccatctgccgggcccggacctgtggcagcaacctgcggggccccagcggggtcatcaccagccccaactaccctgtgcagtatgaagataatgcccactgtgtgtgggtgatcaccaccacagatcctgacaaggtgatcaagctggcctttgaggagtttgagctggagcggggctatgacaccctgactgtgggagatgctgggaaggtgggggacaccaggtctgtgctgtatgtgctgaccggcagctctgtgcctgacctgattgtgtccatgagcaaccagatgtggctgcacctgcagagtgatgacagcatcggcagccctggcttcaaggctgtgtaccaggagattgaaaaaggaggctgtggggaccccggcatcccagcctacggcaagaggacaggcagcagcttcctgcacggggacaccctgacctttgaatgtcctgctgcctttgagctggtgggggagagggtcatcacctgccagcagaacaaccagtggagcggcaacaagcccagctgtgtgttcagctgcttcttcaacttcaccgccagcagcggcatcatcctgagccccaactacccagaggagtatggcaacaacatgaactgtgtgtggctgatcatcagcgagcccggcagccgcatccacctgatcttcaatgactttgatgtggagccccagtttgacttcctggccgtgaaggatgatggcatcagtgacatcaccgtgctgggcaccttctctggaaatgaggtgcccagccagctggccagcagcggccacatcgtgcggctggagttccagagcgaccacagcaccaccggccggggcttcaacatcacctacaccaccttcggccagaatgaatgtcatgaccccggcatccccatcaatggccgccgctttggagaccgcttcctgctgggcagctctgtgtccttccactgtgatgatggctttgtgaagacccagggcagcgagagcatcacctgcatcctgcaggatggaaatgtggtgtggagcagcacagtgccccgctgtgaggccccctgtggcggccacctgacagccagcagtggagtcatcctgcccccaggctggccaggctactacaaggacagcctgcactgtgagtggatcatcgaggccaagccaggccacagcatcaagatcacctttgaccgcttccagacagaggtgaactatgacaccctggaggtgagagatggccctgccagcagcagccccctcatcggggagtaccacggcacccaggccccccagttcctgatcagcactggaaacttcatgtacctgctcttcaccacagacaacagccgcagcagcatcggcttcctgatccactatgagagcgtgaccctggagagtgacagctgcctggaccccggcatccctgtgaatggccaccgccacggcggggactttggcatccgcagcacagtgaccttcagctgtgaccccggctacaccctgagtgatgatgagcccctggtgtgtgagaggaaccaccagtggaaccacgccctgcccagctgtgatgccctgtgtggcggctacatccagggcaagtctggaacagtgctgagccctggcttcccagacttctaccccaacagcctgaactgcacctggaccatcgaggtgtcccatggaaaaggagtgcagatgatcttccacaccttccacctggagagcagccatgactacctgctgatcacagaagatggcagcttcagcgagcctgtggcccggctgactggatctgtgctgccccacaccatcaaggccggcctgtttggaaacttcaccgcccagctgcgcttcatcagtgacttcagcatctcctatgagggcttcaacatcaccttctctgaatatgacctggagccctgtgatgatcctggggtgcctgccttcagccgccgcatcggcttccactttggagtgggggacagcctgaccttcagctgcttcctgggctaccgcctggagggcgccaccaagctgacctgcctgggcggcggcagaagagtgtggagcgcccccctgccccgctgtgtggccgagtgtggggcctctgtgaagggaaatgaaggcaccctgctgagccccaacttccccagcaactatgacaacaaccacgagtgcatctacaagattgaaacagaagctgggaagggcatccacctgcggaccaggagcttccagctgtttgaaggagacaccctgaaggtgtatgatggcaaggacagcagcagccggcccctgggcaccttcaccaagaatgagctgctgggcctcatcctgaacagcaccagcaaccacctgtggctggagttcaacaccaacggcagtgacacagaccagggcttccagctgacctacaccagctttgacctggtgaagtgtgaagatcctggcatccccaactacggctaccgcatcagagatgagggccacttcacagacacagtggtgctgtacagctgcaaccctggctacgccatgcacggcagcaacaccctgacctgcctgagcggggaccggcgggtgtgggacaagcccctgcccagctgcatcgcagaatgtggcggccagatccacgccgccaccagcggccgcatcctgagccctggctacccagccccctatgacaacaacctgcactgcacctggatcattgaagctgaccccgggaagaccatcagcctgcacttcatcgtgtttgacacagagatggcccatgacatcctgaaggtgtgggatggccctgtggacagcgacatcctgctgaaggagtggagcggcagcgccctgcctgaggacatccacagcaccttcaacagcctgaccctgcagtttgacagcgacttcttcatcagcaagagcggcttcagcatccagttcagcaccagcattgctgccacctgcaatgaccccggcatgccccagaatggcacccgctacggggacagccgggaggccggggacacagtgaccttccagtgtgaccccggctaccagctgcagggccaggccaagatcacctgtgtgcagctgaacaaccgcttcttctggcagcctgacccccccacctgcatcgccgcctgtggcggcaacctgactggacctgctggggtcatcctgagccccaactacccccagccctacccacctgggaaggaatgtgactggagggtgaaggtgaacccagactttgtgattgccctgatcttcaagagcttcaacatggagcccagctatgacttcctgcacatctatgaaggagaggacagcaacagccccctgattggcagctaccagggcagccaggcccctgagagaattgagagcagcggcaacagcctcttcctggccttcagaagtgatgcctctgtgggcctgagcggctttgccatcgagttcaaggagaagccccgggaggcctgctttgaccccggcaacatcatgaatggcaccagggtgggcacagacttcaagctgggcagcaccatcacctaccagtgtgacagcggctacaagatcctggaccccagcagcatcacctgtgtgattggagcagatggcaagcccagctgggaccaggtgctgcccagctgcaatgccccctgtggcggccagtacacaggcagcgagggcgtggtgctgagccccaactacccccacaactacacagctggccagatctgcctgtacagcatcaccgtgcccaaggagtttgtggtgtttggccagtttgcctacttccagacagccctgaatgacctggccgagctgtttgatggcacccacgcccaggcccggctgctgagcagcctgagcggcagccacagcggggagaccctgcccctggccaccagcaaccagatcctgctgcgcttcagcgccaagagcggggccagcgcccggggcttccactttgtgtaccaggccgtgcccaggaccagtgacacccagtgcagctctgtgcctgagcccaggtatggccgccgcatcggcagcgagttctctgctggcagcatcgtgcgctttgagtgcaaccctggctacctgctgcagggcagcacagccctgcactgccagagcgtgcccaatgccctggcccagtggaatgacaccatccccagctgtgtggtgccctgcagcggcaacttcacccagaggcggggcaccatcctgagccctggctacccagagccctacggcaacaacctgaactgcatctggaagatcatcgtgacagagggcagcggcatccaggaccccagcgaccagttctgccacggggctgagctgggcctggagatccatgatggaggagatgtgacagccccccggctgggcagcttcagcggcaccaccgtgcctgccctgctgaacagcaccagcaaccagctgtacctgcacttccagagcgacatctctgtggccgctgctggcttccacctggagtacaagacagtgggcctggccgcctgccaggagcccgccctgcccagcaacagcatcaagattggagaccgctacatggtgaatgatgtgctgtccttccagtgtgagcccggctacaccctgcagggccgcagccacatcagctgcatgcctggcaccgtgcggcgctggaactaccccagccccctgtgcatcgccacctgtggcggcaccctgagcaccctgggcggcgtcatcctgagccctggcttccctggcagctaccccaacaacctggactgcacctggaggatcagcctgcccatcggctacggggcccacatccagttcctgaacttcagcacagaggccaaccacgacttcctggagatccagaatggcccctaccacaccagccccatgattggccagttctctggaacagacctgcctgctgccctgctgagcaccacccatgagaccctcatccacttctacagcgaccacagccagaaccggcagggcttcaagctggcctaccaggcctatgagctgcagaactgcccagaccccccacccttccagaatggctacatgatcaacagcgactacagcgtgggccagagcgtgtcctttgagtgctacccaggctacatcctgattggccaccctgtgctgacctgccagcacggcatcaacagaaactggaactaccccttcccccgctgtgatgccccctgtggctacaacgtgaccagccagaatggcaccatctacagccctggcttcccagatgagtaccccatcctgaaggactgcatctggctgatcaccgtgcccccaggccacggcgtgtacatcaacttcaccctgctgcagacagaagctgtgaatgactacatcgctgtgtgggatggccctgaccagaacagcccccagctgggcgtcttcagcggcaacacagccctggagacagcctacagcagcaccaaccaggtgctgctgaagttccacagcgacttcagcaatggaggcttctttgtgctgaacttccacgccttccagctgaagaagtgccagcccccacctgctgtgccccaggccgagatgctgacagaagatgatgactttgagatcggggactttgtgaagtaccagtgccaccctggctacaccctggtgggcacagacatcctgacctgcaagctgagcagccagctgcagtttgagggcagcctgcccacctgtgaggcccagtgcccagccaatgaggtgaggacaggcagcagtggagtcatcctgagccctggctacccaggcaactacttcaacagccagacctgctcctggagcatcaaggtggagcccaactacaacatcaccatctttgtggacaccttccagagcgagaagcagtttgatgccctggaggtgtttgatggcagcagcggccagagccccctgctggtggtgctgagcggcaaccacacagagcagagcaacttcaccagccgcagcaaccagctgtacctgcgctggagcacagaccacgccaccagcaagaagggcttcaagatccgctatgctgccccctactgcagcctgacccaccccctgaagaatggaggcatcctgaacagaacagctggagctgtgggcagcaaggtgcactacttctgcaagccaggctacaggatggtgggccacagcaatgccacctgcagaagaaaccccctgggcatgtaccagtgggacagcctgacccccctgtgccaggccgtgtcctgtggcatccctgagagccctggaaatggcagcttcaccggaaatgagttcaccctggacagcaaggtggtgtatgagtgccacgagggcttcaagctggagagcagccagcaggccacagctgtgtgccaggaggatggcctgtggagcaacaagggcaagccacccacctgcaagcctgtggcctgccccagcattgaggcccagctgtctgaacatgtgatctggaggctggtgtctggcagcctgaatgaatatggagcccaggtgctgctgagctgcagccctggctactacctggagggctggaggctgctgcgctgccaggccaacggcacctggaacattggagatgagcggcccagctgcagggtcatcagctgtggcagcctgtccttcccccccaacggcaacaagattggcaccctgactgtgtatggagccacagccatcttcacctgcaacacaggctacaccctggtgggcagccacgtgagagaatgtctggccaacggcctgtggagcggcagcgagacccgctgcctggccggccactgcggcagcccagaccccatcgtgaatggccacatctctggagatggcttctcctacagagacacagtggtgtaccagtgcaaccctggcttccggctggtgggcacctctgtgcgcatctgcctgcaggaccacaagtggagcggccagacccctgtgtgtgtgcccatcacctgtggccaccctggcaacccagcccacggcttcaccaacggcagcgagttcaacctgaatgatgtggtgaacttcacctgcaacacaggctacctgctgcagggcgtgtcccgggcccagtgccgcagcaatggccagtggagcagccccctgcccacctgccgggtggtgaactgcagcgaccccggctttgtggagaatgccatccgccacggccagcagaacttccctgagagctttgaatatggcatgagcatcctgtaccactgcaagaagggcttctacctgctgggcagcagcgccctgacctgcatggccaacggcctgtgggacaggagcctgcccaagtgcctggccatcagctgtggccaccctggggtgcctgccaatgctgtgctgactggagagctgttcacctatggagctgtggtgcactacagctgccggggcagcgagagcctgattggaaatgacaccagggtgtgccaggaggacagccactggagcggggccctgccccactgcaccggcaacaaccctggcttctgtggggaccccggcaccccagcccacggcagccggctgggagatgacttcaagaccaagagcctgctgcgcttcagctgtgagatgggccaccagctgcggggcagccctgagaggacctgcctgctgaatggctcctggagcggcctgcagcctgtgtgtgaggccgtgtcctgtggcaaccctggcacccccaccaacggcatgattgtgtccagtgatggcatcctcttcagcagcagcgtcatctatgcctgctgggagggctacaagaccagcggcctgatgaccaggcactgcacagccaacggcacctggacaggaacagccccagactgcaccatcatcagctgtggggaccccggcaccctggccaacggcatccagtttggaacagacttcaccttcaacaagacagtgtcctaccagtgcaaccctggctacgtgatggaggccgtgaccagcgccaccatccgctgcaccaaggatggccgctggaaccccagcaagcctgtgtgcaaggctgtgctgtgcccccagcccccacctgtgcagaatggaacagtggagggcagtgacttccgctggggcagcagcatctcctacagctgcatggatggctaccagctgagccacagcgccatcctgagctgtgagggccggggcgtgtggaagggggagatcccccagtgcctgcccgtcttctgtggggaccccggcatcccagctgagggccgcctgagcggcaagagcttcacctacaagtctgaggtgttcttccagtgcaagagccccttcatcctggtgggcagcagccggcgggtgtgccaggctgatggcacctggagcggcatccagcccacctgcattgatcctgcccacaacacctgcccagaccccggcaccccccacttcggcatccagaacagcagccggggctatgaggtgggcagcaccgtcttcttccgctgcaggaagggctaccacatccagggcagcaccaccaggacctgcctggccaacctgacctggagcggcatccagacagagtgcatcccccacgcctgccggcagcctgagaccccagcccacgcagatgtgcgggccatcgacctgcccaccttcggctacaccctggtgtacacctgccaccctggcttcttcctggccggcggcagcgagcacaggacctgcaaggctgacatgaagtggacaggcaagagccctgtgtgcaagagcaaaggagtgcgggaggtgaatgaaacagtgaccaagacccctgtgcccagtgatgtgttctttgtgaacagcctgtggaagggctactatgagtacctgggcaagaggcagcctgccaccctgactgtggactggttcaatgccaccagcagcaaggtgaatgccaccttcagcgaggccagccctgtggagctgaagctgaccggcatctacaagaaggaggaggcccacctgctgctgaaggccttccagatcaagggccaggccgacatctttgtgtccaagtttgaaaatgacaactggggcctggatggctacgtgagcagcggcctggagcggggcggcttcaccttccagggcgacatccacggcaaggactttgggaagttcaagctggagcggcaggaccccctgaacccagaccaggacagcagcagccactaccacggcaccagcagcggctctgtggccgccgccatcctggtgcccttctttgccctgatcctgagcggctttgccttctacctgtacaagcacaggacccggcccaaggtgcagtacaacggctacgccggccacgagaacagcaatggccaggccagctttgagaaccccatgtatgacaccaacctgaagcccacagaggccaaggctgtgcgctttgacaccaccctgaacacagtgtgcaccgtggtgtag

SEQ ID NO: 227766 - DNA, 10167 bp, Artificial Sequence
  derived and/or modified sequence
atgacagcctggaggcgcttccagagcctgctgctgctgctgggcctgctggtgctgtgtgcccggctgctgacagctgccaagggccagaactgtggcggcctggtgcagggccccaacggcaccatcgagagccctggcttcccccacggctaccccaactatgccaactgcacctggatcatcatcaccggggagaggaaccgcatccagctgtccttccacacctttgccctggaggaggactttgacatcctgtctgtgtatgatggccagccccagcagggcaacctgaaggtgcggctgagcggcttccagctgcccagcagcatcgtgtccacaggcagcatcctgaccctgtggttcaccacagactttgctgtgtctgcccagggcttcaaggccctgtatgaggtgctgcccagccacacctgtggcaaccctggagagatcctgaagggcgtgctgcacggcacccgcttcaacattggagacaagatccgctacagctgcctgcccggctacatcctggagggccacgccatcctgacctgcatcgtgtccccaggaaatggagcctcctgggacttccctgcccccttctgcagagctgagggcgcctgtggcggcaccctgcggggcaccagcagcagcatcagcagcccccacttccccagtgaatatgaaaataatgctgactgcacctggaccatcctggccgagcccggggacaccatcgccctggtgttcacagacttccagctggaggagggctatgacttcctggagatctctggaacagaggcccccagcatctggctgaccggcatgaacctgcccagccctgtgatcagcagcaagaactggctgcggctgcacttcaccagtgacagcaaccacaggaggaagggcttcaatgcccagttccaggtgaagaaggccatcgagctgaagagcagaggagtgaagatgctgcccagcaaggatggcagccacaagaacagcgtgctgagccagggcggcgtggccctggtgtctgacatgtgcccagaccccggcatcccagaaaatggaagaagagctggcagtgacttcagccgggtgggcgccaacgtgcagttcagctgtgaggacaactacgtgctgcagggcagcaagagcatcacctgccagagggtgacagagaccctggccgcctggagcgaccaccggcccatctgccgggcccggacctgtggcagcaacctgcggggccccagcggggtcatcaccagccccaactaccctgtgcagtatgaagataatgcccactgtgtgtgggtgatcaccaccacagatcctgacaaggtgatcaagctggcctttgaggagtttgagctggagcggggctatgacaccctgactgtgggagatgctgggaaggtgggggacaccaggtctgtgctgtatgtgctgaccggcagctctgtgcctgacctgattgtgtccatgagcaaccagatgtggctgcacctgcagagtgatgacagcatcggcagccctggcttcaaggctgtgtaccaggagattgaaaaaggaggctgtggggaccccggcatcccagcctacggcaagaggacaggcagcagcttcctgcacggggacaccctgacctttgaatgtcctgctgcctttgagctggtgggggagagggtcatcacctgccagcagaacaaccagtggagcggcaacaagcccagctgtgtgttcagctgcttcttcaacttcaccgccagcagcggcatcatcctgagccccaactacccagaggagtatggcaacaacatgaactgtgtgtggctgatcatcagcgagcccggcagccgcatccacctgatcttcaatgactttgatgtggagccccagtttgacttcctggccgtgaaggatgatggcatcagtgacatcaccgtgctgggcaccttctctggaaatgaggtgcccagccagctggccagcagcggccacatcgtgcggctggagttccagagcgaccacagcaccaccggccggggcttcaacatcacctacaccaccttcggccagaatgaatgtcatgaccccggcatccccatcaatggccgccgctttggagaccgcttcctgctgggcagctctgtgtccttccactgtgatgatggctttgtgaagacccagggcagcgagagcatcacctgcatcctgcaggatggaaatgtggtgtggagcagcacagtgccccgctgtgaggccccctgtggcggccacctgacagccagcagtggagtcatcctgcccccaggctggccaggctactacaaggacagcctgcactgtgagtggatcatcgaggccaagccaggccacagcatcaagatcacctttgaccgcttccagacagaggtgaactatgacaccctggaggtgagagatggccctgccagcagcagccccctcatcggggagtaccacggcacccaggccccccagttcctgatcagcactggaaacttcatgtacctgctcttcaccacagacaacagccgcagcagcatcggcttcctgatccactatgagagcgtgaccctggagagtgacagctgcctggaccccggcatccctgtgaatggccaccgccacggcggggactttggcatccgcagcacagtgaccttcagctgtgaccccggctacaccctgagtgatgatgagcccctggtgtgtgagaggaaccaccagtggaaccacgccctgcccagctgtgatgccctgtgtggcggctacatccagggcaagtctggaacagtgctgagccctggcttcccagacttctaccccaacagcctgaactgcacctggaccatcgaggtgtcccatggaaaaggagtgcagatgatcttccacaccttccacctggagagcagccatgactacctgctgatcacagaagatggcagcttcagcgagcctgtggcccggctgactggatctgtgctgccccacaccatcaaggccggcctgtttggaaacttcaccgcccagctgcgcttcatcagtgacttcagcatctcctatgagggcttcaacatcaccttctctgaatatgacctggagccctgtgatgatcctggggtgcctgccttcagccgccgcatcggcttccactttggagtgggggacagcctgaccttcagctgcttcctgggctaccgcctggagggcgccaccaagctgacctgcctgggcggcggcagaagagtgtggagcgcccccctgccccgctgtgtggccgagtgtggggcctctgtgaagggaaatgaaggcaccctgctgagccccaacttccccagcaactatgacaacaaccacgagtgcatctacaagattgaaacagaagctgggaagggcatccacctgcggaccaggagcttccagctgtttgaaggagacaccctgaaggtgtatgatggcaaggacagcagcagccggcccctgggcaccttcaccaagaatgagctgctgggcctcatcctgaacagcaccagcaaccacctgtggctggagttcaacaccaacggcagtgacacagaccagggcttccagctgacctacaccagctttgacctggtgaagtgtgaagatcctggcatccccaactacggctaccgcatcagagatgagggccacttcacagacacagtggtgctgtacagctgcaaccctggctacgccatgcacggcagcaacaccctgacctgcctgagcggggaccggcgggtgtgggacaagcccctgcccagctgcatcgcagaatgtggcggccagatccacgccgccaccagcggccgcatcctgagccctggctacccagccccctatgacaacaacctgcactgcacctggatcattgaagctgaccccgggaagaccatcagcctgcacttcatcgtgtttgacacagagatggcccatgacatcctgaaggtgtgggatggccctgtggacagcgacatcctgctgaaggagtggagcggcagcgccctgcctgaggacatccacagcaccttcaacagcctgaccctgcagtttgacagcgacttcttcatcagcaagagcggcttcagcatccagttcagcaccagcattgctgccacctgcaatgaccccggcatgccccagaatggcacccgctacggggacagccgggaggccggggacacagtgaccttccagtgtgaccccggctaccagctgcagggccaggccaagatcacctgtgtgcagctgaacaaccgcttcttctggcagcctgacccccccacctgcatcgccgcctgtggcggcaacctgactggacctgctggggtcatcctgagccccaactacccccagccctacccacctgggaaggaatgtgactggagggtgaaggtgaacccagactttgtgattgccctgatcttcaagagcttcaacatggagcccagctatgacttcctgcacatctatgaaggagaggacagcaacagccccctgattggcagctaccagggcagccaggcccctgagagaattgagagcagcggcaacagcctcttcctggccttcagaagtgatgcctctgtgggcctgagcggctttgccatcgagttcaaggagaagccccgggaggcctgctttgaccccggcaacatcatgaatggcaccagggtgggcacagacttcaagctgggcagcaccatcacctaccagtgtgacagcggctacaagatcctggaccccagcagcatcacctgtgtgattggagcagatggcaagcccagctgggaccaggtgctgcccagctgcaatgccccctgtggcggccagtacacaggcagcgagggcgtggtgctgagccccaactacccccacaactacacagctggccagatctgcctgtacagcatcaccgtgcccaaggagtttgtggtgtttggccagtttgcctacttccagacagccctgaatgacctggccgagctgtttgatggcacccacgcccaggcccggctgctgagcagcctgagcggcagccacagcggggagaccctgcccctggccaccagcaaccagatcctgctgcgcttcagcgccaagagcggggccagcgcccggggcttccactttgtgtaccaggccgtgcccaggaccagtgacacccagtgcagctctgtgcctgagcccaggtatggccgccgcatcggcagcgagttctctgctggcagcatcgtgcgctttgagtgcaaccctggctacctgctgcagggcagcacagccctgcactgccagagcgtgcccaatgccctggcccagtggaatgacaccatccccagctgtgtggtgccctgcagcggcaacttcacccagaggcggggcaccatcctgagccctggctacccagagccctacggcaacaacctgaactgcatctggaagatcatcgtgacagagggcagcggcatccagatccaggtgatcagctttgccacagagcagaactgggacagcctggagatccatgatggaggagatgtgacagccccccggctgggcagcttcagcggcaccaccgtgcctgccctgctgaacagcaccagcaaccagctgtacctgcacttccagagcgacatctctgtggccgccgccggcttccacctggagtacaagacagtgggcctggccgcctgccaggagcccgccctgcccagcaacagcatcaagatcggggaccgctacatggtgaatgatgtgctgtccttccagtgtgagcccggctacaccctgcagggccgcagccacatcagctgcatgcctggcaccgtgcggcgctggaactaccccagccccctgtgcatcgccacctgtggcggcaccctgagcaccctgggcggcgtcatcctgagccctggcttccctggcagctaccccaacaacctggactgcacctggaggatcagcctgcccatcggctatggagcccacatccagttcctgaacttcagcacagaggccaaccacgacttcctggagatccagaatggcccctaccacaccagccccatgattggccagttcagcggcacagacctgcctgctgccctgctgagcaccacccatgagaccctcatccacttctacagcgaccacagccagaaccggcagggcttcaagctggcctaccaggcctatgagctgcagaactgcccagaccccccacccttccagaatggctacatgatcaacagcgactacagcgtgggccagagcgtgtcctttgagtgctacccaggctacatcctgattggccaccctgtgctgacctgccagcacggcatcaacagaaactggaactaccccttcccccgctgtgatgccccctgtggctacaacgtgaccagccagaatggcaccatctacagccctggcttcccagatgagtaccccatcctgaaggactgcatctggctgatcaccgtgcccccaggccatggagtgtacatcaacttcaccctgctgcagacagaggccgtgaatgactacatcgctgtgtgggatggccctgaccagaacagcccccagctgggcgtcttcagcggcaacacagccctggagacagcctacagcagcaccaaccaggtgctgctgaagttccacagcgacttcagcaatggaggcttctttgtgctgaacttccacgccttccagctgaagaagtgccagcccccacctgctgtgccccaggccgagatgctgacagaagatgatgactttgaaattggagactttgtgaagtaccagtgccaccctggctacaccctggtgggcacagacatcctgacctgcaagctgagcagccagctgcagtttgagggcagcctgcccacctgtgaggcccagtgcccagccaatgaggtgaggacaggcagcagcggggtcatcctgagccctggctacccaggcaactacttcaacagccagacctgctcctggagcatcaaggtggagcccaactacaacatcaccatctttgtggacaccttccagagcgagaagcagtttgatgccctggaggtgtttgatggcagcagcggccagagccccctgctggtggtgctgagcggcaaccacacagagcagagcaacttcaccagccgcagcaaccagctgtacctgcgctggagcacagaccacgccaccagcaagaagggcttcaagatccgctatgctgccccctactgcagcctgacccaccccctgaagaatggaggcatcctgaacagaacagctggagctgtgggcagcaaggtgcactacttctgcaagccaggctacaggatggtgggccacagcaatgccacctgcagaagaaaccccctgggcatgtaccagtgggacagcctgacccccctgtgccaggccgtgtcctgtggcatccctgagagccctggaaatggcagcttcaccggaaatgagttcaccctggacagcaaggtggtgtatgaatgtcatgagggcttcaagctggagagcagccagcaggccacagctgtgtgccaggaggatggcctgtggagcaacaagggcaagccacccacctgcaagcctgtggcctgccccagcattgaggcccagctgtctgagcacgtgatctggaggctggtgtctggcagcctgaatgaatatggagcccaggtgctgctgagctgcagccctggctactacctggagggctggaggctgctgcgctgccaggccaacggcacctggaacattggagatgagcggcccagctgccgggccggccactgcggcagcccagaccccatcgtgaatggccacatctctggagatggcttctcctacagagacacagtggtgtaccagtgcaaccctggcttccggctggtgggcacctctgtgcgcatctgcctgcaggaccacaagtggagcggccagacccctgtgtgtgtgcccatcacctgtggccaccctggcaacccagcccacggcttcaccaatggaagtgagttcaacctgaatgatgtggtgaacttcacctgcaacacaggctacctgctgcagggcgtgtcccgggcccagtgccgcagcaatggccagtggagcagccccctgcccacctgccgggtggtgaactgcagcgaccccggctttgtggagaatgccatcagacatggccagcagaacttccctgagagctttgaatatggcatgagcatcctgtaccactgcaagaagggcttctacctgctgggcagcagcgccctgacctgcatggccaacggcctgtgggacaggagcctgcccaagtgcctggccatcagctgtggccaccctggggtgcctgccaatgctgtgctgaccggggagctgttcacctacggggctgtggtgcactacagctgccggggcagcgagagcctgattggaaatgacaccagggtgtgccaggaggacagccactggagcggggccctgccccactgcaccggcaacaaccctggcttctgtggggaccccggcaccccagcccacggcagccggctgggagatgacttcaagaccaagagcctgctgcgcttcagctgtgagatgggccaccagctgcggggcagccctgagaggacctgcctgctgaatggctcctggagcggcctgcagcctgtgtgtgaggccgtgctgtgcccccagcccccacctgtgcagaatggaacagtggagggcagtgacttccgctggggcagcagcatctcctacagctgcatggatggctaccagctgagccacagcgccatcctgagctgtgagggccggggcgtgtggaagggggagatcccccagtgcctgcccgtcttctgtggggaccccggcatcccagctgagggccgcctgagcggcaagagcttcacctacaagtctgaggtgttcttccagtgcaagagccccttcatcctggtgggcagcagccggcgggtgtgccaggctgatggcacctggagcggcatccagcccacctgcattgatcctgcccacaacacctgcccagaccccggcaccccccacttcggcatccagaacagcagccggggctatgaggtgggcagcaccgtcttcttccgctgcaggaagggctaccacatccagggcagcaccaccaggacctgcctggccaacctgacctggagcggcatccagacagagtgcatcccccacgcctgccggcagcctgagaccccagcccacgcagatgtgcgggccatcgacctgcccaccttcggctacaccctggtgtacacctgccaccctggcttcttcctggccggcggcagcgagcacaggacctgcaaggctgacatgaagtggacaggcaagagccctgtgtgcaagagcaaaggagtgcgggaggtgaatgaaacagtgaccaagacccctgtgcccagtgatgtgttctttgtgaacagcctgtggaagggctactatgagtacctgggcaagaggcagcctgccaccctgactgtggactggttcaatgccaccagcagcaaggtgaatgccaccttcagcgaggccagccctgtggagctgaagctgaccggcatctacaagaaggaggaggcccacctgctgctgaaggccttccagatcaagggccaggccgacatctttgtgtccaagtttgaaaatgacaactggggcctggatggctacgtgagcagcggcctggagcggggcggcttcaccttccagggcgacatccacggcaaggactttgggaagttcaagctggagcggcaggaccccctgaacccagaccaggacagcagcagccactaccacggcaccagcagcggctctgtggccgccgccatcctggtgcccttctttgccctgatcctgagcggctttgccttctacctgtacaagcacaggacccggcccaaggtgcagtacaacggctacgccggccacgagaacagcaatggccaggccagctttgagaaccccatgtatgacaccaacctgaagcccacagaggccaaggctgtgcgctttgacaccaccctgaacacagtgtgcaccgtggtgtag

SEQ ID NO: 227767 - DNA, 10698 bp, Artificial Sequence
  derived and/or modified sequence
atgacagcctggaggcgcttccagagcctgctgctgctgctgggcctgctggtgctgtgtgcccggctgctgacagctgccaagggccagaactgtggcggcctggtgcagggccccaacggcaccatcgagagccctggcttcccccacggctaccccaactatgccaactgcacctggatcatcatcaccggggagaggaaccgcatccagctgtccttccacacctttgccctggaggaggactttgacatcctgtctgtgtatgatggccagccccagcagggcaacctgaaggtgcggctgagcggcttccagctgcccagcagcatcgtgtccacaggcagcatcctgaccctgtggttcaccacagactttgctgtgtctgcccagggcttcaaggccctgtatgaggtgctgcccagccacacctgtggcaaccctggagagatcctgaagggcgtgctgcacggcacccgcttcaacattggagacaagatccgctacagctgcctgcccggctacatcctggagggccacgccatcctgacctgcatcgtgtccccaggaaatggagcctcctgggacttccctgcccccttctgcagagctgagggcgcctgtggcggcaccctgcggggcaccagcagcagcatcagcagcccccacttccccagtgaatatgaaaataatgctgactgcacctggaccatcctggccgagcccggggacaccatcgccctggtgttcacagacttccagctggaggagggctatgacttcctggagatctctggaacagaggcccccagcatctggctgaccggcatgaacctgcccagccctgtgatcagcagcaagaactggctgcggctgcacttcaccagtgacagcaaccacaggaggaagggcttcaatgcccagttccaggtgaagaaggccatcgagctgaagagcagaggagtgaagatgctgcccagcaaggatggcagccacaagaacagcgtgctgagccagggcggcgtggccctggtgtctgacatgtgcccagaccccggcatcccagaaaatggaagaagagctggcagtgacttcagccgggtgggcgccaacgtgcagttcagctgtgaggacaactacgtgctgcagggcagcaagagcatcacctgccagagggtgacagagaccctggccgcctggagcgaccaccggcccatctgccgggcccggacctgtggcagcaacctgcggggccccagcggggtcatcaccagccccaactaccctgtgcagtatgaagataatgcccactgtgtgtgggtgatcaccaccacagatcctgacaaggtgatcaagctggcctttgaggagtttgagctggagcggggctatgacaccctgactgtgggagatgctgggaaggtgggggacaccaggtctgtgctgtatgtgctgaccggcagctctgtgcctgacctgattgtgtccatgagcaaccagatgtggctgcacctgcagagtgatgacagcatcggcagccctggcttcaaggctgtgtaccaggagattgaaaaaggaggctgtggggaccccggcatcccagcctacggcaagaggacaggcagcagcttcctgcacggggacaccctgacctttgaatgtcctgctgcctttgagctggtgggggagagggtcatcacctgccagcagaacaaccagtggagcggcaacaagcccagctgtgtgttcagctgcttcttcaacttcaccgccagcagcggcatcatcctgagccccaactacccagaggagtatggcaacaacatgaactgtgtgtggctgatcatcagcgagcccggcagccgcatccacctgatcttcaatgactttgatgtggagccccagtttgacttcctggccgtgaaggatgatggcatcagtgacatcaccgtgctgggcaccttctctggaaatgaggtgcccagccagctggccagcagcggccacatcgtgcggctggagttccagagcgaccacagcaccaccggccggggcttcaacatcacctacaccaccttcggccagaatgaatgtcatgaccccggcatccccatcaatggccgccgctttggagaccgcttcctgctgggcagctctgtgtccttccactgtgatgatggctttgtgaagacccagggcagcgagagcatcacctgcatcctgcaggatggaaatgtggtgtggagcagcacagtgccccgctgtgaggccccctgtggcggccacctgacagccagcagtggagtcatcctgcccccaggctggccaggctactacaaggacagcctgcactgtgagtggatcatcgaggccaagccaggccacagcatcaagatcacctttgaccgcttccagacagaggtgaactatgacaccctggaggtgagagatggccctgccagcagcagccccctcatcggggagtaccacggcacccaggccccccagttcctgatcagcactggaaacttcatgtacctgctcttcaccacagacaacagccgcagcagcatcggcttcctgatccactatgagagcgtgaccctggagagtgacagctgcctggaccccggcatccctgtgaatggccaccgccacggcggggactttggcatccgcagcacagtgaccttcagctgtgaccccggctacaccctgagtgatgatgagcccctggtgtgtgagaggaaccaccagtggaaccacgccctgcccagctgtgatgccctgtgtggcggctacatccagggcaagtctggaacagtgctgagccctggcttcccagacttctaccccaacagcctgaactgcacctggaccatcgaggtgtcccatggaaaaggagtgcagatgatcttccacaccttccacctggagagcagccatgactacctgctgatcacagaagatggcagcttcagcgagcctgtggcccggctgactggatctgtgctgccccacaccatcaaggccggcctgtttggaaacttcaccgcccagctgcgcttcatcagtgacttcagcatctcctatgagggcttcaacatcaccttctctgaatatgacctggagccctgtgatgatcctggggtgcctgccttcagccgccgcatcggcttccactttggagtgggggacagcctgaccttcagctgcttcctgggctaccgcctggagggcgccaccaagctgacctgcctgggcggcggcagaagagtgtggagcgcccccctgccccgctgtgtggccgagtgtggggcctctgtgaagggaaatgaaggcaccctgctgagccccaacttccccagcaactatgacaacaaccacgagtgcatctacaagattgaaacagaagctgggaagggcatccacctgcggaccaggagcttccagctgtttgaaggagacaccctgaaggtgtatgatggcaaggacagcagcagccggcccctgggcaccttcaccaagaatgagctgctgggcctcatcctgaacagcaccagcaaccacctgtggctggagttcaacaccaacggcagtgacacagaccagggcttccagctgacctacaccagctttgacctggtgaagtgtgaagatcctggcatccccaactacggctaccgcatcagagatgagggccacttcacagacacagtggtgctgtacagctgcaaccctggctacgccatgcacggcagcaacaccctgacctgcctgagcggggaccggcgggtgtgggacaagcccctgcccagctgcatcgcagaatgtggcggccagatccacgccgccaccagcggccgcatcctgagccctggctacccagccccctatgacaacaacctgcactgcacctggatcattgaagctgaccccgggaagaccatcagcctgcacttcatcgtgtttgacacagagatggcccatgacatcctgaaggtgtgggatggccctgtggacagcgacatcctgctgaaggagtggagcggcagcgccctgcctgaggacatccacagcaccttcaacagcctgaccctgcagtttgacagcgacttcttcatcagcaagagcggcttcagcatccagttcagcaccagcattgctgccacctgcaatgaccccggcatgccccagaatggcacccgctacggggacagccgggaggccggggacacagtgaccttccagtgtgaccccggctaccagctgcagggccaggccaagatcacctgtgtgcagctgaacaaccgcttcttctggcagcctgacccccccacctgcatcgccgcctgtggcggcaacctgactggacctgctggggtcatcctgagccccaactacccccagccctacccacctgggaaggaatgtgactggagggtgaaggtgaacccagactttgtgattgccctgatcttcaagagcttcaacatggagcccagctatgacttcctgcacatctatgaaggagaggacagcaacagccccctgattggcagctaccagggcagccaggcccctgagagaattgagagcagcggcaacagcctcttcctggccttcagaagtgatgcctctgtgggcctgagcggctttgccatcgagttcaaggagaagccccgggaggcctgctttgaccccggcaacatcatgaatggcaccagggtgggcacagacttcaagctgggcagcaccatcacctaccagtgtgacagcggctacaagatcctggaccccagcagcatcacctgtgtgattggagcagatggcaagcccagctgggaccaggtgctgcccagctgcaatgccccctgtggcggccagtacacaggcagcgagggcgtggtgctgagccccaactacccccacaactacacagctggccagatctgcctgtacagcatcaccgtgcccaaggagtttgtggtgtttggccagtttgcctacttccagacagccctgaatgacctggccgagctgtttgatggcacccacgcccaggcccggctgctgagcagcctgagcggcagccacagcggggagaccctgcccctggccaccagcaaccagatcctgctgcgcttcagcgccaagagcggggccagcgcccggggcttccactttgtgtaccaggccgtgcccaggaccagtgacacccagtgcagctctgtgcctgagcccaggtatggccgccgcatcggcagcgagttctctgctggcagcatcgtgcgctttgagtgcaaccctggctacctgctgcagggcagcacagccctgcactgccagagcgtgcccaatgccctggcccagtggaatgacaccatccccagctgtgtggtgccctgcagcggcaacttcacccagaggcggggcaccatcctgagccctggctacccagagccctacggcaacaacctgaactgcatctggaagatcatcgtgacagagggcagcggcatccagatccaggtgatcagctttgccacagagcagaactgggacagcctggagatccatgatggaggagatgtgacagccccccggctgggcagcttcagcggcaccaccgtgcctgccctgctgaacagcaccagcaaccagctgtacctgcacttccagagcgacatctctgtggccgccgccggcttccacctggagtacaagacagtgggcctggccgcctgccaggagcccgccctgcccagcaacagcatcaagatcggggaccgctacatggtgaatgatgtgctgtccttccagtgtgagcccggctacaccctgcagggccgcagccacatcagctgcatgcctggcaccgtgcggcgctggaactaccccagccccctgtgcatcgccacctgtggcggcaccctgagcaccctgggcggcgtcatcctgagccctggcttccctggcagctaccccaacaacctggactgcacctggaggatcagcctgcccatcggctatggagcccacatccagttcctgaacttcagcacagaggccaaccacgacttcctggagatccagaatggcccctaccacaccagccccatgattggccagttcagcggcacagacctgcctgctgccctgctgagcaccacccatgagaccctcatccacttctacagcgaccacagccagaaccggcagggcttcaagctggcctaccaggcctatgagctgcagaactgcccagaccccccacccttccagaatggctacatgatcaacagcgactacagcgtgggccagagcgtgtcctttgagtgctacccaggctacatcctgattggccaccctgtgctgacctgccagcacggcatcaacagaaactggaactaccccttcccccgctgtgatgccccctgtggctacaacgtgaccagccagaatggcaccatctacagccctggcttcccagatgagtaccccatcctgaaggactgcatctggctgatcaccgtgcccccaggccatggagtgtacatcaacttcaccctgctgcagacagaggccgtgaatgactacatcgctgtgtgggatggccctgaccagaacagcccccagctgggcgtcttcagcggcaacacagccctggagacagcctacagcagcaccaaccaggtgctgctgaagttccacagcgacttcagcaatggaggcttctttgtgctgaacttccacgccttccagctgaagaagtgccagcccccacctgctgtgccccaggccgagatgctgacagaagatgatgactttgaaattggagactttgtgaagtaccagtgccaccctggctacaccctggtgggcacagacatcctgacctgcaagctgagcagccagctgcagtttgagggcagcctgcccacctgtgaggcccagtgcccagccaatgaggtgaggacaggcagcagcggggtcatcctgagccctggctacccaggcaactacttcaacagccagacctgctcctggagcatcaaggtggagcccaactacaacatcaccatctttgtggacaccttccagagcgagaagcagtttgatgccctggaggtgtttgatggcagcagcggccagagccccctgctggtggtgctgagcggcaaccacacagagcagagcaacttcaccagccgcagcaaccagctgtacctgcgctggagcacagaccacgccaccagcaagaagggcttcaagatccgctatgctgccccctactgcagcctgacccaccccctgaagaatggaggcatcctgaacagaacagctggagctgtgggcagcaaggtgcactacttctgcaagccaggctacaggatggtgggccacagcaatgccacctgcagaagaaaccccctgggcatgtaccagtgggacagcctgacccccctgtgccaggccgtgtcctgtggcatccctgagagccctggaaatggcagcttcaccggaaatgagttcaccctggacagcaaggtggtgtatgaatgtcatgagggcttcaagctggagagcagccagcaggccacagctgtgtgccaggaggatggcctgtggagcaacaagggcaagccacccacctgcaagcctgtggcctgccccagcattgaggcccagctgtctgagcacgtgatctggaggctggtgtctggcagcctgaatgaatatggagcccaggtgctgctgagctgcagccctggctactacctggagggctggaggctgctgcgctgccaggccaacggcacctggaacattggagatgagcggcccagctgcagggtcatcagctgtggcagcctgtccttccccccaaatggaaacaagattggcaccctgactgtgtatggagccacagccatcttcacctgcaacacaggctacaccctggtgggcagccacgtgcgggagtgcctggccaacggcctgtggagcggcagcgagacccgctgcctggccggccactgcggcagcccagaccccatcgtgaatggccacatctctggagatggcttctcctacagagacacagtggtgtaccagtgcaaccctggcttccggctggtgggcacctctgtgcgcatctgcctgcaggaccacaagtggagcggccagacccctgtgtgtgtgcccatcacctgtggccaccctggcaacccagcccacggcttcaccaatggaagtgagttcaacctgaatgatgtggtgaacttcacctgcaacacaggctacctgctgcagggcgtgtcccgggcccagtgccgcagcaatggccagtggagcagccccctgcccacctgccgggtggtgaactgcagcgaccccggctttgtggagaatgccatcagacatggccagcagaacttccctgagagctttgaatatggcatgagcatcctgtaccactgcaagaagggcttctacctgctgggcagcagcgccctgacctgcatggccaacggcctgtgggacaggagcctgcccaagtgcctggccatcagctgtggccaccctggggtgcctgccaatgctgtgctgaccggggagctgttcacctacggggctgtggtgcactacagctgccggggcagcgagagcctgattggaaatgacaccagggtgtgccaggaggacagccactggagcggggccctgccccactgcaccggcaacaaccctggcttctgtggggaccccggcaccccagcccacggcagccggctgggagatgacttcaagaccaagagcctgctgcgcttcagctgtgagatgggccaccagctgcggggcagccctgagaggacctgcctgctgaatggctcctggagcggcctgcagcctgtgtgtgaggccgtgtcctgtggcaaccctggcacccccaccaacggcatgattgtgtccagtgatggcatcctcttcagcagcagcgtcatctatgcctgctgggagggctacaagaccagcggcctgatgaccaggcactgcacagccaacggcacctggacaggaacagccccagactgcaccatcatcagctgtggggaccccggcaccctggccaacggcatccagtttggaacagacttcaccttcaacaagacagtgtcctaccagtgcaaccctggctacgtgatggaggccgtgaccagcgccaccatccgctgcaccaaggatggccgctggaaccccagcaagcctgtgtgcaaggctgtgctgtgcccccagcccccacctgtgcagaatggcaccgtggagggcagtgacttccgctggggcagcagcatctcctacagctgcatggatggctaccagctgagccacagcgccatcctgagctgtgagggccggggcgtgtggaagggggagatcccccagtgcctgcctgtgttctgtggggaccccggcatcccagctgagggccgcctgagcggcaagagcttcacctacaagtctgaggtgttcttccagtgcaagagccccttcatcctggtgggcagcagcagaagagtgtgccaggctgatggcacctggagcggcatccagcccacctgcatcgaccctgcccacaacacctgcccagaccccggcaccccccacttcggcatccagaacagcagccggggctatgaggtgggcagcacagtgttcttccgctgcaggaagggctaccacatccagggcagcaccaccaggacctgcctggccaacctgacctggagcggcatccagacagagtgcatcccccacgcctgccggcagcctgagaccccagcccatgctgatgtgcgggccatcgacctgcccaccttcggctacaccctggtgtacacctgccaccctggcttcttcctggccggcggcagcgagcacaggacctgcaaggctgacatgaagtggacaggcaagagccctgtgtgcaagagcaagggcgtgcgggaggtgaatgagaccgtgaccaagacccctgtgcccagtgatgtgttctttgtgaacagcctgtggaagggctactatgagtacctgggcaagaggcagcctgccaccctgactgtggactggttcaatgccaccagcagcaaggtgaatgccaccttcagcgaggccagccctgtggagctgaagctgaccggcatctacaagaaggaggaggcccacctgctgctgaaggccttccagatcaagggccaggccgacatctttgtgtccaagtttgaaaatgacaactggggcctggatggctacgtgagcagcggcctggagcggggcggcttcaccttccagggcgacatccacggcaaggactttgggaagttcaagctggagcggcaggaccccctgaacccagaccaggacagcagcagccactaccacggcaccagcagcggctctgtggccgccgccatcctggtgcccttctttgccctgatcctgagcggctttgccttctacctgtacaagcacaggacccggcccaaggtgcagtacaacggctacgccggccacgagaacagcaatggccaggccagctttgagaaccccatgtatgacaccaacctgaagcccacagaggccaaggctgtgcgctttgacaccaccctgaacacagtgtgcaccgtggtgtag

SEQ ID NO: 227768 - DNA, 10695 bp, Artificial Sequence
  derived and/or modified sequence
atgacagcctggaggcgcttccagagcctgctgctgctgctgggcctgctggtgctgtgtgcccggctgctgacagctgccaagggccagaactgtggcggcctggtgcagggccccaacggcaccatcgagagccctggcttcccccacggctaccccaactatgccaactgcacctggatcatcatcaccggggagaggaaccgcatccagctgtccttccacacctttgccctggaggaggactttgacatcctgtctgtgtatgatggccagccccagcagggcaacctgaaggtgcggctgagcggcttccagctgcccagcagcatcgtgtccacaggcagcatcctgaccctgtggttcaccacagactttgctgtgtctgcccagggcttcaaggccctgtatgaggtgctgcccagccacacctgtggcaaccctggagagatcctgaagggcgtgctgcacggcacccgcttcaacattggagacaagatccgctacagctgcctgcccggctacatcctggagggccacgccatcctgacctgcatcgtgtccccaggaaatggagcctcctgggacttccctgcccccttctgcagagctgagggcgcctgtggcggcaccctgcggggcaccagcagcagcatcagcagcccccacttccccagtgaatatgaaaataatgctgactgcacctggaccatcctggccgagcccggggacaccatcgccctggtgttcacagacttccagctggaggagggctatgacttcctggagatctctggaacagaggcccccagcatctggctgaccggcatgaacctgcccagccctgtgatcagcagcaagaactggctgcggctgcacttcaccagtgacagcaaccacaggaggaagggcttcaatgcccagttccaggtgaagaaggccatcgagctgaagagcagaggagtgaagatgctgcccagcaaggatggcagccacaagaacagcgtgctgagccagggcggcgtggccctggtgtctgacatgtgcccagaccccggcatcccagaaaatggaagaagagctggcagtgacttccgggtgggcgccaacgtgcagttcagctgtgaggacaactacgtgctgcagggcagcaagagcatcacctgccagagggtgacagagaccctggccgcctggagcgaccaccggcccatctgccgggcccggacctgtggcagcaacctgcggggccccagcggggtcatcaccagccccaactaccctgtgcagtatgaggacaatgcccactgtgtgtgggtgatcaccaccacagatcctgacaaggtgatcaagctggcctttgaggagtttgagctggagcggggctatgacaccctgactgtgggagatgctgggaaggtgggggacaccaggtctgtgctgtatgtgctgaccggcagctctgtgcctgacctgattgtgtccatgagcaaccagatgtggctgcacctgcagagtgatgacagcatcggcagccctggcttcaaggctgtgtaccaggagattgagaagggcggctgtggggaccccggcatcccagcctacggcaagaggacaggcagcagcttcctgcatggagacaccctgacctttgagtgcccagctgcctttgagctggtgggggagagggtcatcacctgccagcagaacaaccagtggagcggcaacaagcccagctgtgtgttcagctgcttcttcaacttcaccgccagcagcggcatcatcctgagccccaactacccagaggagtatggcaacaacatgaactgtgtgtggctgatcatcagcgagcccggcagccgcatccacctgatcttcaatgactttgatgtggagccccagtttgacttcctggccgtgaaggatgatggcatcagtgacatcaccgtgctgggcaccttctctggaaatgaggtgcccagccagctggccagcagcggccacatcgtgcggctggagttccagagcgaccacagcaccaccggccggggcttcaacatcacctacaccaccttcggccagaatgaatgccacgaccccggcatccccatcaatggaagaagatttggagaccgcttcctgctgggcagctctgtgtccttccactgtgatgatggctttgtgaagacccagggcagcgagagcatcacctgcatcctgcaggatggaaatgtggtgtggagcagcacagtgccccgctgtgaggccccctgtggcggccacctgacagccagcagcggggtcatcctgcccccaggctggccaggctactacaaggacagcctgcactgtgagtggatcatcgaggccaagccaggccacagcatcaagatcacctttgaccgcttccagacagaggtgaactatgacaccctggaggtgagagatggccctgccagcagcagccccctgattggagagtaccacggcacccaggccccccagttcctgatcagcacaggcaacttcatgtacctgctcttcaccacagacaacagccgcagcagcatcggcttcctgatccactatgaatctgtgaccctggagagtgacagctgcctggaccccggcatccctgtgaatggccacagacatggaggagactttggcatccgcagcacagtgaccttcagctgtgaccccggctacaccctgagtgatgatgagcccctggtgtgtgaaagaaaccaccagtggaaccacgccctgcccagctgtgatgccctgtgtggcggctacatccagggcaagagcggcaccgtgctgagccctggcttcccagacttctaccccaacagcctgaactgcacctggaccatcgaggtgagccacggcaagggcgtgcagatgatcttccacaccttccacctggagagcagccatgactacctgctgatcacagaagatggcagcttcagcgagcctgtggcccggctgaccggctctgtgctgccccacaccatcaaggccggcctgtttggaaacttcaccgcccagctgcgcttcatcagtgacttcagcatctcctatgagggcttcaacatcaccttctctgaatatgacctggagccctgtgatgaccccggggtgcctgccttcagcagaagaattggcttccactttggagtgggggacagcctgaccttcagctgcttcctgggctaccgcctggagggcgccaccaagctgacctgcctgggcggcggccggcgggtgtggagcgcccccctgccccgctgtgtggctgaatgtggggcctctgtgaagggaaatgaaggcaccctgctgagccccaacttccccagcaactatgacaacaaccacgagtgcatctacaagattgaaacagaggccggcaagggcatccacctgcggaccaggagcttccagctgtttgaaggagacaccctgaaggtgtatgatggcaaggacagcagcagccggcccctgggcaccttcaccaagaatgagctgctgggcctcatcctgaacagcaccagcaaccacctgtggctggagttcaacaccaatggaagtgacacagaccagggcttccagctgacctacaccagctttgacctggtgaagtgtgaggaccccggcatccccaactacggctaccgcatcagagatgagggccacttcacagacacagtggtgctgtacagctgcaaccctggctacgccatgcacggcagcaacaccctgacctgcctgagcggggacagaagagtgtgggacaagcccctgcccagctgcatcgccgagtgtggcggccagatccatgctgccaccagcggccgcatcctgagccctggctacccagccccctatgacaacaacctgcactgcacctggatcatcgaggccgaccccgggaagaccatcagcctgcacttcatcgtgtttgacacagagatggcccatgacatcctgaaggtgtgggatggccctgtggacagcgacatcctgctgaaggagtggagcggcagcgccctgcctgaggacatccacagcaccttcaacagcctgaccctgcagtttgacagcgacttcttcatcagcaagagcggcttcagcatccagttcagcaccagcattgctgccacctgcaatgaccccggcatgccccagaatggcaccaggtatggagacagccgggaggccggggacacagtgaccttccagtgtgaccccggctaccagctgcagggccaggccaagatcacctgtgtgcagctgaacaaccgcttcttctggcagcctgacccccccacctgcatcgccgcctgtggcggcaacctgaccggccctgctggggtcatcctgagccccaactacccccagccctacccacctgggaaggaatgtgactggagggtgaaggtgaacccagactttgtgattgccctgatcttcaagagcttcaacatggagcccagctatgacttcctgcacatctatgaaggagaggacagcaacagccccctcatcggcagctaccagggcagccaggcccctgagcgcatcgagagcagcggcaacagcctcttcctggccttcagaagtgatgcctctgtgggcctgagcggctttgccatcgagttcaaggagaagccccgggaggcctgctttgatcctggcaacatcatgaatggcaccagggtgggcacagacttcaagctgggcagcaccatcacctaccagtgtgacagcggctacaagatcctggaccccagcagcatcacctgtgtgattggagcagatggcaagcccagctgggaccaggtgctgcccagctgcaatgccccctgtggcggccagtacacaggcagcgagggcgtggtgctgagccccaactacccccacaactacacagctggccagatctgcctgtacagcatcaccgtgcccaaggagtttgtggtgtttggccagtttgcctacttccagacagccctgaatgacctggccgagctgtttgatggcacccacgcccaggcccggctgctgagcagcctgagcggcagccacagcggggagaccctgcccctggccaccagcaaccagatcctgctgcgcttcagcgccaagagcggggccagcgcccggggcttccactttgtgtaccaggccgtgcccaggaccagtgacacccagtgcagctctgtgcctgagcccaggtatggaagaagaattggcagcgagttctctgctggcagcatcgtgcgctttgagtgcaaccctggctacctgctgcagggcagcacagccctgcactgccagagcgtgcccaatgccctggcccagtggaatgacaccatccccagctgtgtggtgccctgcagcggcaacttcacccagaggcggggcaccatcctgagccctggctacccagagccctacggcaacaacctgaactgcatctggaagatcatcgtgacagagggcagcggcatccagatccaggtgatcagctttgccacagagcagaactgggacagcctggagatccatgatggaggagatgtgacagccccccggctgggcagcttcagcggcaccaccgtgcctgccctgctgaacagcaccagcaaccagctgtacctgcacttccagagcgacatctctgtggccgctgctggcttccacctggagtacaagacagtgggcctggccgcctgccaggagcccgccctgcccagcaacagcatcaagattggagaccgctacatggtgaatgatgtgctgtccttccagtgtgagcccggctacaccctgcagggccgcagccacatcagctgcatgcctggcaccgtgcggcgctggaactaccccagccccctgtgcatcgccacctgtggcggcaccctgagcaccctgggcggcgtcatcctgagccctggcttccctggcagctaccccaacaacctggactgcacctggaggatcagcctgcccatcggctacggggcccacatccagttcctgaacttcagcacagaggccaaccacgacttcctggagatccagaatggcccctaccacaccagccccatgattggccagttctctggaacagacctgcctgctgccctgctgagcaccacccatgagaccctcatccacttctacagcgaccacagccagaaccggcagggcttcaagctggcctaccaggcctatgagctgcagaactgcccagaccccccacccttccagaatggctacatgatcaacagcgactacagcgtgggccagagcgtgtcctttgagtgctacccaggctacatcctgattggccaccctgtgctgacctgccagcacggcatcaacagaaactggaactaccccttcccccgctgtgatgccccctgtggctacaacgtgaccagccagaatggcaccatctacagccctggcttcccagatgagtaccccatcctgaaggactgcatctggctgatcaccgtgcccccaggccacggcgtgtacatcaacttcaccctgctgcagacagaagctgtgaatgactacatcgctgtgtgggatggccctgaccagaacagcccccagctgggcgtcttcagcggcaacacagccctggagacagcctacagcagcaccaaccaggtgctgctgaagttccacagcgacttcagcaatggaggcttctttgtgctgaacttccacgccttccagctgaagaagtgccagcccccacctgctgtgccccaggccgagatgctgacagaagatgatgactttgagatcggggactttgtgaagtaccagtgccaccctggctacaccctggtgggcacagacatcctgacctgcaagctgagcagccagctgcagtttgagggcagcctgcccacctgtgaggcccagtgcccagccaatgaggtgaggacaggcagcagtggagtcatcctgagccctggctacccaggcaactacttcaacagccagacctgctcctggagcatcaaggtggagcccaactacaacatcaccatctttgtggacaccttccagagcgagaagcagtttgatgccctggaggtgtttgatggcagcagcggccagagccccctgctggtggtgctgagcggcaaccacacagagcagagcaacttcaccagccgcagcaaccagctgtacctgcgctggagcacagaccacgccaccagcaagaagggcttcaagatccgctatgctgccccctactgcagcctgacccaccccctgaagaatggaggcatcctgaacagaacagctggagctgtgggcagcaaggtgcactacttctgcaagccaggctacaggatggtgggccacagcaatgccacctgcagaagaaaccccctgggcatgtaccagtgggacagcctgacccccctgtgccaggccgtgtcctgtggcatccctgagagccctggaaatggcagcttcaccggaaatgagttcaccctggacagcaaggtggtgtatgagtgccacgagggcttcaagctggagagcagccagcaggccacagctgtgtgccaggaggatggcctgtggagcaacaagggcaagccacccacctgcaagcctgtggcctgccccagcattgaggcccagctgtctgaacatgtgatctggaggctggtgtctggcagcctgaatgaatatggagcccaggtgctgctgagctgcagccctggctactacctggagggctggaggctgctgcgctgccaggccaacggcacctggaacattggagatgagcggcccagctgcagggtcatcagctgtggcagcctgtccttcccccccaacggcaacaagattggcaccctgactgtgtatggagccacagccatcttcacctgcaacacaggctacaccctggtgggcagccacgtgagagaatgtctggccaacggcctgtggagcggcagcgagacccgctgcctggccggccactgcggcagcccagaccccatcgtgaatggccacatctctggagatggcttctcctacagagacacagtggtgtaccagtgcaaccctggcttccggctggtgggcacctctgtgcgcatctgcctgcaggaccacaagtggagcggccagacccctgtgtgtgtgcccatcacctgtggccaccctggcaacccagcccacggcttcaccaacggcagcgagttcaacctgaatgatgtggtgaacttcacctgcaacacaggctacctgctgcagggcgtgtcccgggcccagtgccgcagcaatggccagtggagcagccccctgcccacctgccgggtggtgaactgcagcgaccccggctttgtggagaatgccatccgccacggccagcagaacttccctgagagctttgaatatggcatgagcatcctgtaccactgcaagaagggcttctacctgctgggcagcagcgccctgacctgcatggccaacggcctgtgggacaggagcctgcccaagtgcctggccatcagctgtggccaccctggggtgcctgccaatgctgtgctgactggagagctgttcacctatggagctgtggtgcactacagctgccggggcagcgagagcctgattggaaatgacaccagggtgtgccaggaggacagccactggagcggggccctgccccactgcaccggcaacaaccctggcttctgtggggaccccggcaccccagcccacggcagccggctgggagatgacttcaagaccaagagcctgctgcgcttcagctgtgagatgggccaccagctgcggggcagccctgagaggacctgcctgctgaatggctcctggagcggcctgcagcctgtgtgtgaggccgtgtcctgtggcaaccctggcacccccaccaacggcatgattgtgtccagtgatggcatcctcttcagcagcagcgtcatctatgcctgctgggagggctacaagaccagcggcctgatgaccaggcactgcacagccaacggcacctggacaggaacagccccagactgcaccatcatcagctgtggggaccccggcaccctggccaacggcatccagtttggaacagacttcaccttcaacaagacagtgtcctaccagtgcaaccctggctacgtgatggaggccgtgaccagcgccaccatccgctgcaccaaggatggccgctggaaccccagcaagcctgtgtgcaaggctgtgctgtgcccccagcccccacctgtgcagaatggaacagtggagggcagtgacttccgctggggcagcagcatctcctacagctgcatggatggctaccagctgagccacagcgccatcctgagctgtgagggccggggcgtgtggaagggggagatcccccagtgcctgcccgtcttctgtggggaccccggcatcccagctgagggccgcctgagcggcaagagcttcacctacaagtctgaggtgttcttccagtgcaagagccccttcatcctggtgggcagcagccggcgggtgtgccaggctgatggcacctggagcggcatccagcccacctgcattgatcctgcccacaacacctgcccagaccccggcaccccccacttcggcatccagaacagcagccggggctatgaggtgggcagcaccgtcttcttccgctgcaggaagggctaccacatccagggcagcaccaccaggacctgcctggccaacctgacctggagcggcatccagacagagtgcatcccccacgcctgccggcagcctgagaccccagcccacgcagatgtgcgggccatcgacctgcccaccttcggctacaccctggtgtacacctgccaccctggcttcttcctggccggcggcagcgagcacaggacctgcaaggctgacatgaagtggacaggcaagagccctgtgtgcaagagcaaaggagtgcgggaggtgaatgaaacagtgaccaagacccctgtgcccagtgatgtgttctttgtgaacagcctgtggaagggctactatgagtacctgggcaagaggcagcctgccaccctgactgtggactggttcaatgccaccagcagcaaggtgaatgccaccttcagcgaggccagccctgtggagctgaagctgaccggcatctacaagaaggaggaggcccacctgctgctgaaggccttccagatcaagggccaggccgacatctttgtgtccaagtttgaaaatgacaactggggcctggatggctacgtgagcagcggcctggagcggggcggcttcaccttccagggcgacatccacggcaaggactttgggaagttcaagctggagcggcaggaccccctgaacccagaccaggacagcagcagccactaccacggcaccagcagcggctctgtggccgccgccatcctggtgcccttctttgccctgatcctgagcggctttgccttctacctgtacaagcacaggacccggcccaaggtgcagtacaacggctacgccggccacgagaacagcaatggccaggccagctttgagaaccccatgtatgacaccaacctgaagcccacagaggccaaggctgtgcgctttgacaccaccctgaacacagtgtgcaccgtggtgtag

SEQ ID NO: 227769 - DNA, 6330 bp, Artificial Sequence
  derived and/or modified sequence
atgacagcctggaggcgcttccagagcctgctgctgctgctgggcctgctggtgctgtgtgcccggctgctgacagctgccaagggccagaactgtggcggcctggtgcagggccccaacggcaccatcgagagccctggcttcccccacggctaccccaactatgccaactgcacctggatcatcatcaccggggagaggaaccgcatccagctgtccttccacacctttgccctggaggaggactttgacatcctgtctgtgtatgatggccagccccagcagggcaacctgaaggtgcggctgagcggcttccagctgcccagcagcatcgtgtccacaggcagcatcctgaccctgtggttcaccacagactttgctgtgtctgcccagggcttcaaggccctgtatgaggtgctgcccagccacacctgtggcaaccctggagagatcctgaagggcgtgctgcacggcacccgcttcaacattggagacaagatccgctacagctgcctgcccggctacatcctggagggccacgccatcctgacctgcatcgtgtccccaggaaatggagcctcctgggacttccctgcccccttctgcagagctgagggcgcctgtggcggcaccctgcggggcaccagcagcagcatcagcagcccccacttccccagtgaatatgaaaataatgctgactgcacctggaccatcctggccgagcccggggacaccatcgccctggtgttcacagacttccagctggaggagggctatgacttcctggagatctctggaacagaggcccccagcatctggctgaccggcatgaacctgcccagccctgtgatcagcagcaagaactggctgcggctgcacttcaccagtgacagcaaccacaggaggaagggcttcaatgcccagttccaggtgaagaaggccatcgagctgaagagcagaggagtgaagatgctgcccagcaaggatggcagccacaagaacagcgtgctgagccagggcggcgtggccctggtgtctgacatgtgcccagaccccggcatcccagaaaatggaagaagagctggcagtgacttccgggtgggcgccaacgtgcagttcagctgtgaggacaactacgtgctgcagggcagcaagagcatcacctgccagagggtgacagagaccctggccgcctggagcgaccaccggcccatctgccgggcccggacctgtggcagcaacctgcggggccccagcggggtcatcaccagccccaactaccctgtgcagtatgaggacaatgcccactgtgtgtgggtgatcaccaccacagatcctgacaaggtgatcaagctggcctttgaggagtttgagctggagcggggctatgacaccctgactgtgggagatgctgggaaggtgggggacaccaggtctgtgctgtatgtgctgaccggcagctctgtgcctgacctgattgtgtccatgagcaaccagatgtggctgcacctgcagagtgatgacagcatcggcagccctggcttcaaggctgtgtaccaggagattgagaagggcggctgtggggaccccggcatcccagcctacggcaagaggacaggcagcagcttcctgcatggagacaccctgacctttgagtgcccagctgcctttgagctggtgggggagagggtcatcacctgccagcagaacaaccagtggagcggcaacaagcccagctgtgtgttcagctgcttcttcaacttcaccgccagcagcggcatcatcctgagccccaactacccagaggagtatggcaacaacatgaactgtgtgtggctgatcatcagcgagcccggcagccgcatccacctgatcttcaatgactttgatgtggagccccagtttgacttcctggccgtgaaggatgatggcatcagtgacatcaccgtgctgggcaccttctctggaaatgaggtgcccagccagctggccagcagcggccacatcgtgcggctggagttccagagcgaccacagcaccaccggccggggcttcaacatcacctacaccaccttcggccagaatgaatgccacgaccccggcatccccatcaatggaagaagatttggagaccgcttcctgctgggcagctctgtgtccttccactgtgatgatggctttgtgaagacccagggcagcgagagcatcacctgcatcctgcaggatggaaatgtggtgtggagcagcacagtgccccgctgtgaggccccctgtggcggccacctgacagccagcagcggggtcatcctgcccccaggctggccaggctactacaaggacagcctgcactgtgagtggatcatcgaggccaagccaggccacagcatcaagatcacctttgaccgcttccagacagaggtgaactatgacaccctggaggtgagagatggccctgccagcagcagccccctgattggagagtaccacggcacccaggccccccagttcctgatcagcacaggcaacttcatgtacctgctcttcaccacagacaacagccgcagcagcatcggcttcctgatccactatgaatctgtgaccctggagagtgacagctgcctggaccccggcatccctgtgaatggccacagacatggaggagactttggcatccgcagcacagtgaccttcagctgtgaccccggctacaccctgagtgatgatgagcccctggtgtgtgaaagaaaccaccagtggaaccacgccctgcccagctgtgatgccctgtgtggcggctacatccagggcaagagcggcaccgtgctgagccctggcttcccagacttctaccccaacagcctgaactgcacctggaccatcgaggtgagccacggcaagggcgtgcagatgatcttccacaccttccacctggagagcagccatgactacctgctgatcacagaagatggcagcttcagcgagcctgtggcccggctgaccggctctgtgctgccccacaccatcaaggccggcctgtttggaaacttcaccgcccagctgcgcttcatcagtgacttcagcatctcctatgagggcttcaacatcaccttctctgaatatgacctggagccctgtgatgaccccggggtgcctgccttcagcagaagaattggcttccactttggagtgggggacagcctgaccttcagctgcttcctgggctaccgcctggagggcgccaccaagctgacctgcctgggcggcggccggcgggtgtggagcgcccccctgccccgctgtgtggctgaatgtggggcctctgtgaagggaaatgaaggcaccctgctgagccccaacttccccagcaactatgacaacaaccacgagtgcatctacaagattgaaacagaggccggcaagggcatccacctgcggaccaggagcttccagctgtttgaaggagacaccctgaaggtgtatgatggcaaggacagcagcagccggcccctgggcaccttcaccaagaatgagctgctgggcctcatcctgaacagcaccagcaaccacctgtggctggagttcaacaccaatggaagtgacacagaccagggcttccagctgacctacaccagctttgacctggtgaagtgtgaggaccccggcatccccaactacggctaccgcatcagagatgagggccacttcacagacacagtggtgctgtacagctgcaaccctggctacgccatgcacggcagcaacaccctgacctgcctgagcggggacagaagagtgtgggacaagcccctgcccagctgcatcgccgagtgtggcggccagatccatgctgccaccagcggccgcatcctgagccctggctacccagccccctatgacaacaacctgcactgcacctggatcatcgaggccgaccccgggaagaccatcagcctgcacttcatcgtgtttgacacagagatggcccatgacatcctgaaggtgtgggatggccctgtggacagcgacatcctgctgaaggagtggagcggcagcgccctgcctgaggacatccacagcaccttcaacagcctgaccctgcagtttgacagcgacttcttcatcagcaagagcggcttcagcatccagttcagcaccagcattgctgccacctgcaatgaccccggcatgccccagaatggcaccaggtatggagacagccgggaggccggggacacagtgaccttccagtgtgaccccggctaccagctgcagggccaggccaagatcacctgtgtgcagctgaacaaccgcttcttctggcagcctgacccccccacctgcatcgccgcctgtggcggcaacctgaccggccctgctggggtcatcctgagccccaactacccccagccctacccacctgggaaggaatgtgactggagggtgaaggtgaacccagactttgtgattgccctgatcttcaagagcttcaacatggagcccagctatgacttcctgcacatctatgaaggagaggacagcaacagccccctcatcggcagctaccagggcagccaggcccctgagcgcatcgagagcagcggcaacagcctcttcctggccttcagaagtgatgcctctgtgggcctgagcggctttgccatcgagttcaaggagaagccccgggaggcctgctttgatcctggcaacatcatgaatggcaccagggtgggcacagacttcaagctgggcagcaccatcacctaccagtgtgacagcggctacaagatcctggaccccagcagcatcacctgtgtgattggagcagatggcaagcccagctgggaccaggtgctgcccagctgcaatgccccctgtggcggccagtacacaggcagcgagggcgtggtgctgagccccaactacccccacaactacacagctggccagatctgcctgtacagcatcaccgtgcccaaggagtttgtggtgtttggccagtttgcctacttccagacagccctgaatgacctggccgagctgtttgatggcacccacgcccaggcccggctgctgagcagcctgagcggcagccacagcggggagaccctgcccctggccaccagcaaccagatcctgctgcgcttcagcgccaagagcggggccagcgcccggggcttccactttgtgtaccaggccgtgcccaggaccagtgacacccagtgcagctctgtgcctgagcccaggtatggaagaagaattggcagcgagttctctgctggcagcatcgtgcgctttgagtgcaaccctggctacctgctgcagggcagcacagccctgcactgccagagcgtgcccaatgccctggcccagtggaatgacaccatccccagctgtgtggtgccctgcagcggcaacttcacccagaggcggggcaccatcctgagccctggctacccagagccctacggcaacaacctgaactgcatctggaagatcatcgtgacagagggcagcggcatccagatccaggtgatcagctttgccacagagcagaactgggacagcctggagatccatgatggaggagatgtgacagccccccggctgggcagcttcagcggcaccaccgtgcctgccctgctgaacagcaccagcaaccagctgtacctgcacttccagagcgacatctctgtggccgctgctggcttccacctggagtacaagacagtgggcctggccgcctgccaggagcccgccctgcccagcaacagcatcaagattggagaccgctacatggtgaatgatgtgctgtccttccagtgtgagcccggctacaccctgcagggccgcagccacatcagctgcatgcctggcaccgtgcggcgctggaactaccccagccccctgtgcatcgccacctgtggcggcaccctgagcaccctgggcggcgtcatcctgagccctggcttccctggcagctaccccaacaacctggactgcacctggaggatcagcctgcccatcggctacggggcccacatccagttcctgaacttcagcacagaggccaaccacgacttcctggagatccagaatggcccctaccacaccagccccatgattggccagttctctggaacagacctgcctgctgccctgctgagcaccacccatgagaccctcatccacttctacagcgaccacagccagaaccggcagggcttcaagctggcctaccagggcggcagcggcaacatcggccctgccttcccctgcctggacacccccttccaggcccgctgccagggcgaggagaggaccttcaactag

SEQ ID NO: 227770 - DNA, 10164 bp, Artificial Sequence
  derived and/or modified sequence
atgacagcctggaggcgcttccagagcctgctgctgctgctgggcctgctggtgctgtgtgcccggctgctgacagctgccaagggccagaactgtggcggcctggtgcagggccccaacggcaccatcgagagccctggcttcccccacggctaccccaactatgccaactgcacctggatcatcatcaccggggagaggaaccgcatccagctgtccttccacacctttgccctggaggaggactttgacatcctgtctgtgtatgatggccagccccagcagggcaacctgaaggtgcggctgagcggcttccagctgcccagcagcatcgtgtccacaggcagcatcctgaccctgtggttcaccacagactttgctgtgtctgcccagggcttcaaggccctgtatgaggtgctgcccagccacacctgtggcaaccctggagagatcctgaagggcgtgctgcacggcacccgcttcaacattggagacaagatccgctacagctgcctgcccggctacatcctggagggccacgccatcctgacctgcatcgtgtccccaggaaatggagcctcctgggacttccctgcccccttctgcagagctgagggcgcctgtggcggcaccctgcggggcaccagcagcagcatcagcagcccccacttccccagtgaatatgaaaataatgctgactgcacctggaccatcctggccgagcccggggacaccatcgccctggtgttcacagacttccagctggaggagggctatgacttcctggagatctctggaacagaggcccccagcatctggctgaccggcatgaacctgcccagccctgtgatcagcagcaagaactggctgcggctgcacttcaccagtgacagcaaccacaggaggaagggcttcaatgcccagttccaggtgaagaaggccatcgagctgaagagcagaggagtgaagatgctgcccagcaaggatggcagccacaagaacagcgtgctgagccagggcggcgtggccctggtgtctgacatgtgcccagaccccggcatcccagaaaatggaagaagagctggcagtgacttccgggtgggcgccaacgtgcagttcagctgtgaggacaactacgtgctgcagggcagcaagagcatcacctgccagagggtgacagagaccctggccgcctggagcgaccaccggcccatctgccgggcccggacctgtggcagcaacctgcggggccccagcggggtcatcaccagccccaactaccctgtgcagtatgaggacaatgcccactgtgtgtgggtgatcaccaccacagatcctgacaaggtgatcaagctggcctttgaggagtttgagctggagcggggctatgacaccctgactgtgggagatgctgggaaggtgggggacaccaggtctgtgctgtatgtgctgaccggcagctctgtgcctgacctgattgtgtccatgagcaaccagatgtggctgcacctgcagagtgatgacagcatcggcagccctggcttcaaggctgtgtaccaggagattgagaagggcggctgtggggaccccggcatcccagcctacggcaagaggacaggcagcagcttcctgcatggagacaccctgacctttgagtgcccagctgcctttgagctggtgggggagagggtcatcacctgccagcagaacaaccagtggagcggcaacaagcccagctgtgtgttcagctgcttcttcaacttcaccgccagcagcggcatcatcctgagccccaactacccagaggagtatggcaacaacatgaactgtgtgtggctgatcatcagcgagcccggcagccgcatccacctgatcttcaatgactttgatgtggagccccagtttgacttcctggccgtgaaggatgatggcatcagtgacatcaccgtgctgggcaccttctctggaaatgaggtgcccagccagctggccagcagcggccacatcgtgcggctggagttccagagcgaccacagcaccaccggccggggcttcaacatcacctacaccaccttcggccagaatgaatgccacgaccccggcatccccatcaatggaagaagatttggagaccgcttcctgctgggcagctctgtgtccttccactgtgatgatggctttgtgaagacccagggcagcgagagcatcacctgcatcctgcaggatggaaatgtggtgtggagcagcacagtgccccgctgtgaggccccctgtggcggccacctgacagccagcagcggggtcatcctgcccccaggctggccaggctactacaaggacagcctgcactgtgagtggatcatcgaggccaagccaggccacagcatcaagatcacctttgaccgcttccagacagaggtgaactatgacaccctggaggtgagagatggccctgccagcagcagccccctgattggagagtaccacggcacccaggccccccagttcctgatcagcacaggcaacttcatgtacctgctcttcaccacagacaacagccgcagcagcatcggcttcctgatccactatgaatctgtgaccctggagagtgacagctgcctggaccccggcatccctgtgaatggccacagacatggaggagactttggcatccgcagcacagtgaccttcagctgtgaccccggctacaccctgagtgatgatgagcccctggtgtgtgaaagaaaccaccagtggaaccacgccctgcccagctgtgatgccctgtgtggcggctacatccagggcaagagcggcaccgtgctgagccctggcttcccagacttctaccccaacagcctgaactgcacctggaccatcgaggtgagccacggcaagggcgtgcagatgatcttccacaccttccacctggagagcagccatgactacctgctgatcacagaagatggcagcttcagcgagcctgtggcccggctgaccggctctgtgctgccccacaccatcaaggccggcctgtttggaaacttcaccgcccagctgcgcttcatcagtgacttcagcatctcctatgagggcttcaacatcaccttctctgaatatgacctggagccctgtgatgaccccggggtgcctgccttcagcagaagaattggcttccactttggagtgggggacagcctgaccttcagctgcttcctgggctaccgcctggagggcgccaccaagctgacctgcctgggcggcggccggcgggtgtggagcgcccccctgccccgctgtgtggctgaatgtggggcctctgtgaagggaaatgaaggcaccctgctgagccccaacttccccagcaactatgacaacaaccacgagtgcatctacaagattgaaacagaggccggcaagggcatccacctgcggaccaggagcttccagctgtttgaaggagacaccctgaaggtgtatgatggcaaggacagcagcagccggcccctgggcaccttcaccaagaatgagctgctgggcctcatcctgaacagcaccagcaaccacctgtggctggagttcaacaccaatggaagtgacacagaccagggcttccagctgacctacaccagctttgacctggtgaagtgtgaggaccccggcatccccaactacggctaccgcatcagagatgagggccacttcacagacacagtggtgctgtacagctgcaaccctggctacgccatgcacggcagcaacaccctgacctgcctgagcggggacagaagagtgtgggacaagcccctgcccagctgcatcgccgagtgtggcggccagatccatgctgccaccagcggccgcatcctgagccctggctacccagccccctatgacaacaacctgcactgcacctggatcatcgaggccgaccccgggaagaccatcagcctgcacttcatcgtgtttgacacagagatggcccatgacatcctgaaggtgtgggatggccctgtggacagcgacatcctgctgaaggagtggagcggcagcgccctgcctgaggacatccacagcaccttcaacagcctgaccctgcagtttgacagcgacttcttcatcagcaagagcggcttcagcatccagttcagcaccagcattgctgccacctgcaatgaccccggcatgccccagaatggcaccaggtatggagacagccgggaggccggggacacagtgaccttccagtgtgaccccggctaccagctgcagggccaggccaagatcacctgtgtgcagctgaacaaccgcttcttctggcagcctgacccccccacctgcatcgccgcctgtggcggcaacctgaccggccctgctggggtcatcctgagccccaactacccccagccctacccacctgggaaggaatgtgactggagggtgaaggtgaacccagactttgtgattgccctgatcttcaagagcttcaacatggagcccagctatgacttcctgcacatctatgaaggagaggacagcaacagccccctcatcggcagctaccagggcagccaggcccctgagcgcatcgagagcagcggcaacagcctcttcctggccttcagaagtgatgcctctgtgggcctgagcggctttgccatcgagttcaaggagaagccccgggaggcctgctttgatcctggcaacatcatgaatggcaccagggtgggcacagacttcaagctgggcagcaccatcacctaccagtgtgacagcggctacaagatcctggaccccagcagcatcacctgtgtgattggagcagatggcaagcccagctgggaccaggtgctgcccagctgcaatgccccctgtggcggccagtacacaggcagcgagggcgtggtgctgagccccaactacccccacaactacacagctggccagatctgcctgtacagcatcaccgtgcccaaggagtttgtggtgtttggccagtttgcctacttccagacagccctgaatgacctggccgagctgtttgatggcacccacgcccaggcccggctgctgagcagcctgagcggcagccacagcggggagaccctgcccctggccaccagcaaccagatcctgctgcgcttcagcgccaagagcggggccagcgcccggggcttccactttgtgtaccaggccgtgcccaggaccagtgacacccagtgcagctctgtgcctgagcccaggtatggaagaagaattggcagcgagttctctgctggcagcatcgtgcgctttgagtgcaaccctggctacctgctgcagggcagcacagccctgcactgccagagcgtgcccaatgccctggcccagtggaatgacaccatccccagctgtgtggtgccctgcagcggcaacttcacccagaggcggggcaccatcctgagccctggctacccagagccctacggcaacaacctgaactgcatctggaagatcatcgtgacagagggcagcggcatccagatccaggtgatcagctttgccacagagcagaactgggacagcctggagatccatgatggaggagatgtgacagccccccggctgggcagcttcagcggcaccaccgtgcctgccctgctgaacagcaccagcaaccagctgtacctgcacttccagagcgacatctctgtggccgctgctggcttccacctggagtacaagacagtgggcctggccgcctgccaggagcccgccctgcccagcaacagcatcaagattggagaccgctacatggtgaatgatgtgctgtccttccagtgtgagcccggctacaccctgcagggccgcagccacatcagctgcatgcctggcaccgtgcggcgctggaactaccccagccccctgtgcatcgccacctgtggcggcaccctgagcaccctgggcggcgtcatcctgagccctggcttccctggcagctaccccaacaacctggactgcacctggaggatcagcctgcccatcggctacggggcccacatccagttcctgaacttcagcacagaggccaaccacgacttcctggagatccagaatggcccctaccacaccagccccatgattggccagttctctggaacagacctgcctgctgccctgctgagcaccacccatgagaccctcatccacttctacagcgaccacagccagaaccggcagggcttcaagctggcctaccaggcctatgagctgcagaactgcccagaccccccacccttccagaatggctacatgatcaacagcgactacagcgtgggccagagcgtgtcctttgagtgctacccaggctacatcctgattggccaccctgtgctgacctgccagcacggcatcaacagaaactggaactaccccttcccccgctgtgatgccccctgtggctacaacgtgaccagccagaatggcaccatctacagccctggcttcccagatgagtaccccatcctgaaggactgcatctggctgatcaccgtgcccccaggccacggcgtgtacatcaacttcaccctgctgcagacagaagctgtgaatgactacatcgctgtgtgggatggccctgaccagaacagcccccagctgggcgtcttcagcggcaacacagccctggagacagcctacagcagcaccaaccaggtgctgctgaagttccacagcgacttcagcaatggaggcttctttgtgctgaacttccacgccttccagctgaagaagtgccagcccccacctgctgtgccccaggccgagatgctgacagaagatgatgactttgagatcggggactttgtgaagtaccagtgccaccctggctacaccctggtgggcacagacatcctgacctgcaagctgagcagccagctgcagtttgagggcagcctgcccacctgtgaggcccagtgcccagccaatgaggtgaggacaggcagcagtggagtcatcctgagccctggctacccaggcaactacttcaacagccagacctgctcctggagcatcaaggtggagcccaactacaacatcaccatctttgtggacaccttccagagcgagaagcagtttgatgccctggaggtgtttgatggcagcagcggccagagccccctgctggtggtgctgagcggcaaccacacagagcagagcaacttcaccagccgcagcaaccagctgtacctgcgctggagcacagaccacgccaccagcaagaagggcttcaagatccgctatgctgccccctactgcagcctgacccaccccctgaagaatggaggcatcctgaacagaacagctggagctgtgggcagcaaggtgcactacttctgcaagccaggctacaggatggtgggccacagcaatgccacctgcagaagaaaccccctgggcatgtaccagtgggacagcctgacccccctgtgccaggccgtgtcctgtggcatccctgagagccctggaaatggcagcttcaccggaaatgagttcaccctggacagcaaggtggtgtatgagtgccacgagggcttcaagctggagagcagccagcaggccacagctgtgtgccaggaggatggcctgtggagcaacaagggcaagccacccacctgcaagcctgtggcctgccccagcattgaggcccagctgtctgaacatgtgatctggaggctggtgtctggcagcctgaatgaatatggagcccaggtgctgctgagctgcagccctggctactacctggagggctggaggctgctgcgctgccaggccaacggcacctggaacattggagatgagcggcccagctgcagagctggccactgcggcagcccagaccccatcgtgaatggccacatctctggagatggcttctcctacagagacacagtggtgtaccagtgcaaccctggcttccggctggtgggcacctctgtgcgcatctgcctgcaggaccacaagtggagcggccagacccctgtgtgtgtgcccatcacctgtggccaccctggcaacccagcccacggcttcaccaacggcagcgagttcaacctgaatgatgtggtgaacttcacctgcaacacaggctacctgctgcagggcgtgtcccgggcccagtgccgcagcaatggccagtggagcagccccctgcccacctgccgggtggtgaactgcagcgaccccggctttgtggagaatgccatccgccacggccagcagaacttccctgagagctttgaatatggcatgagcatcctgtaccactgcaagaagggcttctacctgctgggcagcagcgccctgacctgcatggccaacggcctgtgggacaggagcctgcccaagtgcctggccatcagctgtggccaccctggggtgcctgccaatgctgtgctgactggagagctgttcacctatggagctgtggtgcactacagctgccggggcagcgagagcctgattggaaatgacaccagggtgtgccaggaggacagccactggagcggggccctgccccactgcaccggcaacaaccctggcttctgtggggaccccggcaccccagcccacggcagccggctgggagatgacttcaagaccaagagcctgctgcgcttcagctgtgagatgggccaccagctgcggggcagccctgagaggacctgcctgctgaatggctcctggagcggcctgcagcctgtgtgtgaggccgtgctgtgcccccagcccccacctgtgcagaatggcaccgtggagggcagtgacttccgctggggcagcagcatctcctacagctgcatggatggctaccagctgagccacagcgccatcctgagctgtgagggccggggcgtgtggaagggggagatcccccagtgcctgcctgtgttctgtggggaccccggcatcccagctgagggccgcctgagcggcaagagcttcacctacaagtctgaggtgttcttccagtgcaagagccccttcatcctggtgggcagcagcagaagagtgtgccaggctgatggcacctggagcggcatccagcccacctgcatcgaccctgcccacaacacctgcccagaccccggcaccccccacttcggcatccagaacagcagccggggctatgaggtgggcagcacagtgttcttccgctgcaggaagggctaccacatccagggcagcaccaccaggacctgcctggccaacctgacctggagcggcatccagacagagtgcatcccccacgcctgccggcagcctgagaccccagcccatgctgatgtgcgggccatcgacctgcccaccttcggctacaccctggtgtacacctgccaccctggcttcttcctggccggcggcagcgagcacaggacctgcaaggctgacatgaagtggacaggcaagagccctgtgtgcaagagcaagggcgtgcgggaggtgaatgagaccgtgaccaagacccctgtgcccagtgatgtgttctttgtgaacagcctgtggaagggctactatgagtacctgggcaagaggcagcctgccaccctgactgtggactggttcaatgccaccagcagcaaggtgaatgccaccttcagcgaggccagccctgtggagctgaagctgaccggcatctacaagaaggaggaggcccacctgctgctgaaggccttccagatcaagggccaggccgacatctttgtgtccaagtttgaaaatgacaactggggcctggatggctacgtgagcagcggcctggagcggggcggcttcaccttccagggcgacatccacggcaaggactttgggaagttcaagctggagcggcaggaccccctgaacccagaccaggacagcagcagccactaccacggcaccagcagcggctctgtggccgccgccatcctggtgcccttctttgccctgatcctgagcggctttgccttctacctgtacaagcacaggacccggcccaaggtgcagtacaacggctacgccggccacgagaacagcaatggccaggccagctttgagaaccccatgtatgacaccaacctgaagcccacagaggccaaggctgtgcgctttgacaccaccctgaacacagtgtgcaccgtggtgtag

SEQ ID NO: 227771 - DNA, 10281 bp, Artificial Sequence
  derived and/or modified sequence
gtgctgcccagccacacctgcggcaaccccggcgagatcctgaagggcgtactacacggaacccgctttaatataggcgacaagatcaggtattcttgccttcctggctacatcctggagggccacgccattttgacttgcattgtgtctcccggcaacggtgccagttgggattttccggcgcctttctgccgagcagagggggcctgcggcgggacactcagagggactagcagtagtatcagttctccccactttcccagcgaatacgagaataacgccgattgtacatggacgattctcgctgaacctggagacaccatcgctttagtattcacagactttcagcttgaggagggctacgattttttggaaattagtggtactgaagcaccttccatctggttgaccggaatgaaccttccctctcctgtcatcagttctaaaaattggctgcgcctgcatttcacctcggactccaatcacagacgtaagggctttaacgcccagttccaagttaagaaagcaatcgagctaaagtcccgtggtgtcaaaatgctgccatctaaggacggctctcataaaaactcagtgctgagtcagggaggggtcgccttggttagcgacatgtgtcctgaccccggtatcccagaaaacggaagaagagccgggagcgattttagcagggttggagcaaatgtgcagtttagctgtgaagacaactacgttctgcaagggtctaagagcatcacttgccagcgagtgacagaaacattggccgcctggtccgatcatcgccctatctgccgcgcccgtacatgcggctctaatctaagaggaccctccggcgtgattacctccccaaactaccccgtgcagtacgaagataacgctcattgcgtttgggtgatcacaactacagatccagacaaggtgattaaactcgccttcgaggaatttgaactggagaggggttatgatacactcactgtcggcgacgcagggaaagtgggcgatacaagatctgtcctctatgtgctgaccggcagctctgttccggaccttattgtcagcatgtcaaaccagatgtggctccacctgcagtcagatgactcaattggctcccctggtttcaaagcggtgtaccaggaaattgaaaagggaggctgtggagatccagggattccggcctatgggaagcgcaccggcagctcgttcctgcatggcgatacgctgacatttgaatgtccagcagcctttgaactagtgggtgagagagtgattacatgccagcaaaataaccagtggagcggtaataagccatcctgtgtgttcagctgcttctttaacttcaccgcttcatccggcattattctgagccctaattatccagaggaatacggaaataatatgaattgcgtctggcttatcatctcagaacccgggagcagaatccatctgatctttaacgactttgacgttgagccgcaattcgacttcctggccgttaaggatgatgggatcagtgacatcaccgtcctaggcacattctcaggcaacgaagtgccgtcacagctggccagctcgggacacatcgtcaggttagagttccaatctgaccattccaccacaggtcgcggatttaacatcacctatacaaccttcggccaaaatgagtgccatgaccccgggattcccataaatgggcggagatttggagacagatttcttctgggctccagtgtgtcttttcactgtgatgatggattcgtgaaaactcagggtagcgagagcattacatgcatcctccaagatgggaatgtagtttggagctccaccgtccctcggtgtgaagctccatgtggcggtcacctgaccgcttccagtggcgttatcttaccgccagggtggccgggctactacaaagattccctccactgcgaatggattattgaggccaagcctggtcactccattaagattacttttgaccgtttccagacagaggtgaattacgataccctggaggtccgagacggtccggcatcatcatcgccattgataggtgaatatcatgggactcaggccccccagttcctgattagcacaggaaactttatgtacctgctgtttacaacagacaattcccgatccagtattggctttctgatccactacgagagcgtgacactggagtctgactcgtgtctggaccccggtatccctgtgaatggccatagacacggaggcgatttcggcatacgctccacagtcaccttctcatgcgaccccggatatacactctcagatgacgagcctctggtgtgtgaacggaatcatcagtggaaccacgctctgcccagctgtgatgccttgtgcggcggctacatacagggcaagtctgggaccgtactctcaccaggctttccagacttctacccaaactcactgaactgtacatggacaattgaggtatcccacggcaaaggtgttcaaatgatctttcacacttttcatctggagtccagccacgattacctgcttattacggaggatgggtctttcagcgagcccgtggcacggctcacaggctcagtgttacctcacactattaaggccggactgtttggaaattttacagcccagctcaggttcatctcagactttagcatatcatacgaaggtttcaacatcacattctccgagtacgatttagagccatgtgacgaccccggagtccccgcattctcaagacggatcggcttccactttggcgtcggcgacagcctgaccttttcatgtttcttgggctaccgactggaaggggctacgaagctgacctgtttagggggaggcaggcgagtctggagcgcacctttgccgcgttgtgtggctgaatgtggagcctcagttaaggggaatgagggaaccctgctcagtccaaacttcccatccaattacgacaacaaccacgaatgcatctacaagatcgagaccgaggctggcaaagggattcacctgcggacgaggtccttccagctttttgagggggatacactgaaagtgtatgacggcaaagattcaagctctaggccactgggcacctttacgaaaaacgaactgttaggtctgatactcaactctacaagcaatcacctgtggctggaattcaacacaaatggttctgatacggatcagggatttcaactgacctatacaagcttcgatctggtcaagtgcgaggatccaggcatcccaaactatggctaccggataagggatgagggtcattttactgatacagtggttctgtacagctgcaacccaggctacgccatgcacggatcaaatactctcacatgtttaagcggggatcgtagagtatgggacaagccgcttccgtcatgcatcgcggagtgcggagggcagattcatgccgccacatcaggccgcattctgagcccaggctatcctgccccttatgacaataaccttcattgcacctggatcattgaagccgacccaggaaagaccatcagtctacactttattgtgttcgacacagaaatggcccatgacatactcaaagtgtgggatggtccagtcgacagcgacatacttctgaaggagtggtcgggcagcgccctgccagaagacatccactctactttcaatagtctgaccctccagtttgattccgacttcttcatctccaaatctggcttttccatccagttcagcacgtctatcgctgccacatgtaacgacccgggaatgccacagaatggtactcgctacggggatagtagggaggcgggagatacagtcactttccaatgcgaccctggctatcagttgcaaggtcaggcaaaaattacttgcgtgcagctgaacaaccgctttttttggcaaccggacccgccaacttgcatcgctgcttgcggcggcaatctcacaggacccgccggcgttattctttcccctaactatcctcagccgtaccctcctgggaaggaatgcgactggcgagtgaaagtaaacccagacttcgtcattgcactgatctttaaaagtttcaacatggaaccgagttacgacttcctgcatatatacgaaggagaagacagtaactcgcctctcattgggtcataccaaggatctcaggcccccgaacgtatcgaaagctctgggaactcactatttctggcatttaggagcgatgcttctgtgggattatctggtttcgccatcgagttcaaagaaaaaccaagggaagcctgtttcgatcctgggaatatcatgaacggcacaagggtggggacggattttaagcttggaagcactatcacgtaccagtgtgactccgggtacaagatccttgacccatccagcatcacctgcgtgatcggggccgatggtaaaccctcctgggaccaagttcttccctcgtgcaacgcaccctgcggagggcagtataccggatccgagggtgtggtgctctcaccaaactatccacataattacacagctggacagatttgcttatatagtatcactgtccccaaggaattcgtagtcttcgggcagttcgcgtattttcaaacagcacttaacgatttggcagaactttttgacgggacgcatgcccaagctagactcctgagctctctaagtggatcccactcaggggagacgttgcccctggccacatccaatcagattctgttacgattctccgcaaaatctggtgcatccgcccgcggcttccactttgtgtatcaggccgtgccacgtacaagtgatacgcaatgctctagcgtcccggaacctagatatgggcggcggatcggatccgagtttagtgccgggtcgattgtgcgttttgagtgcaacccaggctatctcctgcagggatctaccgccctacactgtcagtcagtgcctaacgctctcgctcagtggaacgacacaatcccatcttgtgtggttccttgctccgggaactttacccaaaggcgggggaccattctgtcaccagggtaccccgagccctatggcaacaatctcaactgcatttggaaaataattgtaaccgaaggaagcgggattcaggacccctccgatcagttctgtcacggggcagaactcggtctggagatccacgatggaggagatgtcacagctcccagactgggttccttttctggtaccaccgtgccggctcttcttaatagtactagtaatcagttgtatttgcattttcagtcagatatctcagttgctgcagccgggtttcacctggagtataagaccgtgggtctggcggcctgtcaagagccagcattaccatctaacagtatcaaaataggtgacagatacatggtcaatgatgtactgagcttccagtgtgaacccggctataccttgcagggtcggagtcacatctcatgtatgcccggcactgttaggcgctggaactatccatcacctttgtgcatcgctacttgcggcgggactctgagcactctgggtggcgtcatcctaagccctggtttccctggatcctatcccaacaaccttgactgtacgtggcgcatcagtcttcctatcgggtacggcgcccatatccagttcctcaatttctcgactgaagctaatcatgatttcttggaaatccaaaatggtccatatcatacctcgccgatgatcgggcagttctcaggcactgatctcccagcggctctgctgagcacaactcatgagacacttattcacttctattcagatcattcacagaacaggcaagggttcaagctcgcctaccaggcatatgaacttcagaattgccccgacccaccccctttccagaatgggtacatgatcaactctgattactctgtcggacagagcgtctccttcgagtgctaccccggctatatcctgattggtcaccccgtactgacatgtcagcacggtatcaatagaaattggaactatccctttcccaggtgcgatgcaccatgcgggtacaatgtgacttcacagaacggcacaatttatagtccagggtttccagatgaatacccaattctgaaggattgcatttggctgatcactgtgccccccggccatggggtgtatatcaattttacactgctgcagacagaagccgtgaatgattatatcgctgtgtgggacggcccagatcagaactcacctcagctgggcgtattttcagggaatacagccttggaaaccgcttattcaagtacgaatcaggtccttttaaagtttcattcagatttttccaacggaggcttttttgtgttgaattttcatgccttccagctaaaaaaatgtcagccgccacccgcggtgccccaggcagaaatgctgacagaggatgacgattttgagatcggcgatttcgtcaagtatcaatgccatccaggatacacccttgtcgggaccgacatcctcacttgcaagctaagcagccagctgcagtttgagggatcgctgcctacctgcgaggcacagtgtccagcaaacgaagtgcgaaccggatcttcaggagtgattctgagccctgggtatcccggaaattatttcaactcccagacctgctcatggagtattaaagtcgaacccaattataacattacaatttttgtggataccttccagtcagagaaacagttcgacgcattggaggttttcgatggctcctcagggcagagtccgctcttggtggtgctgtctggaaaccatactgagcagagtaacttcactagcaggtcaaatcagctgtacctgagatggagcactgatcacgcaaccagtaaaaagggtttcaagatcaggtacgccgctccttactgctcactgacccaccctctcaaaaatgggggcatattaaaccggacagctggtgccgtcggatcaaaagtgcactatttttgtaaacctggataccgcatggtgggccatagcaacgccacctgccgccgcaacccacttggaatgtatcaatgggactccctgacccccctgtgtcaggccgtctcatgcgggatccccgagtctcctggaaacgggtcctttaccggtaacgaatttactctggacagcaaagtggtgtacgaatgtcacgaggggttcaaactggagtcttcacagcaggcgacagcagtgtgtcaagaggatggtctgtggtcaaataaggggaagccacctacctgtaaaccagtggcgtgcccttctatagaagcccagctgtccgagcacgtgatttggaggctagtttctggtagcctaaacgaatatggcgcccaggtcctcctgagctgtagcccaggctactacctcgaaggttggcgcctcttgaggtgccaagccaatggcacctggaatatcggggacgaacggcctagttgtcgcgtcatctcttgtggctctctgagcttccctcccaacggcaataaaatcggcactctgactgtgtatggggccactgccatatttacctgtaataccggttacacactcgtgggcagccacgtaagagagtgtctggctaatggcctatggagcgggtctgaaacaaggtgtctggcaggccactgtggctcacccgacccaatagttaacggtcacatttccggcgacggattctcatatagagatactgtggtgtatcagtgcaacccgggcttccgcctcgttggcacctccgttaggatctgcctgcaagatcataaatggtcgggtcaaacccctgtgtgcgttcccatcacctgcgggcaccccggaaatccagcccacggattcacaaacggctccgagtttaatctgaacgacgtggttaacttcacatgcaatacgggttatctcctccagggagtgtctcgagcccagtgtcgttcgaacggccaatggtcctctccccttcctacctgtagagtggttaattgctccgatcccggtttcgtagagaacgcaattcggcacggtcagcagaacttccccgaaagctttgaatacggcatgagcatcctataccactgcaaaaaagggttctacctcctcgggtccagcgccttgacttgtatggctaatggcctatgggacagatctctgcccaagtgtctggctatttcttgtgggcatcccggtgtgcctgccaatgccgtcttgactggggagttgttcacttatggcgccgttgtgcattactcctgcagaggcagtgagtctctcataggtaacgatacaagagtctgccaggaggattcgcactggagcggagctttgccgcattgcacagggaacaacccaggattttgcggggaccccggaacaccagctcatggctcccgcctcggggacgactttaagactaaatcattattgcgcttttcctgcgagatgggccaccagcttcgcgggtctcccgagcggacctgcttactgaatggatcctggagtgggctgcagcccgtttgtgaagctgttagctgcggcaaccccgggactcccaccaacgggatgattgtctcgtcagacggcattctgttctctagcagcgtgatttatgcatgttgggagggctacaagacatcgggtctgatgacaaggcattgcacagccaatgggacatggaccggtaccgctcccgattgcaccataatcagctgcggggacccgggaactttagcaaacggaatccagttcgggaccgactttacctttaataaaaccgtgagctatcaatgcaatcctggttatgttatggaagcagtgaccagtgcaacgatccgttgtactaaagacggacggtggaacccaagcaagcctgtttgcaaagccgttttatgcccacagccacccccagtgcaaaacggcacagtagaaggatccgactttcggtggggatcttctatttcttatagctgcatggatggttatcagctgtcccattccgcaattctaagttgcgaaggaagaggggtgtggaagggcgagatacctcaatgcctaccagtgttttgtggtgaccctgggataccagccgaggggcggctgtctggcaagagttttacgtataaatcagaagttttcttccagtgtaaaagccccttcatcctcgtcggctccagtcgtagagtttgccaggctgacggtacatggtccggcatccagccaacatgcattgatcctgcccacaacacgtgtcccgatccagggactccccattttggcatccaaaactcctctcgggggtatgaagtcggatcaaccgtgtttttccggtgcaggaaggggtaccacattcaaggaagcaccactcgcacatgtttagctaacctgacttggtcaggtatccagaccgaatgtattccccatgcgtgccgccagccagagaccccagcccacgcagacgtgcgcgcaatcgacctgcctacattcggctatacacttgtgtacacctgtcatccaggtttctttctcgccggcggatctgaacatagaacatgcaaagcagacatgaagtggaccgggaaatctccagtgtgtaaatcgaaaggcgttcgtgaggtgaacgaaactgttacgaagacacccgtcccttcagacgtgttcttcgtaaactctctctggaaggggtattacgagtacctgggcaaaaggcagcctgccacgttaaccgtggactggtttaacgccaccagtagtaaagtgaacgccacatttagtgaggcctctcctgtggaactgaaattaacaggcatttacaaaaaggaggaggcccatctcctactcaaggctttccagattaagggacaagctgacatatttgtgtcaaagttcgaaaatgacaactggggattggatggctacgtgtctagtgggctcgagcgtgggggcttcacttttcagggagacatacacggcaaagacttcgggaagtttaagttagagcggcaggacccactaaatcctgaccaggactccagctcccactaccacgggacatcttccggaagcgtagccgcggctattctcgtgcctttcttcgccctgatcctctcaggtttcgcattttatctgtataagcaccgtacccggccgaaagtccagtataatggatacgcgggccacgaaaacagtaatggacaggcatctttcgagaaccccatgtacgacacaaacctgaaacccacagaagccaaagccgtccggtttgataccacattaaacacagtctgtactgttgtctag

SEQ ID NO: 227772 - DNA, 10167 bp, Artificial Sequence
  derived and/or modified sequence
atgaccgcctggcggcggttccagagcctgctgctgctgctgggcctgctggtactgtgtgctcggctcttgactgccgctaaaggccagaattgcggtgggctggtacagggacccaacggcacaattgagtccccaggcttcccacacggttacccaaattacgccaactgtacctggatcatcatcaccggagagcggaacagaatccagctctcctttcacaccttcgccctcgaagaggacttcgatattctgagcgtttacgacgggcagcctcagcagggtaaccttaaagtcagactcagtggcttccagctgcccagtagcatagtatccacaggaagcatattgaccctgtggttcaccactgattttgctgtgagcgcccaggggttcaaagccctgtacgaggtactgccttctcatacctgtggaaacccgggtgagatactgaagggtgtgctccacgggacaagattcaacattggcgataagattaggtactcgtgtctgccgggttatattctcgaggggcacgccatacttacctgtattgtgagccccggcaacggtgcttcctgggattttccggcgcctttttgccgcgctgagggcgcctgcggaggcaccctgcgaggaacaagctcatcaatttcaagtccccactttccctcagaatacgagaacaacgcagactgcacatggaccatccttgctgagccaggggacaccattgcacttgtttttacggacttccaattagaagagggatacgatttccttgagattagtggaacagaggccccaagtatttggctaaccgggatgaatcttccttcgcccgtaatctctagcaagaattggttaagattgcattttacttctgactccaatcatcgccggaaaggtttcaacgctcagtttcaggtgaaaaaagccatcgagctcaaatctcgcggggtgaaaatgctgccttccaaggacgggagccataaaaatagcgtattgtcgcagggaggcgtcgctctggtatccgatatgtgtccagatcccggaattccagagaatggccgtcgtgccggaagtgatttcagtcgcgtcggagctaatgtgcagttctcatgcgaggataattatgtcctgcagggctccaagtcaattacatgtcagcgcgtcactgagactctggccgcttggtccgaccatagaccaatttgccgggcaagaacatgtggctcaaatctgagaggaccctcaggagtaattaccagccccaattaccctgtgcaatacgaagataacgcccattgtgtctgggtaattaccaccacagaccctgacaaggttatcaagctggctttcgaagaatttgagctggagcggggctacgatacactgaccgttggagatgccggtaaagtcggcgacacaagatcagtcctgtacgtgctgacaggatcttcagtccctgatcttatcgtgtctatgtccaaccaaatgtggctccacctgcagagcgacgactccatcggaagtccagggtttaaggccgtctaccaggagatcgagaaggggggttgcggcgacccagggatccctgcctatgggaagaggaccggcagctccttcctgcacggggatacactcacctttgaatgcccagctgcgttcgaactagtcggtgaaagagttattacgtgccaacagaacaaccagtggtccggaaacaagccatcttgcgtgttctcatgcttttttaacttcactgccagtagcggaatcattctgtccccgaattacccagaggaatatggaaacaacatgaattgtgtatggttgattatttctgaacccggaagccggattcatttgatctttaacgactttgacgtggaaccacaattcgattttctcgcggtcaaggatgacggcatatcagacatcaccgtgctgggtaccttttctggtaatgaagtgccgtcccaactcgcctcctcaggacatattgttcgactggagtttcagtcagaccattccactaccggtcggggcttcaacattacctatacaactttcggacaaaatgaatgccatgatcccggtattccaattaacggccgccggtttggggataggttcctcctgggctccagtgtgagctttcactgcgatgacggcttcgttaagacccaggggtccgaatccattacttgcattctacaagacggaaacgtggtttggtctagtacagttcccaggtgtgaggctccatgcgggggccacctgacagctagcagtggggtcatcttgcctcccggctggcccgggtactacaaagattctctacactgtgagtggattattgaagccaaacccggccacagcataaaaattactttcgacagattccagactgaggtgaattacgacactctggaggtaagggacggccccgcgtccagctctcctcttatcggcgagtaccacgggacacaggccccccagttcttaatttccacaggcaacttcatgtatctgctgtttactactgacaactctaggtcatctatcggatttctgatccactatgagtctgtgacgctggaaagcgactcttgtttggatcccggcataccagtgaatggccaccgacacggaggtgacttcggaatccgaagcacagtgaccttttcttgtgaccccgggtatacgctgagcgatgacgaacctctcgtctgtgaacgaaatcatcagtggaatcacgctctacccagctgcgatgccttgtgtggcggatatatacaagggaagtctggcaccgtgctatccccgggcttcccagacttctatccaaattcgctcaactgcacttggaccatcgaagtatctcatggaaaaggagtgcaaatgatttttcataccttccacctggaatctagccacgattacctgctgatcaccgaggacggatccttcagcgagcccgtggcccgtctgactgggtcggtgctaccacacactattaaagctgggttatttggcaactttacggcccagcttcggttcattagcgattttagcatatcctatgagggatttaatatcaccttcagcgagtacgacctggaaccctgtgacgatccaggcgtaccagccttcagccgccggatcggatttcacttcggggtcggtgattccctcaccttttcatgtttcttgggctaccgtcttgagggagcaactaaactcacatgtttagggggcggacgccgcgtctggtcggctcctttgccaaggtgtgtggcggaatgcggtgccagcgttaaggggaacgaaggaaccctgctttccccaaatttcccctcaaattacgacaacaaccacgagtgcatctataagatcgaaaccgaggccggcaaaggcattcatctccgaacccgctccttccaattatttgagggtgatacactgaaagtttatgacgggaaggatagtagcagcagacccttgggcacttttacaaaaaatgagctgctggggctgatactcaatagtaccagcaatcacctttggcttgagtttaacactaatgggagcgacacagaccaagggttccaactcacatacacgtccttcgatttggtgaagtgcgaggaccctggaatccccaattatggataccgcatacgcgatgaaggacactttactgatacagtggttttatattcatgcaatcccggatatgcaatgcacgggtctaatactttgacttgcctctctggggatagaagagtttgggacaaacccttacctagttgtattgccgaatgcggcggacagattcatgcagcaaccagcgggagaatcctgagtccaggatatccagccccttacgacaacaatctccactgcacctggatcatcgaagccgatccaggcaagacgatttctttgcatttcatagtgttcgatacagaaatggcacatgatattctcaaagtgtgggacggccctgtggattcagatatcctactcaaagagtggagcggatctgctctgcctgaggacatccattcaacctttaatagcctcacccttcaattcgacagtgatttttttatcagcaaaagcggtttctcgattcaattcagcacctctattgccgcaacttgtaacgacccagggatgcctcagaacggcacaagatatggagattctagagaagcaggcgacacagtgacgtttcagtgcgaccccgggtatcagctgcagggacaagctaaaatcacctgtgtgcagctgaataacagattcttctggcagcctgacccacctacttgcattgctgcttgtggcggtaatctgacgggccctgctggtgtgattttgtctccgaactatccacaaccgtatcctcccggaaaagaatgtgactggcgggttaaggtgaatcccgacttcgtcattgccctgattttcaaaagctttaacatggaaccaagttacgattttctacatatatacgagggggaagacagtaattccccgcttatcggcagctatcagggttcccaagcaccagagcgcatcgagtctagtggcaacagtttgtttctggccttcaggtcggatgcctctgtgggcctgagtggctttgccatagaattcaaagaaaaacccagggaagcatgcttcgatcccgggaacatcatgaacgggacacgggtaggcactgacttcaagttagggtccacaattacataccagtgcgactctggctataaaatcctagacccttcctctattacatgtgtgatcggggccgacggaaagccctcttgggaccaggttctgccttcatgcaacgcaccatgtggtggtcagtatactggctctgaaggcgtggtgttatctccaaactacccccacaactataccgcgggacagatctgcctgtattcaattaccgttcctaaagaatttgtcgtgtttggacaattcgcatatttccagaccgcactgaatgatctagccgagctgttcgatggcacccacgcccaggcaaggctgctcagttccctgagtggctcacatagcggggaaacactaccactggcgactagtaaccagattcttctacgtttctctgcaaaatccggtgcgtccgctaggggcttccatttcgtataccaggccgtacctcggactagtgacacacagtgcagttccgtccctgagcctagatacggaagacgtatcggatccgagttttctgctggatctatagtgcgctttgagtgtaaccctggctacctcctgcaaggatctacagccttgcattgtcagtccgtgcccaacgcactggcccaatggaacgacaccatcccctcttgtgtcgtcccttgtagcggcaattttacacagcggcggggtacaatcctgagccccggctaccccgaaccttacgggaacaacctgaactgcatctggaaaataatcgtcactgaaggatccgggatccaaattcaagtcattagcttcgccacagagcaaaattgggattctctggagattcatgacgggggtgatgttacagccccacggctcggcagtttttcgggcaccaccgtgcccgccctactcaactcgacctccaaccagctgtacctgcacttccagagcgatatctcggtggctgccgccggtttccacttggaatataagacggtgggcctcgccgcatgccaggaaccggccctgccttccaactcaatcaagattggagatcgctacatggtgaatgatgttctttcatttcagtgtgaacctgggtataccctgcagggccgctcccacatctcgtgtatgcctggcactgtaaggaggtggaactacccttctccactatgcatcgccacctgcggcggaacgctgtcaactctggggggcgtcatactatcaccaggatttcccgggtcctaccccaataacctggactgcacctggcggatatctttgccaattggatatggggcccatatccagtttctgaacttctccacagaagcgaaccacgactttctggaaatccagaatggaccctatcacacttctcccatgattggtcagtttagcgggaccgacctgcctgccgctctgttgagcaccacgcatgagacactgattcatttttatagtgaccattctcagaatcggcaaggatttaagttggcataccaggcctacgaactccaaaattgtccagacccgccccccttccagaacgggtatatgattaattccgattactccgtgggccagtctgtctccttcgagtgttacccaggatacatcctcataggccacccagttctgacctgtcagcatggaattaaccggaattggaactaccccttccctcggtgtgacgctccgtgtggctataacgttactagtcaaaatggcacaatttactcaccaggtttcccagatgagtatcctatactgaaagactgcatttggttaattaccgttccgcctggccacggcgtctatatcaactttactcttctgcagacagaagcggtgaatgattacattgctgtgtgggatggcccagatcagaatagcccacagcttggcgtgtttagcggaaacacagccctggaaaccgcatactctagcacaaaccaggtcctgctgaagttccattcggatttctcaaacggtggcttcttcgtgctgaattttcatgcattccagttgaagaaatgtcagccccctcccgctgttccacaggctgagatgttgacggaggacgatgactttgaaatcggcgacttcgtcaagtatcagtgtcatcccggctacacgttagttggaaccgatatcctgacttgcaagctgtccagccaactgcagtttgaggggtccctccctacctgcgaagcccagtgtcccgccaacgaggttagaactgggagctctggggtcattctaagccccggctatcctggaaactattttaacagccagacatgtagctggtcaattaaagttgagcccaactataacattactattttcgtggacacattccaaagcgagaaacagttcgatgccttagaggttttcgacggttcaagcggccagtctcccctgttggtcgtcctgtccggcaaccacacagaacaatccaattttacttctcggtccaatcagctttacctcagatggagtaccgaccacgcaacctcgaagaaggggtttaaaatacggtacgccgccccctattgttctttgactcacccgctgaaaaacggggggattctaaaccgaaccgccggggctgtgggatcgaaggtacattatttctgtaaacccggataccgcatggttggacactctaatgccacgtgcaggcgtaaccctctgggtatgtaccagtgggatagcctgaccccactgtgccaggcagtctcatgtgggatcccagagtcaccagggaacggctcttttaccggcaacgagtttaccttggacagcaaagtggtgtatgagtgtcatgaggggttcaaattggagagctctcagcaggcgacagctgtgtgccaagaggacggtctgtggagcaacaaaggtaagccccctacctgcaagcccgttgcttgcccgtcaatcgaggcccaacttagtgagcacgtcatatggcggctagtgtccgggagcttaaatgaatatggagcacaggtactgctgtcctgcagccctgggtactaccttgaagggtggagattgctgcgctgccaggcgaacggaacgtggaatattggcgacgaaaggccctcctgccgtgcaggacattgcggttctcccgaccctatcgtgaatggccatatttccggagatgggttctcatatcgtgacactgtggtgtatcagtgtaatcctggcttccgacttgtaggcactagcgtgcggatctgtctacaggaccataaatggtctggtcagactccagtatgcgtgcctatcacctgcggccatcccgggaatcctgcacacggcttcacaaacgggagtgaattcaatcttaatgatgtggtcaattttacctgcaatactggatacctgctccaaggggtctctagggcccagtgccgctctaacggacaatggagttcacctctgcccacatgtagagtcgtgaactgctccgaccctgggttcgtggaaaatgcaattcgccatggacagcaaaactttcctgaaagctttgagtatggtatgtctattctgtaccactgcaagaaaggcttttatctcttgggtagtagtgctttaacttgcatggccaatggactgtgggatcgatcactgccaaagtgcttggcgatatcctgcggacaccctggagtacctgcaaatgccgttctgactggtgaacttttcacgtatggcgccgtggttcactattcttgcaggggatcagagtccctgatcggcaatgacactcgggtttgccaggaggactctcattggtcaggcgccctgcctcattgcactggcaataacccaggtttttgcggcgacccaggtaccccagcccacggaagcaggctcggtgacgacttcaaaaccaagagcttattgcggttttcttgcgaaatgggtcaccagctaagaggttcacctgagagaacatgcctgctaaatgggtcctggtccggtcttcagcccgtgtgcgaggcagtcctgtgcccccagccaccccccgttcaaaacgggaccgtggaaggcagcgatttcagatggggaagcagcatatcttactcatgtatggatgggtatcaactctcccacagtgctattctctcatgcgaaggacgtggtgtgtggaagggagagattcctcagtgccttcccgtcttttgtggggatccaggtatcccggcagagggcaggctttctgggaaaagctttacctataaaagcgaggtcttctttcaatgtaagagcccatttatcctggttggaagtagccgaagagtttgccaggctgacggcacatggtccgggatccagcccacttgtattgaccctgctcacaacacctgcccggacccaggaacaccccattttgggatccagaatagtagtcgggggtacgaagtgggctcgacagtgttctttaggtgtcgaaaagggtaccacatccaggggtccacgaccagaacatgccttgcaaatctcacctggtccggtatccagaccgagtgcatcccccacgcttgccggcagcccgagactccagcgcacgcagacgtgagggctattgacctgccaacctttgggtatactttggtctacacgtgccatccagggtttttccttgccggcggctcagagcaccgcacatgcaaagctgatatgaagtggactggcaaatctcctgtctgcaaaagcaaaggtgtgcgggaggtcaatgaaacagtaacaaagacgcccgtgcctagcgacgtgtttttcgtgaatagtctgtggaaaggatattatgaatatctaggtaagaggcagccagccacactcacagtcgactggttcaacgccactagttcaaaagtcaacgccacattttccgaggcaagtcctgtcgagctgaagctcacgggcatctacaagaaggaggaggctcacctcttgctcaaagctttccagattaaaggacaagccgacattttcgtgtcaaagttcgagaatgataactggggcctggatggatacgtaagttccggactggagagggggggctttacatttcagggcgacatacacggcaaagatttcgggaagtttaagttagaacgccaggacccgttaaaccctgaccaggactctagtagccattaccatggcacaagtagcgggtctgtggccgccgccatcctcgtacccttcttcgcgctgatccttagcggattcgcgttttacctgtataaacataggactcgtccaaaagtgcagtacaatggctatgccggccacgaaaattccaatggacaggcttccttcgagaaccccatgtacgacaccaacctgaaaccaactgaggccaaggctgtgcgtttcgacactacccttaacacagtgtgtactgtcgtgtag

SEQ ID NO: 227773 - DNA, 10698 bp, Artificial Sequence
  derived and/or modified sequence
atgaccgcctggcggcggttccagagcctgctgctgctgctgggccttttggttttgtgtgcaagactactgaccgccgctaaaggtcaaaattgtggcggcctggtgcaaggccccaacggtaccatcgaatctcctggatttccccatggatatcctaattatgccaattgcacatggatcatcatcactggggagcgcaaccggatacagctgagctttcatactttcgctcttgaagaggactttgatattctttccgtctacgatggccagcctcagcaggggaatttgaaagtacgattgtctgggttccagcttccctcttctatcgtcagcaccggcagcatcctcacactctggtttacaacagattttgccgtatctgcccaggggttcaaggctttgtatgaagtcttgcccagccacacctgcggtaatcctggcgaaattctcaagggggtgctgcatggcacccggttcaatatcggcgataagataagatactcatgcctccccgggtacatattggagggtcacgctatccttacatgtatcgtctcaccaggaaacggcgctagttgggatttccctgcaccgttctgccgggcagaaggagcctgcggtggaaccctgaggggaacctcctcatccatctcatcacctcacttcccctctgaatatgagaacaatgcagactgtacatggactatactggccgagcccggggataccattgcactggtcttcaccgacttccaactggaggagggctacgatttcctggagatatcaggaacagaggcccctagtatctggctgacaggaatgaacctgccatcgcctgtgatttcgtccaagaactggctgcgacttcacttcacttctgatagtaaccatcggagaaagggatttaatgcccagtttcaggtgaagaaggccatcgagctcaagtccaggggcgtcaaaatgctgcctagtaaagacgggagtcacaaaaactctgtgctgagccaagggggcgtggccctggtcagcgatatgtgtcctgaccccggtattccagaaaatggccggagagccggcagtgatttcagcagggtcggagccaatgtgcaatttagttgcgaggacaattacgtcctgcaaggatctaagagtataacatgtcagagggtgactgagacacttgctgcctggagcgatcaccgcccaatctgccgcgcgcgaacctgtggctctaaccttcgcgggccttcaggcgtgattacttcgcctaactaccctgtgcaatacgaagataacgcacactgtgtttgggtgatcaccactaccgaccccgataaggtgattaaactggcattcgaggagtttgagctcgagcgcggatacgatactctgaccgtgggtgacgccggaaaggtcggtgacacaaggtccgtcctgtacgtgcttaccggatctagcgtgcccgacctgatagtctccatgtccaatcagatgtggctgcatctgcagagcgacgattccataggttcaccagggtttaaagccgtctaccaggagatagagaaaggaggctgtggtgacccaggtatccccgcttatggtaagagaactggctcatctttcctgcatggagacaccctgaccttcgaatgtcccgcggccttcgagctggttggtgaacgcgtgataacttgccagcagaacaaccagtggagtggaaataagcccagttgcgtattctcctgcttcttcaactttactgctagctcaggaattattctctctccaaactaccccgaggaatatgggaataatatgaattgtgtgtggcttatcatttctgaacccggatccagaatccatctcatctttaatgacttcgatgttgaaccgcagttcgattttctcgccgtgaaggatgatggcatcagtgatattaccgttttgggaacttttagcggaaacgaggtgccctcccagctggcctcctctggacacattgtacggctggagtttcagtccgatcactcaaccaccgggcgcggatttaatattacttacacaacctttggtcagaacgagtgccacgaccccgggatccccattaacggacgtcggttcggtgaccggtttctcctaggctcatcagtttccttccattgcgacgatggctttgtgaagacccaaggctccgaatccatcacgtgcattctccaagatggtaatgtcgtgtggtcatcgaccgtcccccggtgtgaagccccatgcggcggacatcttacagccagttcaggggtaatcctgcccccggggtggcctggatattataaagactcactgcactgcgagtggattatcgaagctaagccgggacattcaatcaaaatcacattcgatcgcttccagaccgaggtgaattatgatacactggaagtgcgggacggtccagcttctagttctccactgattggcgaatatcacggaacccaggccccccagtttttgatctccacggggaattttatgtatctcctctttacgacggacaacagtaggagctctataggcttcctcatccattacgaatccgtgacattagagagcgattcttgcctggaccccggcataccagtcaatggtcatcgccacgggggcgatttcggaattcgctcgacagtgactttttcatgtgatccaggatacaccctctctgacgacgaaccattagtgtgtgagcggaatcatcaatggaaccatgcactgccaagctgtgatgcgctttgtgggggctatatccagggcaaatccgggaccgttctttcacccggttttcccgatttctatccaaattctctgaactgcacttggacaattgaagtatcacatggcaagggtgtgcagatgatctttcacacctttcatctcgagtcctcccacgactatcttttgatcacagaagatggaagcttttctgagccagtcgccagacttacagggagtgtgctcccccatacaattaaggctggacttttcgggaacttcactgcccaattacgttttatttccgacttcagcatcagctacgagggatttaacatcacctttagcgaatacgacttggagccctgcgatgatcctggcgtacctgcattcagccgacggatagggtttcatttcggggtgggagattcactgactttctcctgcttcctcggatatcgactggagggggccactaagctgacttgcctgggcgggggcaggcgcgtatggtccgcacccctgcccaggtgcgtggccgaatgtggtgccagcgtgaaaggcaatgagggtactttgctgagtcctaacttcccatcaaactatgacaataatcacgaatgtatctataagatcgagaccgaggccggcaaaggtatacacctgcgcacaagatcattccagttattcgagggcgacacactcaaggtttacgatggcaaggattcttcaagtagacccctgggaacctttaccaagaatgagttgctcggcctaatcctaaactctacctccaaccatctgtggctggaattcaataccaatggcagtgatacagatcagggtttccaactgacctacacttcctttgatctcgtgaagtgcgaggatcccggaatccccaactacgggtaccggataagggatgagggccattttacagatacagtggtgttgtattcctgcaaccccgggtatgctatgcacgggtcaaacacattgacctgcttaagcggagacagacgggtgtgggacaagcctctgccttcatgcatagctgagtgtggaggccagatccatgccgccacatcaggacgtattctgtctcctggttatcccgccccctatgacaacaacctgcactgtacttggatcatcgaggctgaccccgggaagaccatatcattgcacttcattgtgtttgacacagagatggcccatgatatactgaaggtttgggacggaccagtcgattcagacattttgctcaaggagtggagcgggtccgcattgcccgaagatattcactctacttttaacagcttaactttgcagtttgattccgatttttttatatccaagtccggcttctctatccagttttctacctccattgctgcaacctgcaatgatcccgggatgccacagaatggaacgagatacggcgattctcgagaagcaggcgataccgtgacttttcagtgcgatcccggctatcagctgcaggggcaagccaaaattacatgtgtgcagctgaacaaccgctttttctggcagcccgatccccctacttgcattgctgcctgcggtgggaatctcaccgggcctgctggggtgatcctaagccctaactatcctcagccctatcctcccggaaaggagtgtgattggagggtcaaagttaaccccgattttgtcatcgcgctgatttttaagagcttcaacatggagcccagctacgactttctgcacatctacgagggagaggactccaactctcccctgatcggatcttatcagggctctcaggcaccagaaaggatcgagtccagcggcaattctctgttcctggcctttcggtcagatgcaagcgttggtttgtcaggcttcgccatcgaatttaaagaaaagcccagggaagcatgctttgacccaggaaatatcatgaatggtactcgcgtcggcacagactttaagctcgggtcaactatcacataccagtgcgacagcggatacaagattctggacccatcatctattacctgtgtgatcggagcagatgggaagccctcctgggaccaggttctcccctcttgtaacgcaccttgtgggggtcagtacacagggagcgaaggagtcgtcttaagcccaaactaccctcacaattacactgccggacagatttgcctgtacagcatcaccgtgcccaaggagtttgtcgtgttcggtcagttcgcatacttccaaaccgcgctgaacgacttagctgagctttttgatggtacgcatgcccaggctaggctgctgagcagcctgtccggttcgcactccggtgagaccctcccactcgcaacctccaaccaaatactactcaggttttctgccaaatctggggcatctgccaggggctttcatttcgtgtaccaggcggtcccgagaactagcgacacgcagtgttcttcggtgcccgagcctcggtatggacgccgcatagggagcgagtttagcgccggctccatcgtgcggtttgaatgcaaccctggctacttacttcaggggtcaaccgccttgcattgccagagtgttccaaacgccctcgcgcagtggaacgacacaattcctagctgcgtggtgccgtgctccggaaacttcacgcaacggcgcgggactattttgagtcctggctatcctgagccatatggcaacaacctgaattgcatttggaaaattatcgtgaccgagggctccggcatccagattcaggtgatctcatttgcaactgaacagaattgggactcactggaaattcatgatggcggcgatgttaccgcgcctcggctggggagtttttctggtactactgtacctgctctgctcaattccactagtaatcagctgtacctgcactttcagagtgatatctctgtcgccgctgccgggtttcatctcgaatacaaaacagtgggtctcgcagcctgtcaggagcctgccctgccttctaacagtatcaagattggagatagatacatggtcaacgatgttctctcattccagtgtgagccgggctacaccctgcaggggcgatcacacatctcttgcatgccggggacagtgcgccggtggaactacccttcaccactgtgcatcgcgacctgcggcggcacgttaagcacactgggcggcgtgatactgtcacctgggttccctggctcctatccaaataatcttgactgcacatggcgtataagcctccctatcggctacggcgcacacattcagttccttaacttttccacagaggcgaaccacgatttcctggaaatccagaacgggccttatcatactagcccaatgatagggcagttcagcggcacagacttgcctgccgccctcctgtcaaccacacatgagacactgatacacttctactcagaccacagccagaaccgtcaggggtttaaactcgcctatcaggcctacgagctccagaactgccccgatccacccccgtttcagaatggatacatgataaatagcgattactctgttggccagtcagtgtcttttgaatgttatccagggtatatcctgattggccatccggtgctcacctgtcagcacggaatcaaccggaactggaattatcccttcccacgctgcgacgctccctgtggctacaacgtgacttcccaaaatgggaccatctactcacctggatttccggatgaataccctatcctgaaagactgcatctggttgattacggtgccacctgggcatggagtatatattaacttcactttgctacaaaccgaagctgtgaacgactacattgcagtgtgggatggacccgatcagaactcacctcagctgggcgtctttagtggaaatacagccctcgaaactgcatattcctctacgaaccaagtactgctcaaatttcactctgacttcagcaacggcggattttttgtactaaatttccacgcgttccagctaaaaaagtgtcagccaccccccgcagtcccacaggctgagatgctgactgaggatgatgactttgagattggggatttcgtcaaataccaatgtcaccccggttatacgctggtgggcacagacattttgacctgtaagctgtcatcacaacttcaattcgagggaagtctgcctacatgcgaagcccaatgccctgccaacgaggtgcgcacagggtcctcaggagtaattctgagtccagggtatccaggaaattacttcaactcccagacctgctcttggagcatcaaggtggaaccaaattataatataactatcttcgtggacacttttcagagcgaaaagcagttcgacgccctggaggtcttcgacggaagctccggacagagcccccttctggtggtcttatccgggaatcacactgagcaatccaacttcacctctcggagcaatcaactatacctgagatggagcacggaccatgctacgtcaaagaagggttttaaaataaggtacgctgccccttactgctccctcacgcatcctctcaaaaatggcggaatcctgaaccgaaccgcaggagctgtgggatctaaggtgcactatttttgtaaacctggctacaggatggtcggccactccaacgcaacttgtaggcgcaatcctctgggtatgtaccagtgggactctctgactcccctgtgtcaggcagtctcttgcgggatccctgagtcgccaggcaatggcagctttacaggcaatgagttcactttggacagtaaggtagtgtacgaatgccacgaaggctttaagctcgaatcctctcagcaagccacagctgtatgccaggaggacgggttgtggagtaataaagggaagccccctacctgtaagccggtggcgtgtccgtcaatcgaggctcaattatccgagcacgtcatatggcgcctggtgtcaggttccctgaacgaatatggggcacaagtcctcctgtcgtgttcaccgggctactacctggaggggtggagattgcttcggtgtcaagcgaatgggacttggaatattggggacgagagaccatcctgccgggtcatctcttgtggctctctgtcattccccccaaacggcaataaaataggcaccctcactgtgtatggcgccacggccatcttcacctgcaatacaggttacacccttgttggcagccacgttagggaatgcctcgccaacggactatggtccggcagcgaaacccgttgtctcgccggacattgcggctctcccgatccaatcgttaatggacatatctcaggggacgggttctcatatcgcgatactgttgtctatcagtgtaatcccggcttcagactcgtgggcacctctgtgcgaatctgcctacaggatcataaatggtcaggacaaacgcccgtgtgcgtgcccattacatgcggccatcctgggaaccccgcccatggttttactaacgggtccgagttcaatctcaacgacgtggtcaacttcacttgcaacactggatatctcctccagggggtgagtcgagcccaatgcaggagcaacggacaatggtcatctcctctgccaacctgtagggttgtcaattgctctgacccagggttcgtcgaaaacgcaatacggcatggacagcaaaatttccccgagtcttttgagtatggtatgagtatattgtaccactgcaagaagggcttctacctactcgggtcttctgcactcacttgtatggctaatggtctgtgggatcgtagcctccccaagtgtctcgccatctcctgtggacaccctggggttccggccaatgcagtgttgacaggggagctctttacatacggagccgttgtgcattattcctgcagaggaagcgaatccctcatcggcaacgacactcgggtgtgtcaggaagatagccactggtcgggcgccctaccacactgcacgggtaacaatcccggcttctgtggggatccgggcaccccggcgcacggatctaggctcggagatgacttcaaaaccaaaagtctccttcggttctcatgtgaaatgggacatcagctgcgggggagtccagaaaggacatgcctgcttaatggttcatggtctggattgcaacccgtgtgcgaagccgtttcttgtggaaacccgggaacacccacaaatggtatgatcgtctcatcagatggcatcctgttctcctcttccgtgatctacgcgtgctgggaaggttacaaaacttccgggcttatgactaggcactgcacagccaatggtacgtggactggaacagccccggactgtaccattatctcatgtggcgatccaggcacgcttgcaaacgggattcaatttggcacggatttcacatttaacaagaccgtctcttaccagtgtaacccgggttatgtcatggaagcagtgacatccgccacaattagatgtaccaaggatggcagatggaatcccagcaaaccagtttgcaaagctgtcctctgtccccagccccctcccgtgcaaaatggaacagtggagggatcagacttccgctggggatcatctatctcctacagttgcatggacggctaccagctatcacacagtgccattctttcatgtgaagggcgaggcgtgtggaaaggcgaaatcccacagtgtctgcctgtgttttgcggagatcccggtatacccgccgagggcagactgagtggcaaaagctttacctacaaaagcgaagtattcttccagtgtaagtccccttttatattggtcgggtcatcacgccgagtgtgtcaagctgatggcacttggagcggaatccagcctacctgtattgaccccgcacataatacctgccctgatccggggactcctcactttgggatccaaaattcgtccagaggatatgaagttggtagcactgtgttttttcgctgccggaaggggtatcatatccagggtagcactactaggacctgcttagctaacttgacgtggagcggaatccagacggagtgtattccccacgcctgtcggcaacctgagactcccgcgcacgccgatgttagggccattgatctgcccacttttggctatacgctggtgtacacatgtcaccccggattcttcctagccggcggatctgaacatagaacgtgtaaagcagatatgaagtggactggaaagtcaccggtgtgcaaaagtaagggggtcagggaggttaatgagactgttactaaaacccctgtgccttcagacgtgttcttcgtaaactcactctggaagggctattatgagtacctcggcaaacgccagccagccacgctgacggtggattggtttaacgccaccagtagtaaagttaatgctactttctcagaggcatctcccgtcgaactcaagctgactggaatctacaaaaaggaggaagcccaccttctcttgaaggccttccaaatcaaagggcaggctgacattttcgtgtcaaagtttgaaaacgacaactggggactcgacggttatgttagctctggtcttgagagaggaggcttcactttccagggggacatacacggtaaggactttggtaaattcaagctggagcgccaagaccccctgaacccagaccaagactcaagttcgcactatcacggtacttcgtctgggtccgtggccgcggctatcctggtccccttcttcgcactaatcctgtctggttttgcattttacctgtacaaacaccgcacccgcccaaaagtgcagtacaacggctacgcaggacacgagaactcaaatggacaggctagttttgaaaaccccatgtacgacaccaatctgaaacctaccgaggccaaggcggtcagattcgataccacgctcaacaccgtctgtacagttgtatag

SEQ ID NO: 227774 - DNA, 10695 bp, Artificial Sequence
  derived and/or modified sequence
atgaccgcctggcggcggttccagagcctgctgctgctgctgggcttgcttgtgctctgcgcacggctgctgacagccgccaaaggtcagaattgcggcggactggtccagggtcccaacggcacaattgagtctcccggtttcccgcatgggtatcctaattatgccaactgcacttggattatcataacaggagaacgaaataggatccagctgtccttccatacttttgctctagaagaggacttcgacatcctttctgtgtatgatggacagccccagcaggggaatctcaaagtgaggttgtctggctttcaactgcccagctccatcgtatctaccggttcgattctcaccctctggttcacaaccgacttcgccgtgagcgcccagggttttaaggcactgtacgaggtccttccctctcacacctgtggcaatcccggagaaatattaaaaggtgtccttcatggcacccgttttaacataggcgacaagatccggtacagttgccttccaggctacattctggagggtcacgccattctcacatgtatcgtgtcacctggtaacggcgcctcctgggacttccccgccccgttctgccgggccgagggcgcttgtggtggcactctcaggggtacctcctcttccattagcagcccccattttccatctgaatacgagaataacgccgattgtacatggacaatccttgccgaaccaggggacaccatcgctcttgtgttcaccgacttccagttggaagaagggtacgactttctagagatttctgggacagaggccccttctatctggctcaccggcatgaatctgccctccccagtgatctcatcgaagaactggctgcggttgcacttcaccagcgattctaatcatcggcggaagggattcaatgctcagttccaagtaaagaaggccatcgagctgaagtcgcgaggagtgaaaatgctgcccagtaaggacggctctcataaaaacagcgtcctgtcgcagggaggtgtcgcactggtgtctgatatgtgtcccgatcccggcataccagagaacggacgccgtgctgggagcgatttcagagttggtgccaacgtccagttctcgtgtgaggataattatgttctgcagggatccaaatcaattacttgtcagagagtcaccgagacacttgccgcgtggtccgaccaccggcctatctgccgcgcccgcacctgtgggagcaacctgaggggtccatccggtgttataacatctcctaattaccccgtacagtacgaggataacgctcactgcgtgtgggtgattacaacgacagatcctgacaaagttatcaaactcgcattcgaagagtttgagctagaacgggggtacgacacactgactgtcggagacgccggaaaggtcggggatacccggagcgtgctgtacgtcctgacaggctcctcggtgccggacctcatagtctctatgagtaatcagatgtggttacatctgcagtccgatgactccatcggatctccagggttcaaggccgtgtatcaggagattgagaaaggagggtgcggcgatccaggaataccagcttacggtaagagaacaggaagctcgttcctccacggcgatacactgactttcgagtgccccgcagccttcgaactggtaggcgaaagggtcattacctgccagcagaacaaccagtggtcgggaaacaaaccttcttgtgtgttcagttgcttttttaatttcactgcctcatctgggatcatcctgtctccaaattatcccgaagagtacggaaacaatatgaattgcgtctggctgatcatcagcgagcccgggagccgcatccacctgatttttaatgatttcgatgtcgagcctcagttcgactttctagcggtgaaggacgacgggatatccgatattacggtacttggaacattttccggtaatgaggtgccctcacagctggcctcctcaggacatatcgtaagactggaattccagtccgatcattctactacgggcaggggattcaatattacctatactacattcggacagaatgaatgccacgatccagggattcccattaacggaagaagattcggagataggtttttattgggcagcagtgtgagcttccactgtgacgacggatttgtgaagactcaggggagcgagtctatcacctgcatcctacaggacggtaacgttgtgtggagttctactgtgcctcgctgcgaggccccgtgtggtggtcatctgaccgcttcatccggtgtgatcctgcctcccggctggcctggatactataaagacagcctacactgtgaatggattatagaagcaaagcctggacatagtatcaagatcacttttgatagattccagacagaagtgaactatgatacgctggaggttagagatggcccagcttcaagcagtcccttaattggcgaataccatgggacacaggccccacaattcttgatttcaactgggaacttcatgtacttgctgttcaccaccgacaattctcgttccagtatcggtttcttaatccattacgaatctgtgactctggagtccgatagctgcctcgaccctggcatacctgttaatggacatagacacggaggtgactttggcatcaggtctacagtgaccttcagctgcgacccgggttacacgctctccgatgacgaacctctggtttgcgaacgtaaccatcaatggaatcacgccctcccttcttgtgatgccctatgtggcggctacatccagggcaagtctgggactgtgttgagccctggcttccccgacttctaccctaatagtttgaactgtacatggaccatagaggtgtctcatggtaagggggtgcagatgatcttccacactttccacctggagagctcacatgattaccttttgattactgaggacggtagctttagtgaacccgtggccagattgaccggctccgtcttgccgcataccatcaaggcgggtctcttcggcaatttcactgcacagctgagatttatctccgacttctccattagctatgaaggatttaacattacatttagtgagtatgacctggagccctgcgatgaccccggtgtcccagccttttccagacgaattggctttcactttggggtgggggattcccttacattctcctgtttcctaggttatcgactcgaaggcgcaacaaaactgacgtgtttaggcggtggacgacgggtgtggagtgctcctctccctcgatgtgttgcggagtgtggcgcatccgtgaagggaaacgagggaaccctgctctcccccaactttcctagcaactacgataacaatcacgaatgtatctataagatcgaaactgaggcgggaaaaggcattcacttacgtacccgctccttccagctcttcgagggcgacactctcaaagtgtacgatggtaaagactcttccagccgccccctgggaacctttaccaagaatgagttgcttggcctgattctgaacagcacttccaaccacctctggctggaatttaacaccaatgggtctgataccgatcagggtttccagctgacttacacgtcatttgatcttgtgaagtgtgaagatcctgggatccccaattatggatacagaattcgagatgagggccattttaccgatacagttgtgctgtacagctgcaatcccggttacgcaatgcacgggtcaaacacactgacctgcttatcgggagatcgccgggtatgggacaagcccctgccttcttgcatcgccgagtgcggcggacaaattcacgccgccaccagcgggagaattctctccccaggctacccagcaccatatgacaataacttgcactgcacttggatcatcgaagcggacccaggtaaaacgatcagcttgcacttcatcgttttcgataccgagatggcgcacgatatcttaaaggtgtgggacggccctgttgattcggatattctcctgaaggagtggagtgggagcgctcttccagaggacattcattccacttttaactctcttacattgcagtttgatagtgatttctttatatctaagagtggattcagcatccagttctcgactagtattgcagccacatgcaatgaccccggcatgcctcagaacggtacaaggtacggcgattccagagaagcaggggataccgtgacattccagtgtgatccagggtaccagttgcaaggccaggcaaagatcacctgtgtccagctcaacaatcgttttttctggcagcccgatccaccaacgtgtatcgcagcctgcggcggcaatttgacgggccctgcaggagtgatcctgtctcccaattacccccaaccatacccacccggcaaagaatgcgattggcgggtcaaggtgaatccagattttgtgattgctctcatcttcaaatcttttaatatggagcctagctatgattttctgcacatctatgagggagaggattcaaactctcccctgatcggatcttaccagggtagccaagcgcccgagcgaattgaatcttctggcaattcgctatttctggcatttagatcagacgcttcagtcggactttctggattcgcaatcgagtttaaggaaaagccccgcgaggcatgtttcgacccagggaacatcatgaacgggaccagggtgggaactgattttaaactgggatcaaccatcacataccagtgcgatagtggatataaaatactcgatccatcatcgatcacctgcgtcatcggcgctgacggtaaaccatcttgggaccaggtacttccatcctgtaacgccccatgtgggggacagtacactggctctgagggggtcgtgctgtctccgaactatccccataactatacagccggccagatctgcctttactctatcaccgtgccaaaggagtttgtcgtgtttggtcagtttgcgtacttccaaacagcgctcaacgatctggcagagctgttcgatggtacccatgctcaagcaaggctgctcagttcccttagtggtagccacagcggcgagactctgccactcgcaactagtaatcagattcttcttcgcttctccgcaaaatcaggcgcttccgcccgaggctttcactttgtgtaccaggctgtgcccagaaccagcgatactcagtgttcatctgtcccagagccgcgatatggcaggaggattggatcagaattctccgccggatctatcgttcgattcgaatgcaatcctgggtatctgctacagggttcaaccgcactgcactgccagagcgtgccaaatgccttggctcaatggaatgacaccattccttcttgcgtcgttccgtgttcagggaactttactcaacgacgcggtactatcctcagtccgggatatccggagccatacggtaacaacctgaattgcatctggaaaattattgtgacagaggggtctgggatccagatccaggtgatcagttttgctacagagcaaaattgggacagtctggaaatccacgacggcggagatgttactgctcccaggctggggtccttcagcgggaccactgtccccgcactgctaaactccacatccaatcagctataccttcactttcagtctgacatctctgtggcagccgcaggctttcacctcgagtacaaaacagttggcctggcggcatgccaagagcccgctctgccttctaactcgatcaaaataggagaccgctacatggtcaacgatgtactgtctttccagtgcgaaccaggatataccctccaaggaaggtcccatattagctgtatgccaggcaccgtgagacgttggaactatccttctcctctgtgcatagccacatgcgggggcacattgtcaacccttggtggggtgattctcagtccgggatttccagggtcttaccctaacaacctagactgcacatggcggatcagtcttcccattggatatggagctcatattcagtttctcaatttcagcaccgaggccaatcatgattttctggaaatacagaatggcccttaccacacttcccctatgattgggcagtttagcggcaccgacctgcctgcagccctgttaagtaccacacacgaaaccctgattcacttctactccgatcattcccagaaccgccagggttttaaactggcgtaccaagcatatgagcttcaaaattgcccagacccacccccatttcagaatggctacatgattaactccgactattcagtcgggcaatctgttagctttgaatgctaccctggttacatcctgattgggcatcctgtccttacttgccagcacggtatcaacagaaattggaactatcccttcccccgctgcgatgcaccttgcggctacaatgttacctcccagaatgggaccatctactcgccaggttttccggacgaatatccgatactgaaagactgcatttggctcatcacagtgccccccgggcatggtgtttacatcaatttcactttgctacagaccgaagctgtaaatgattatatcgcagtttgggacggccccgatcagaatagtccccagttaggagtgttttctggaaataccgccttggaaacggcctacagttctactaaccaggtactactgaagttccacagtgacttcagcaatggaggcttctttgtgctcaactttcacgccttccagctgaagaagtgtcagcctcctcctgcagtgccccaggccgagatgttgactgaagatgacgatttcgagatcggcgatttcgttaagtaccaatgccaccccgggtacacccttgtcggaaccgatatcctgacctgcaaattgtccagccaactgcaattcgaaggtagcctaccaacttgtgaagcacaatgtccagcaaacgaagtgagaaccggatcaagtggtgtgatcctgagcccagggtatccgggcaactactttaattcgcagacttgctcctggtcgattaaggtagagcctaactacaatatcacgatttttgtcgataccttccaatcggaaaaacaattcgacgcactggaggttttcgatggatctagcggccagtctcccctgctggtggtcctgagcgggaaccacactgaacaatcaaattttacttccagaagtaatcagctgtacctgcggtggagcaccgaccatgcaacatccaagaagggatttaagataaggtacgccgccccatattgtagtttgactcatccgctgaagaacgggggtattcttaaccgtacagcaggcgccgtgggcagcaaggtccattatttttgcaagcctggctaccgcatggtcgggcactctaacgccacctgccggagaaatcccttaggcatgtatcagtgggatagcctcacccctctgtgccaggccgtttcctgtgggatacctgagagccctggaaatggttcatttacagggaatgaattcaccctagacagtaaggtggtgtatgaatgtcacgagggttttaaattagagtccagccaacaggccactgccgtttgtcaggaggacgggctctggagcaacaaaggaaagccgccgacatgtaagccggtcgcttgccctagcatcgaagcccagctttcagaacatgtgatctggagactcgtttccggaagcctgaacgaatacggcgcccaggtgttgttgagctgctcccccggctactatttggagggctggaggcttcttcgttgtcaggccaatggcacatggaacataggagacgaaagaccaagctgtcgagttatctcctgtggttctctgtcttttccccctaatggaaataagattggtaccctgacggtgtacggggcaaccgcaattttcacctgcaatactggttacactctcgtgggatcacatgtaagggagtgcctcgccaacggcctctggagtgggagtgagactaggtgtcttgccggacactgcggctcaccagatcccattgttaacggccatatcagtggtgacggatttagctatcgggacacggttgtataccagtgcaatcctggcttccgcttggtgggcacctccgtgaggatctgcttacaagatcacaaatggagcgggcagacccccgtgtgcgtccctatcacctgtggccacccagggaatcccgcacacggattcacaaacggcagtgagttcaaccttaatgacgtagtcaatttcacgtgtaacacaggatacctcctccagggcgtctcacgggcacagtgccggtccaatggccaatggagtagtcccttgcctacctgtagagtggtaaattgttccgaccccgggtttgtagagaacgcaatacggcatggacagcagaatttccccgagagtttcgaatatggcatgtccatactgtaccactgcaagaagggcttctatcttcttggctcatccgctctgacctgcatggctaatggactgtgggaccgctcattacctaaatgcctggctataagttgtggccatccgggcgtgcccgccaatgcagtcctgaccggtgaactgttcacctacggcgccgtggtccattattcctgtagagggtccgagagtctcatcggcaatgacactcgcgtgtgtcaggaggatagtcactggtcaggcgccctgccccactgcacaggcaataaccccggcttctgcggggaccccgggactccagcgcatggaagccgcctaggcgacgactttaaaacaaagtcacttctgagattcagctgtgagatgggacaccagctcagggggtcccctgaacgtacttgcctcctgaatggctcctggtctggcttgcagccagtgtgcgaggccgtaagttgcggcaaccccgggacccccaccaatggcatgattgtatccagcgacgggatcctgttctcatcctccgtaatttatgcctgttgggagggctataagactagcggcctgatgaccaggcactgcaccgcaaacgggacgtggactggcactgctcccgattgtactataatttcatgcggggatccagggacacttgctaatggcattcaattcggtacagactttacttttaacaaaactgtgtcatatcagtgcaatccgggctacgtgatggaggccgtcacttccgctacaattcgatgtactaaagacgggcgctggaatccctccaaacccgtttgcaaagccgtgttatgcccacagcctccacctgttcagaacggaaccgtggagggatccgacttcaggtgggggtctagtattagctatagttgtatggacggataccagcttagccactctgccatcctctcgtgtgagggtcggggtgtttggaaaggcgaaattccccagtgtctgcctgtattctgcggggaccccggtatccctgccgagggacgcctgtcgggaaagagtttcacctacaaatctgaggtattcttccaatgcaagagtccctttatactggtcggaagctctcggcgtgtgtgccaagcagatggcacgtggagcgggatacaacctacctgcattgacccagcccataacacctgtcctgatcccggtaccccacatttcggaattcaaaactctagtagagggtacgaggtgggatctaccgtgttcttcaggtgtcggaaagggtaccacattcaggggtcgaccacccggacctgtctggcgaatctgacatggagcggaatccaaacagagtgtattccgcacgcctgccgtcagccagagacaccagcccatgcagacgtgagggcaattgacctgcccacattcggctacaccctggtgtatacatgccatccaggcttctttctagcgggcggctctgaacatcgtacctgtaaagctgatatgaaatggaccgggaaatccccagtctgcaagtcaaagggcgtaagagaagtgaatgagacggtgacaaaaacccctgttccttctgacgtgttcttcgttaactctttgtggaaaggatattatgagtatctggggaagaggcagcctgccacactgacagttgattggtttaatgctacaagctctaaggtgaatgctaccttctccgaggcgtcccccgtagagctgaagttaacagggatctacaagaaagaagaggctcatctactgcttaaggcatttcaaatcaagggccaggcagatatttttgtaagcaaattcgagaatgacaactggggactggatggatacgtttctagcggcctcgaaagaggcgggtttacctttcagggagacatccatgggaaggatttcggcaagttcaaactcgagcggcaggatcctctcaaccccgaccaggactccagctcacactatcacggcacttcttcagggtccgtagcggccgcaattttggtacccttcttcgctttgatcctgagcggctttgcattctacctgtataaacaccgcaccaggcctaaggtccagtacaacggttatgcagggcatgagaatagcaacggacaggctagtttcgagaatccaatgtacgataccaatctgaagccaaccgaagccaaggctgtacggttcgacacaacattgaatacagtctgcaccgtggtatag

SEQ ID NO: 227775 - DNA, 6330 bp, Artificial Sequence
  derived and/or modified sequence
atgaccgcctggcggcggttccagagcctgctgctgctgctgggccttctagtcctgtgtgctagactcctgactgctgcaaaggggcagaactgtggaggactggttcaggggcctaacggcaccatagagagccctggctttcctcatggctacccaaactacgctaattgcacttggattattattactggggagcgcaatcgcattcagctatcattccacacctttgcccttgaggaggatttcgatatcctgagcgtatacgatggacaaccgcagcaaggaaacctgaaggtgcgcctcagtggctttcaattgccttccagcatcgttagcacgggttccatccttaccctgtggttcacaaccgattttgccgtgtcagctcaagggtttaaggctctgtatgaggttctccctagccacacctgcggaaatcctggcgagattttgaagggagtgctgcacgggacccgcttcaacattggcgataagatccgctactcttgtctccctggctacatcttggagggccatgccattctgacctgcatcgtttcccctgggaacggggcctcatgggatttcccagcgccattctgccgtgcagagggggcgtgcggcggcaccctgagagggactagttcaagcattagcagtcctcatttcccttctgagtatgagaacaatgccgactgcacctggacaatcctcgcagagcccggcgacacaatcgctttggtgttcactgacttccaactagaggagggttatgactttctcgaaatatcagggaccgaggccccgtccatttggcttactggcatgaatttgccttctcccgtaatttcttccaagaactggctgcgactgcactttacctctgactccaatcaccgtagaaagggcttcaatgcccagttccaggtgaagaaagctattgagctgaagagtcgcggagtcaagatgctcccaagcaaagatggcagccataagaattcggtactgagccagggcggtgtggctctggtttccgacatgtgcccggaccccggaattccagaaaacggtcgtcgagcgggatctgactttagggtgggtgccaatgtgcagttttcctgtgaagacaactatgtactgcagggtagcaaatcaataacatgccaacgagtcaccgagactctggcagcatggagcgatcatcggcccatctgcagagcgagaacttgtggatccaacctgaggggaccctcgggtgtgatcaccagtcctaactacccagtacagtatgaggacaacgcccactgtgtgtgggtaatcactaccactgatccagataaggtgattaagctggctttcgaagagtttgagctcgaacggggctatgacactttaacagtgggcgatgcgggtaaggtaggcgatactaggagcgtcctttatgtccttacagggtcctccgtgcctgacctgatcgtctccatgagcaaccagatgtggctgcatctgcagtccgacgattccatagggtctcccgggtttaaggcagtgtatcaagaaattgaaaagggaggatgtggagaccccggcattcccgcgtatggtaagcgcaccggctcctctttcctgcacggcgatactctgacatttgaatgtccggccgcttttgagctggtgggagaaagggtcattacttgtcagcagaacaaccagtggagtggaaataagcctagctgtgtctttagctgtttcttcaacttcaccgcttcaagtggcattatcctcagtcccaattaccccgaggagtatgggaataacatgaactgtgtctggctaataataagtgagcccgggtcgcgcatccacttaatcttcaatgacttcgacgttgaacctcagtttgactttttggctgtcaaggatgacggaatttcagacattacagttctcggaaccttttccgggaatgaggtccccagtcagcttgcaagcagcgggcatatcgtgagacttgaatttcaaagcgaccactcaactaccggccgcggttttaacatcacatacaccacattcggtcagaatgaatgtcacgaccctggaatccctattaatggcaggagattcggggatcggtttcttctggggtcctcagtgtccttccactgcgatgacgggtttgtgaagacccaaggctccgaatccatcacttgcatcctccaggatgggaacgtggtctggagcagtacagtgccaagatgtgaagcaccctgcggcggtcatctgaccgcatcttcaggggtgatcttgccgcccgggtggcctgggtattacaaagactctcttcactgcgaatggataatagaagccaaacccggccactcaattaagattacttttgatcgctttcagactgaggttaactacgatactcttgaggttcgagatggcccagcctcatccagtccactgattggggaataccatgggacccaggcaccccagtttttgatcagtactggaaatttcatgtatttgctgtttactacagataattcccgctccagcattggctttctgatacactacgagtcggtcaccctggagagcgactcttgcctagatccgggtattcctgtgaacgggcaccgtcacggaggagattttgggatcaggtctaccgtcaccttctcatgcgaccccggctacaccctcagcgatgatgaacctcttgtctgcgagaggaatcatcagtggaaccacgcactgccgtcgtgtgatgcgctttgtggtgggtacatccagggcaagtccggtaccgtcctctctccaggattccctgacttttaccctaattcactcaattgcacctggacaattgaggtttcccacggaaaaggggtgcagatgatcttccatacttttcacctggagtcatctcatgattatttgttgatcacggaggacggtagcttttctgagccagtggcaaggttgaccgggtcagttctgccccacacaatcaaggccggactctttgggaactttactgcacagctgagatttatcagcgatttctccatttcttacgaaggatttaacattaccttctctgaatacgatttagaaccctgtgatgacccaggggtccctgccttcagtcgccggataggattccatttcggggtgggcgactctcttacttttagttgttttctaggatacagattggagggcgccactaagctgacgtgcctgggaggcggaaggcgcgtgtggtccgctcctttgccccgttgtgtggctgagtgcggcgcttctgttaagggcaatgaggggacgttactgagtccaaactttccatcgaattatgacaataatcatgaatgcatctacaagatagagaccgaggcaggaaaaggcatccacctcaggacacgatccttccaattgtttgagggcgacaccctgaaagtgtatgacggtaaggactcaagcagcaggcccctgggtacatttacaaagaatgaattgctgggcctgatcttgaatagcacctccaaccacctttggctggagttcaacacaaatggttctgatacagaccagggcttccagttgacctacacgtcttttgatttggtgaaatgtgaagaccccgggatcccaaattatggttatcggatccgcgacgaaggacacttcacagatactgttgtcctttactcttgtaaccccggctacgcaatgcatgggtccaataccttgacgtgtctgtctggggatcgcagagtgtgggataagcccctgccttcctgcatcgctgagtgcggcgggcaaatccacgcagctacttctggaagaatcctgtctccaggctacccagccccatatgacaacaatctacattgcacgtggatcatcgaagcagatcctggtaaaaccatttctctgcattttattgtgttcgataccgagatggcccatgacattcttaaggtttgggacggccccgtggactctgatattctgctgaaagaatggtctggctccgccctgccagaagacattcactcaacatttaactccctcaccctgcaattcgatagtgatttctttatttcgaagagtgggttcagcattcagttttcaacctctatagccgccacctgtaatgatcccggtatgccgcagaacgggactaggtacggcgactccagagaagctggggataccgtgactttccagtgcgaccctgggtaccagctgcaagggcaggccaagattacgtgtgtgcagttgaacaaccgctttttttggcagcccgatccaccgacctgtattgccgcctgcggcgggaacctgacgggcccagcaggagttattctgagccctaactacccccagccctaccccccagggaaggaatgtgattggcgagtcaaagtgaatcctgatttcgtcattgctctgatcttcaaatcttttaacatggaaccttcctatgacttcctgcacatttacgagggcgaagactcaaattctccactcattggttcctatcaaggatctcaggccccagaaaggatagagagttcaggaaactctttgtttctcgcctttcggagtgacgccagcgtgggtctgagcgggtttgctatagaatttaaagagaaacctcgggaggcatgctttgatccaggtaatatcatgaacgggacaagggtgggcactgacttcaagctcggaagtaccattacctatcagtgtgattctggttacaaaatactggacccatcctccatcacttgtgtgatcggcgccgacggaaaaccatcatgggatcaggtgctgccttcctgtaacgccccctgcggcggacagtataccggctctgagggagttgtgctttcaccaaattacccgcacaattacacagcaggtcagatctgcctgtatagcatcactgtgccaaaggaattcgtagtgtttggtcagttcgcttactttcagaccgcactcaacgaccttgccgaactgtttgatggcacccacgcacaggcgcggctgctgtccagcctgagtggttctcacagtggggaaacattgccactggccacctccaaccagattttgctgcgattctccgctaaaagtggtgcgtcagcccggggcttccactttgtttaccaggccgtcccaagaacaagcgacacccaatgcagctctgtcccagaaccccgctatgggaggagaattgggtccgaattttctgctggtagcattgttcgctttgagtgcaatcccggttacctgctgcagggcagtaccgcactgcattgccagtcagtgccaaatgccctggctcaatggaacgatacaataccttcatgtgtcgtgccctgctcggggaacttcacgcagcggcgcgggacaatactcagcccagggtaccctgagccctacgggaataatctgaactgtatttggaagattattgtgaccgaaggttcaggcatccaaatccaggtcattagtttcgccactgagcagaactgggacagcttggaaatccacgatggaggtgatgttacagcaccccgactgggcagttttagcggcactaccgtgcctgcactcttaaattccacttccaaccagttgtacctccacttccagagtgatatctcagtggccgcggctggcttccacctggaatacaagaccgtcggtctggccgcatgtcaggagccagccctgccaagtaattccataaagattggcgaccgctatatggtgaatgatgtcctctcctttcagtgcgagcctggatacaccctacaaggtcggtcccatatatcttgtatgcctggcaccgtgagacgctggaactatccctcacctctctgcattgcaacttgcggagggactttgagcacacttgggggggtaatccttagtcccggcttccctggttcctacccaaataacctggattgtacatggagaatctctcttcctattggctacggggctcatattcagtttctgaatttctccacagaggccaaccacgattttctggagattcaaaacggcccttatcatacatctccgatgatcgggcagttttccggcaccgatctgcccgcagcacttttatctactacacatgaaacacttattcatttctattctgaccattcacaaaacaggcagggttttaaacttgcttaccagggcgggtccggcaacatcgggcccgccttcccctgcctcgatacgccctttcaggctcgatgccagggcgaggagcgcaccttcaattag

SEQ ID NO: 227776 - DNA, 10164 bp, Artificial Sequence
  derived and/or modified sequence
atgaccgcctggcggcggttccagagcctgctgctgctgctgggcttgttagtgctctgcgctagactcctgacagccgccaagggccagaactgtggcggtttagtgcagggacccaatggcacaatcgaatcccccgggttcccccacgggtaccccaactacgcaaactgcacgtggataatcattacgggcgagcgaaaccggatacagctgtcattccacacctttgcactggaggaagattttgacatcttaagcgtctacgacgggcagcctcagcagggaaacctgaaagtcagactcagcggattccagttgccatcctccatcgtgtccacaggctccatactgacactttggttcaccacggacttcgctgtttccgcgcaaggcttcaaggccctatatgaggttctgccctctcatacctgcggcaaccccggcgagatccttaaaggggtcctgcacggtacccgcttcaatatcggggataaaattcggtactcatgcctgcctgggtatattctcgaaggacacgccatcctgacctgtatcgtgtctcctggaaacggcgcctcttgggatttccccgcccctttttgccgcgcagagggggcctgcggtggaaccctccgaggcacatcctctagtatatcttcaccacatttccccagcgagtacgagaataacgctgactgcacttggacaatcctcgccgagcccggcgacaccatcgcactggtctttacggactttcaactggaagagggatacgatttcctggagatctctggaacagaagcgccttctatatggctgaccggcatgaacctgccttcccccgtcatttcctctaaaaactggctccgtcttcacttcacatccgacagtaaccaccgcaggaaaggatttaacgcgcagtttcaggtcaagaaggccatagaattgaaatctaggggggtgaaaatgcttcccagtaaggatggctcccacaaaaacagtgtgctgagccagggcggagttgcactggtatcggacatgtgcccagatcccggcatccctgagaacggaagaagagccgggtcagattttagggtgggcgcgaatgtgcagtttagttgtgaggacaactatgtgcttcaggggtccaaaagcattacctgtcagagggtcactgagactctggctgcgtggtccgaccaccggcccatttgtcgcgctcggacatgcggctccaatctccggggaccttctggcgttatcaccagccccaactacccagtacagtacgaagataacgcacactgtgtctgggtgatcaccaccactgaccccgataaagtgattaaattggcttttgaagagtttgagctggagagggggtatgataccctgacggtgggagatgccggaaaggtgggggacactcggagcgtgctgtacgtgttgacagggtcttccgtaccagatctcatcgtgtcaatgtccaaccagatgtggctacacctccagtctgatgactcgattgggtcacctggatttaaggctgtatatcaggaaatagaaaagggcggctgtggcgaccctggcattccagcctacgggaagagaactgggtcaagtttcctacacggagacaccctaacttttgaatgcccagcagccttcgaactggttggagagagggtgatcacttgtcagcagaataaccagtggtcaggcaacaagcccagctgtgtgttctcatgcttttttaatttcactgctagttctggcattatcctgagccccaattaccccgaagaatacggcaacaacatgaattgcgtgtggttaattatatcggagccagggtctcgaattcacctgatatttaacgacttcgatgtggaaccacagtttgatttcctggctgtcaaggatgacggtataagcgacatcacagtgctcggcaccttcagtggaaatgaagtgccaagccaactggcttcaagtgggcacatcgttaggctcgagtttcagtcagaccattccacaaccggcagaggcttcaacatcacctacacgactttcggccagaacgaatgtcatgacccaggaatccctatcaacggccggaggttcggcgataggtttctgctaggaagttccgtgtcattccactgcgacgacggattcgtcaagacccaggggtctgagtcgattacatgtatcctccaagacggcaatgttgtctggtcctctacagtacctaggtgcgaagcgccgtgtggcgggcacctaaccgctagttcaggcgtgattctgcccccaggctggcccggatactacaaagatagcctgcactgcgagtggattatcgaggccaaacctgggcattccataaagattactttcgataggtttcaaaccgaagtaaattatgacacactggaggtgagagacgggccagcatcctcaagcccactcataggagagtaccacgggacacaggctcctcagttcctgatctcgacaggaaatttcatgtatcttctgttcacgactgataatagcagatcctcgattggcttcttgatccattacgaatccgttaccctcgagagcgattcttgcctggatccaggaatccctgtcaacggccataggcacggtggcgattttggaatccggagtacagtgactttcagctgtgaccctggctacacactgtccgatgacgaacctctggtatgtgagaggaaccaccagtggaatcacgcactcccgtcgtgtgatgctctttgcggagggtatattcaaggaaagtctggcaccgtcttgtccccaggtttcccagacttctaccccaattcactcaattgcacttggactatcgaggtcagccatggaaagggagtacagatgatttttcacaccttccacttagaatcctcccacgactacctactgattactgaggacggctctttctctgagccagttgctcgcctcactggatcagtgctgccccatacgattaaagccggcctatttggtaatttcactgcccaacttaggttcatttccgactttagcatctcttatgagggttttaacatcacattttctgagtacgacctggagccctgcgacgaccctggagtgccagcattcagccggcgaatcggatttcacttcggtgtgggtgactcactgactttctcttgctttttgggttaccgtctcgagggcgcaacaaagcttacgtgccttggcggcggccggcgcgtgtggtcagcccccctgcctcgatgcgttgccgaatgcggcgcctcggtgaagggaaatgaaggcactctgctgtctccgaatttcccttcaaattacgacaacaatcacgaatgcatttataagatcgaaaccgaggctggaaagggtatacacctgaggacccgctcctttcaactcttcgaaggcgacacacttaaggtttatgacgggaaagactcttcatccagaccactcggtacatttacaaagaatgagctcctcggtttgatattgaactcaacgagtaatcacctctggctggaattcaatacaaacggaagcgacactgatcagggattccagctcacctacacgagctttgacctcgtgaagtgcgaggatccagggataccgaactatggctatcggatacgcgatgaaggacactttacggataccgttgtactgtattcatgtaacccaggctacgcgatgcacggatccaacactctgacatgtcttagtggcgataggcgcgtgtgggacaaacccctgccctcgtgtatcgcagaatgcggcggccaaatacatgcggcaacttcaggacggatcttgagtcctggttacccggccccttacgataataatctccactgtacctggatcatcgaagccgacccgggcaaaacaatttccttacacttcattgtgttcgacacagagatggcccacgacatactgaaggtctgggatggtcctgttgactctgatatattactgaaggagtggtccggcagcgcgcttccagaggatatccattcaacctttaacagtttgacgctgcagttcgactcggacttctttatctcaaaatctggcttctctatacagttcagcacctccatcgccgcaacgtgcaatgaccccggcatgccccaaaatgggactagatatggtgacagtcgggaagcaggcgacactgtgactttccagtgtgaccccggctatcaactccagggccaagccaaaattacctgcgtgcaactcaataaccggtttttttggcagccagacccaccaacatgtattgccgcctgcggaggaaacctaacagggccggccggtgtcatcctgtctcctaactacccacagccctatccaccaggaaaggagtgcgattggagggtgaaagtgaacccagattttgtgatcgctcttatcttcaaaagcttcaatatggagcccagctacgacttcctgcacatatacgagggggaggattccaacagtcctctaataggctcttatcagggaagccaggctccagagcgaatcgaatccagcggcaattcactgttcctggcctttcgctcagacgcatccgttgggctttcagggtttgccattgaattcaaagagaaaccccgcgaggcctgctttgacccggggaatatcatgaacggtacgagggtggggacagacttcaagctgggatccaccatcacttatcaatgtgatagcggctacaagatcctggacccaagctcaattacatgcgttatcggtgcagacggtaaacctagttgggatcaggtgctcccgtcttgcaatgccccctgcggcggtcagtacaccggctcggagggcgtggttttgtctccaaactatcctcataattacaccgcaggacaaatctgcctctactcaattaccgtccctaaggaatttgtcgtgtttggccagtttgcttattttcagacggctcttaatgatctcgccgaattattcgacgggacacacgctcaggcccggctgctatcttccctgtctggctcccactcaggggaaaccttgccactcgcaacctcaaaccagatcttactccggttctccgccaaaagcggggcaagcgcacgtggctttcacttcgtttatcaggccgttccacgaacatctgatactcagtgtagcagcgtgcccgagccacgctatggcaggaggatcggttccgaattttcagccgggagtattgtccgatttgagtgtaaccctgggtacctgctgcagggttccaccgccctccactgtcagagcgtgccgaacgcactcgcccagtggaacgatacaatcccaagttgtgtggtgccgtgtagcggcaattttacccagcgcagagggaccattttgagccctggataccctgagccttacggaaacaacctgaactgtatctggaagatcatcgtgacagagggctctgggatacaaatccaggtcattagcttcgcgacagagcaaaactgggactcacttgaaattcacgacggaggagatgtgaccgcacctcgactcggaagcttctctggaaccaccgtgcctgccttattgaattccacttccaatcagctgtacctgcatttccagtcagatatctctgttgccgccgctggctttcacttagaatacaagacagtagggcttgcagcctgccaagaaccagcactgccaagcaacagcataaaaatcggcgaccggtatatggtgaacgacgtgctcagctttcagtgcgagccaggctatacactacaaggccgctcacatatctcttgcatgcccggaaccgtaagaagatggaactatcccagtccactgtgtattgccacttgcgggggaacactcagtaccctgggcggcgtgatcctgtctcccgggttccccggttcctacccaaataatcttgattgtacctggcggatcagcctccccatagggtacggtgctcatatacagttcctcaattttagcacagaggccaaccatgactttctggagattcagaacggcccataccacacgagtccaatgattggccagtttagtggaactgatctcccagccgccctgctttctaccacccacgagacgctgatacacttttacagtgatcattcccagaaccgacaggggttcaagttggcctatcaggcatatgaattgcaaaactgccccgatcctcctccgtttcagaacggctatatgatcaattccgattattccgtgggccaaagcgtgtcctttgagtgttaccccggatacatcttaatcggccaccctgtcctaacgtgccagcacggtattaacagaaactggaactacccgtttccgagatgtgatgccccctgcgggtacaatgtgactagccaaaatggcactatctacagtcccggctttcctgacgaatacccaattctcaaggactgtatctggctcataaccgtccccccaggacacggagtgtatatcaatttcacacttctgcagactgaggccgtgaatgattacatagccgtttgggacggacccgatcagaattcaccacaactgggcgtcttctccgggaatacggccctagaaacggcatattccagtaccaatcaggtactgttgaaattccacagtgacttcagcaacgggggattttttgtgttgaatttccacgcgtttcagctcaaaaaatgccagcccccgcccgcggtgccccaggcggagatgcttaccgaggatgacgatttcgaaatcggggacttcgtgaagtaccagtgtcacccaggttacaccctcgtcgggactgatattctcacgtgtaagttatcatcacaattacagtttgagggaagtcttccaacctgcgaggcacagtgtccagcaaacgaagtgaggaccggatcctcgggcgtgattctcagcccaggttatcccggcaactattttaattcgcagacttgcagctggtcaatcaaggttgagcccaattataacatcaccatctttgttgatacatttcagagtgaaaaacagtttgatgcactcgaggtgttcgatggctcaagcggccagtctcctctcctcgtggtcctgtctggaaaccacaccgagcagtcgaatttcacaagccggtccaatcagctttatcttaggtggagtaccgatcacgctactagcaagaagggcttcaagattcgctacgctgccccatattgctcactaactcacccactgaaaaatggtgggattctgaatcggactgccggggctgtcgggtcaaaggtccattatttctgtaaacctggctacaggatggttggccacagcaacgctacttgcagacgcaacccactcgggatgtaccagtgggattcgctaacccctctatgtcaagccgtcagttgcgggatcccagaatcgcccggcaacgggtcatttactggaaacgaatttaccctcgacagcaaggtggtgtatgagtgtcatgaggggttcaagctcgaaagtagtcaacaagctacagcggtgtgccaagaggacgggctttggagtaataaaggcaaacctcctacttgcaagcccgtggcctgtccaagcatcgaggcccagttatctgagcatgtgatctggcggctggtgagcggatctcttaacgagtacggggcacaggtgctcctatcttgtagtccgggatactatcttgaaggttggcgcttgctgaggtgccaggctaatggaacctggaacatcggagatgagcgacctagctgcagggccggacattgcggctccccagatcctatcgtaaatggacacatctccggggacggatttagttacagagatactgtggtctaccagtgcaatcccgggtttcgtctggtaggcaccagcgttcggatttgtctgcaggatcataaatggagcggacagacccccgtatgtgtcccaatcacatgtggtcatcccggcaatcccgcccatggtttcacaaatgggtccgagtttaatctgaatgacgtcgtcaacttcacctgtaacactggatatctgctccagggcgtgtcacgagctcagtgcagatccaatgggcaatggtcatcacccctgccgacatgtcgagtcgtgaactgttctgacccagggttcgttgaaaacgccattcgtcacgggcaacagaattttcccgaatctttcgagtatggtatgtcaattctttatcattgtaaaaaagggttttacttactgggatcctccgccctcacttgcatggcgaacggcctctgggacaggagcctgccaaagtgtctggcaatctcctgtgggcatcctggcgtaccagcaaacgctgtgctgacaggcgaactgtttacatatggggccgttgtgcattactcctgtaggggtagtgagtctctgatcggcaacgacacacgcgtatgtcaggaagacagccattggtctggagccctgcctcattgcaccgggaataaccccggcttttgcggcgatcctggcactcctgcccacggaagtcggctgggagatgacttcaaaacgaagtctttgctcagattttcatgtgagatgggccaccaactcaggggatcgcctgagcgaacctgtctgcttaatgggagttggagtggactgcaacccgtgtgcgaggcagtcttgtgtcctcaaccacctccggtccagaatgggactgtggaggggagcgacttccgttggggatcttctatctcctactcttgtatggatggataccagctgagtcattctgctattctgagctgtgaaggtaggggggtctggaagggagaaattccacaatgtcttccagtcttttgtggagacccgggaattcctgccgaaggccggcttagcgggaaatcctttacgtacaaatctgaggtattttttcagtgcaaaagcccttttattctggtgggcagttccaggcgcgtgtgtcaggccgatggtacatggtccggaattcagcctacttgcatcgatccagctcataacacctgccccgaccctggcactccccactttggcattcaaaatagctcccgaggatatgaggttggctccacagtattctttagatgcagaaagggctatcacattcaaggatccactactaggacttgtctcgcaaatctgacctggtccggtattcagactgaatgcataccccacgcctgcaggcaacccgaaactccggcccacgctgacgtcagggcaatcgaccttcctacctttggttataccctggtctacacttgccatcctggcttctttctggccggaggctccgaacatagaacatgtaaagcggacatgaaatggacaggcaagtcccccgtctgcaagtccaaaggagttagagaggtgaatgaaactgttacaaagacccccgtcccatctgacgttttcttcgtcaactccctctggaaaggctattatgagtacctggggaagcggcagccggcgacgctgacagtggactggtttaacgcaacttcgtccaaggtgaatgccaccttttccgaagcttccccagtggaattgaagctcacaggcatctataagaaagaagaggctcatctactgttgaaggcatttcaaataaaaggccaagcggatatctttgtttctaagttcgaaaatgacaactgggggcttgacggctatgtatccagcgggcttgagagggggggattcacctttcagggcgatatccacggaaaagatttcggaaagtttaagctcgagaggcaggaccctttaaatcccgaccaggattcctcttcacactaccacggcacatcttccggtagcgtggccgccgcgattctcgtgccgttttttgctctgattctgtccggattcgccttttatctatataagcatagaaccagacccaaagttcaatataacggctatgccggccatgaaaacagcaacgggcaggcctccttcgagaaccccatgtatgacaccaacctgaaacccacagaggccaaagctgtgcggtttgacacaacccttaacaccgtctgtactgtggtttag

SEQ ID NO: 227777 - DNA, 10281 bp, Artificial Sequence
  derived and/or modified sequence
gtgctacctagccacacctgcggaaacccaggcgaaatcctgaagggagtcctgcacggaaccagatttaatattggggataagattcggtacagttgtctgccgggatacattctggagggtcatgctatactgacgtgcatcgtcagccccggtaacggggcttcatgggatttccccgctcccttttgccgcgcagagggcgcatgtggagggacattgcggggaaccagctctagcatttctagtccacatttcccctcagagtacgagaacaacgcagactgtacatggacaatcctagctgaaccaggtgataccattgcgttggttttcaccgacttccaactggaggaagggtacgactttcttgagatttccggcaccgaggctcccagtatttggctgacaggaatgaacttaccgagtccagtgatttcatccaaaaattggctgaggctacactttacaagcgattctaaccaccggcgtaaggggttcaacgcgcaatttcaggtcaagaaggccatcgagctaaagagtagaggggtcaaaatgctgccgtcaaaggacggtagccacaaaaattccgttctgtcacagggtggcgttgccctcgttagcgatatgtgtcccgatcccggaatccctgaaaacggccgtagggcgggatcagacttctcacgagtgggagctaatgtgcagttctcctgcgaggacaactacgtcctacaagggagtaaatcgattacctgtcagcgtgtcaccgaaactctcgcagcctggagcgaccacaggcccatctgtagagcgcgtacatgtggatcaaacttgcgcggtccatcaggagtcatcacatcacctaactaccccgtacaatacgaagacaacgcccattgtgtctgggttataacaactaccgacccagacaaggtgataaaactagccttcgaggaattcgaactggagcggggatatgatactcttacggttggagatgctggcaaggtaggggacactcgttcagtgctctacgtgctgaccggtagcagcgtgccagatcttattgtctctatgagcaaccagatgtggctgcacttacagagcgatgatagcattggatctcccggttttaaagccgtatatcaggagattgagaaaggtggctgcggagaccctggcatcccagcgtatgggaagagaacaggttcatcttttctccatggtgacaccctcacatttgagtgccccgctgccttcgaacttgttggagaacgggtcataacgtgccagcagaacaatcaatggtctggaaacaagccttcttgcgtgttctcctgcttttttaattttacagccagctctggcataattctctctccgaattacccagaggagtatggaaacaacatgaattgcgtctggcttattatctctgagcccggatctcgcatacacctgatctttaatgatttcgatgtagaaccacagtttgactttttagcagtgaaagatgatggcatctccgatatcaccgtgctggggacattctcagggaacgaggtcccatcccaactcgcgtcatctgggcacatagtccgcctcgagttccagagcgaccactcaactactgggcgtgggttcaacattacttatactacattcggtcagaacgagtgccacgatccagggatcccgattaatgggaggaggtttggtgatcgcttcctcctggggtcttccgtcagcttccattgcgacgatggcttcgtgaagacacagggctccgagagtatcacttgcatcctgcaagacggtaacgtggtgtggagttctaccgtacctagatgcgaagccccatgtggagggcatttgaccgccagcagcggcgtcattctccctccgggatggccaggttactataaggatagcctccactgtgagtggatcattgaagcaaagccaggacactcaatcaagattaccttcgatcgatttcagaccgaggtgaattacgatacccttgaagtgagagacgggccagccagctcttcgccgctgattggcgaatatcatgggacgcaggctcctcagtttctgatctccacagggaactttatgtacctacttttcaccactgataacagcagaagctccatcggcttcctgatccactatgaatctgtcaccctggaatctgactcatgcctggatcccggtatacctgtgaatggacatagacatgggggagactttggtattcgctctacagtcactttctcgtgcgatcccggatatacccttagcgacgacgagcctcttgtgtgcgaacgcaaccaccagtggaatcacgccctcccttcatgcgatgcgctttgtggaggttacatccagggcaagtccggcaccgtgttgtcacctggattccctgacttttaccccaactcacttaactgcacatggactatcgaggtgtcccacggtaaaggagtccagatgatctttcacacatttcatctggaaagttcccatgattatctgttgatcaccgaagacggaagcttctcagaacccgtggctagactcaccgggtccgtgctgcctcatacaattaaggctggcctgttcggcaattttacagctcagcttagattcatctctgacttcagtatctcctatgagggattcaacattaccttttctgagtacgacctggaaccttgtgacgacccgggagtgccagcattctctcgaaggatcggcttccactttggcgtgggcgattctctcacttttagctgttttctgggataccgacttgagggcgcaaccaaactcacttgtctcggtggtggcaggcgtgtatggtctgccccactccctcgatgcgtcgcagagtgcggggcttctgtcaaaggaaacgagggaacactgcttagccctaattttcctagtaattacgataacaaccacgaatgcatctacaagatagaaactgaagccggtaaaggaatccatctaagaacaaggagtttccagctatttgaaggggacaccctcaaggtgtacgacggcaaagattcttccagtcgcccactgggaacatttacaaaaaacgagctgctggggctgattttaaatagcaccagcaaccatttatggctggagtttaacaccaacggatccgatacggatcagggcttccagttaacttatacctcatttgatttggtcaaatgtgaggaccccggtataccaaattacgggtatcgcattcgcgatgaaggtcacttcactgacacagtagtgttgtatagctgtaatccagggtacgccatgcatggttctaacaccttaacgtgtctgagcggggatcggcgagtgtgggacaagcctctgccttcctgtatcgccgaatgcgggggtcagatccatgccgcaaccagcggacgcatactgagtcctggctaccccgctccatacgacaacaacttgcactgcacttggatcattgaggctgacccagggaaaacaatcagcctgcacttcatcgtcttcgacactgaaatggcacacgatattttaaaagtgtgggatggaccagtggactctgacatcctgctcaaagagtggtcagggagtgccctcccagaggatatccattcaacattcaattccctaactctgcagttcgactctgatttttttatcagcaaatccgggttctccatccagttctcaactagcatcgccgctacttgtaatgatcccggaatgccccagaatggcaccaggtacggggactccagggaggccggagatactgtcacatttcagtgtgatccaggctatcagttgcaaggccaggctaaaattacctgcgtgcagctgaataaccggttcttctggcagcctgaccctcccacgtgcatcgcagcctgtggagggaatctgaccggtcctgctggcgtaatactttcccccaattacccccagccatatcctcctggaaaagaatgcgattggagagtaaaggtgaatccagactttgttatagccctgatttttaaaagcttcaacatggagccaagttacgactttttgcatatatatgaaggtgaggactcgaattcccctctcattgggtcctatcagggcagccaggctcctgaacggatcgaaagtagcggcaactccctgttcctggcctttcgcagcgacgcctccgtgggcctgtcagggttcgccatcgaattcaaagagaagcctcgcgaggcttgtttcgaccccggtaacatcatgaatgggacgcgagtggggacagatttcaagctaggtagtaccatcacctatcagtgtgactccggctacaaaatcttagatcccagtagtataacatgtgtcatcggcgcagacggcaagccgagctgggatcaagtgttgccttcatgcaatgcaccttgtggaggacagtacacaggcagcgaaggcgtggtgctgagccctaactacccgcacaactacaccgcaggccaaatttgcctgtatagtatcacagtgccaaaagagtttgtggtgttcggccaattcgcctactttcaaactgccttaaacgatttggctgagctattcgatgggacgcatgctcaggcaagactgctgagctcgctatccgggtctcacagtggggagactctgccactggccactagcaaccagatcctgttgaggttctcagctaagtccggggcatctgctagggggtttcattttgtgtaccaagcggtgcctcggacaagcgacacacagtgctcctccgtgccagaaccccgatacggtcggaggataggctctgagttttctgccggatccattgtcaggttcgagtgcaatcccggatatcttcttcagggttccaccgccctgcattgccaatctgtgccaaatgctctagctcagtggaacgatacaattccctcgtgcgtggtgccctgctcaggtaactttactcaaagacgtggcacgattctttctcccggatatccagaaccctatgggaacaatctgaactgtatttggaagataatagtcacggaaggatctggtatccaagacccaagtgaccagttctgtcatggggcagagctggggctcgagattcatgatgggggagatgtgaccgccccacggctggggtccttttcaggcacaactgtgcccgctctgctaaattccacctccaaccagctttacctccactttcagagcgacatctccgtcgctgcagcgggattccatctggaatacaagacagtggggttagccgcttgtcaggagcccgcattaccctctaatagcattaaaataggggacaggtacatggtgaacgatgtgctgagcttccagtgcgagccgggatacaccttacagggacgcagtcatatttcatgcatgcccggaacagtcaggagatggaattatccctctccactgtgcatagcgacctgcggcggtaccctgtctacattgggaggcgtgatactctccccagggtttccaggcagctatcccaataacctggattgtacctggcgcataagccttcccatagggtacggcgctcacatccagtttctaaatttcagtaccgaagcaaatcacgacttcctggagatccaaaacggtccctaccacacatcacctatgatcggccagttctccggaacagacctgccagcagccttgctgtccaccacccacgaaacactgatccatttttactcggatcactctcagaaccgacagggattcaaactggcctatcaggcctatgaactgcagaattgtcccgatccaccccctttccagaatggttacatgataaacagtgactattccgtcgggcagtcagtctcattcgagtgttatcccggatacattctgattggccacccagttctgacatgtcagcacggcattaaccggaattggaattatccctttccgcgatgcgacgcaccttgtggctacaatgtgacctcccagaacggaaccatctactcccctgggtttcctgacgaatatcccatactgaaggattgcatttggttaattacggttcctccaggtcatggcgtttatatcaacttcacactcctgcagaccgaggcggtaaacgactacattgccgtatgggacggtcctgaccagaactctcctcagctgggggtcttttcgggaaatacggctctggaaacagcatactctagtacgaatcaggtgctcctcaagtttcacagcgacttctcaaatggcggattcttcgttctgaattttcatgcgtttcagttgaaaaagtgccaacccccaccagcggtgccacaggctgaaatgctcacagaggatgatgattttgaaatcggagatttcgtgaagtaccagtgccaccccggatacactctggtgggaacggatatactgacatgcaagctgtccagccaactccagttcgaaggctcattgcccacttgcgaggcccagtgcccagcaaatgaggtgcggactggcagctccggggtcatcttgtctccaggatacccgggtaactactttaacagtcagacatgttcttggtccatcaaagtcgagcccaactataatattaccatcttcgtggatacatttcaatccgagaaacagtttgatgcacttgaggtttttgacggttcaagcggtcaaagcccacttttagtggtgctctcagggaatcatacggaacagtccaacttcactagccggtcaaatcagctttatctgcgctggtctaccgatcatgcaaccagcaaaaaagggtttaaaatccgctatgccgctccatattgttccctcacccaccccctcaaaaacggcggaatcttgaacaggacagctggagctgttggctcaaaagtgcattacttctgcaagccaggttatagaatggtgggacactctaatgctacttgccgccgaaacccattaggcatgtaccaatgggactctttgacgcccctgtgtcaagctgtgagctgcggtatcccggagagcccaggaaatggatccttcacaggcaatgaattcacccttgatagcaaggtggtatatgagtgccacgagggcttcaaactggaaagttcacagcaggccactgccgtgtgccaggaagacggcttatggagcaataagggaaaaccacctacgtgcaagccagtggcatgcccaagtatcgaagcgcagctctcggagcacgtgatttggagattggtatccggtagcctgaacgaatacggcgcacaggtgttactgtcctgctccccaggttattacctcgagggatggcggctgcttagatgtcaggccaacggcacatggaatatcggagacgagcggccttcttgccgggtgatcagctgtggaagtttatcattccccccaaatgggaataaaattggcacgttgaccgtgtacggggcaacagccatctttacctgtaatactggatacaccttagtcggaagccacgtgcgagagtgcttggcgaacggactgtggagcgggagtgagactcgctgcctggctggtcattgcgggagcccggaccctatagttaatggccacatttctggcgacggcttctcctatagggacacagtggtataccagtgtaatcctggatttcgactggtcgggaccagtgtccggatttgtttacaagaccacaagtggagcggtcagacccccgtttgtgtgcctattacgtgtggccatccaggcaatcccgcacacggcttcacaaatgggtcagagtttaacctgaatgatgtggtgaactttacctgtaacactggatacttgcttcagggcgtcagtagagcacagtgtcgttctaacgggcaatggtctagtccccttcccacttgcagagtggtgaactgcagtgatcctggattcgtcgagaacgccatccggcacggccagcagaacttccccgagtcttttgagtacggcatgagcatcctgtaccactgtaagaaaggattctatctgctggggagcagcgcgctgacatgcatggccaacggactctgggacagaagcctgcccaagtgtctagccatttcctgcgggcacccaggagtgcccgctaacgcggtgctgaccggcgaactcttcacttacggggctgttgtgcactatagttgccggggaagcgaaagtctgataggaaacgacacacgtgtatgccaggaggatagtcactggtccggagcgctccctcactgcacaggcaacaatccagggttttgcggggaccctggtacaccagcgcatggtagccgtcttggcgacgatttcaaaaccaaaagcctgctgaggttcagctgcgagatgggccaccagttacgtggatcccccgagcggacatgcctgctcaatggatcctggagtggcctgcagccagtgtgcgaagctgtttcttgtggaaatccaggcacccctactaatgggatgatagtttccagcgacggcatcctgttctcttcctccgtgatttacgcctgttgggaagggtacaaaacaagcgggctgatgaccagacattgtacggcaaacggaacctggacgggcacagccccagactgtactattatctcttgtggagaccccggtaccctagccaatggtatacagttcgggacggactttaccttcaataaaacagtatcctaccagtgcaatcctggttacgtgatggaggctgtgacctctgcgacgatccgctgtaccaaagacgggcgatggaacccctccaagccggtgtgtaaggccgtgctttgccctcagccacctccagtccagaacggaacagtggagggcagtgattttagatggggaagctcaatctcttactcctgcatggatggataccagcttagccacagtgccatcttgagttgcgagggcagaggggtctggaaaggagagatccctcaatgtctccccgtattttgcggggatcccggaattcctgccgagggtaggctaagcggcaagtccttcacctataagtctgaagtgttcttccaatgtaagtcccccttcatactggtggggtcatcccgcagggtgtgccaggccgatggaacctggagcggaatccagccgacgtgtattgaccccgcacacaacacatgccctgatccgggaaccccccatttcgggatacagaatagttcccgcggttacgaggtgggctccaccgtgtttttcaggtgcaggaagggatatcatatccagggttcaaccacgcggacctgtttggctaatctgacatggtccggaatccagaccgaatgcatcccccacgcatgtcgccagccggaaacacctgcacatgcagatgtgagagcaatcgacttacccactttcggttacaccctggtttacacctgccatcccggatttttccttgcaggcggttcggagcaccgaacttgtaaggccgatatgaagtggactggcaagtcacccgtttgtaaatccaaaggggtccgcgaggtgaacgagaccgtgacaaagactcccgtgccctcagacgtgttttttgtcaactctctgtggaagggatactatgagtacctgggtaagcgacagcctgctacactgacagttgactggttcaacgcgacttcatccaaggtcaatgcgacattttccgaagcttcgccggtggaattgaagctgaccggaatttacaagaaggaggaagcacatctgcttctgaaagcatttcaaatcaaggggcaggccgacatttttgtttcaaaattcgagaatgacaattggggcttagacggatacgtttcatccggattggagcggggtggtttcaccttccagggggacattcacggcaaagactttggtaaattcaaattggaacggcaggatcctctaaatcctgatcaggattcctcctctcattaccatggaacatcgagcgggtctgtggctgcagctatactggtaccctttttcgctctcatcttgtcgggctttgccttttacctgtataagcacagaacacggcctaaggtccaatataacggctatgccggtcatgagaactctaatggccaggcaagctttgagaacccaatgtatgataccaacctcaagccgacagaagcaaaagcagtgcggttcgacacaaccctgaatacagtttgcactgttgtctag

SEQ ID NO: 227778 - DNA, 10167 bp, Artificial Sequence
  derived and/or modified sequence
atgacagcatggcggaggtttcagtctctgctgctgctactgggccttcttgtgctgtgtgcgaggctgctaactgctgccaagggtcagaactgcggcggacttgtgcagggccctaatggtactattgagtccccaggttttccccatggatatcccaactacgctaactgcacatggataatcatcactggggagaggaaccgcatccaactctccttccatacatttgcgttagaggaagattttgatattctcagcgtttacgacggccagccacaacagggaaatttgaaagtcaggctatccgggtttcagcttccctccagcattgtgagtaccggctccatcctgacactgtggttcacaacggactttgctgtctccgcccagggctttaaggccctgtacgaggtgctcccttcccatacttgcggaaatccaggagaaatactgaaaggagtgttgcacggtacacgcttcaacatcggagataaaatccgatatagttgcttgcctggttatattctggagggccatgcaatcctgacatgcattgtgagtcccggaaatggggcttcttgggacttccctgcgccattctgccgtgccgaaggcgcatgcgggggtactcttagagggacgtcgagctctatatcgtcacctcactttccgtccgaatacgaaaacaacgccgactgtacttggacaatcctggctgagcccggtgacacgatcgccctggtgttcactgactttcagttggaagagggttatgattttctcgagatctccggaacagaggccccatccatttggttaactgggatgaatctcccctcccctgtaatcagcagcaaaaattggcttcgtttgcacttcaccagcgactcaaatcacagaaggaaagggtttaatgcccaatttcaggtgaagaaagccatcgagttgaaaagccgaggtgttaagatgcttccaagtaaggatggatcccacaagaattccgttctgagccaggggggagtggccctcgtgagtgatatgtgtcctgacccaggaatccccgagaacggtcggcgagccggttccgatttttcaagggtgggtgctaacgtccaattcagctgcgaagataattacgttcttcagggatcaaaaagcattacttgtcagcgagtcactgagactttggccgcatggtcagaccacaggcctatttgccgagcccgtacatgcggatctaacctgcgcggacccagtggcgtgatcacctcacctaactaccctgttcagtacgaggataacgctcattgcgtgtgggttatcactacaacggaccccgataaagttatcaaactggcattcgaggaattcgagctcgagcgcggttacgatacacttacagtgggcgacgcgggtaaggtaggagatactcgcagcgtactctacgtactgacgggaagctccgtcccggacctcatagtgtccatgagtaatcagatgtggctgcatcttcagagcgacgacagtataggcagtcccggatttaaagccgtgtaccaggagattgagaaggggggttgcggagatccgggaattccggcttacggaaaacgtaccggcagtagttttttgcatggtgatacactgaccttcgagtgtcccgctgcctttgagctcgtaggggagagagttatcacctgtcagcagaacaatcagtggtctggaaataaaccctcatgtgtcttcagttgtttttttaattttaccgcctcgtcgggaatcattttgtctcccaattatcctgaggaatacggtaataacatgaactgcgtatggctgattataagtgagcccggatccagaatccatttgatcttcaatgattttgacgttgaaccacagtttgatttcctcgccgtcaaggatgacggcatttctgacatcactgtcctggggaccttttctggaaatgaggtgccatcccagctggcatcttctggacatattgtgaggctagagttccagtctgaccacagcactacaggacgaggatttaatattacatataccaccttcggacaaaacgagtgccatgaccccggtattccaattaacgggcgacgctttggagaccgatttttgctaggctctagcgtgtccttccactgcgatgacggcttcgttaagacacagggctcggaaagcattacatgcatactacaggacgggaatgttgtgtggagctctactgtcccccgttgtgaagccccatgcgggggtcacttaactgccagtagcggtgttatccttcccccaggatggccagggtactataaagattcattgcactgcgagtggataatcgaagcaaagcccggacactccattaagattaccttcgatcggttccagactgaagtcaactacgataccctggaggtgagggacggcccagcatcttcctcaccactcattggagagtaccacgggactcaagctccccagttcctcatcagtacagggaatttcatgtatctgctgtttactaccgataactcccgctcaagcataggatttcttattcactatgaaagtgtgactctcgaatctgacagctgcttagaccccggtatcccggtgaatggacacaggcatgggggagactttggtattcgcagtaccgttacattttcatgtgatcctggctacacactgagtgacgatgagcctttggtctgtgagcgcaaccatcaatggaatcacgccctgccatcctgcgacgctctctgtggcggatatatacagggcaagtccggtactgtgttatcacccggattcccagacttctatccaaactcactgaactgcacatggactattgaggtttcacacggtaaaggggttcagatgatcttccacaccttccacctcgaaagctcccatgactacttgttgataacagaagatggttctttttctgagcccgttgccagactcaccgggtcagtcctcccacatacgataaaggcagggctgttcggcaacttcacagcccagctgcggttcatttcagattttagcattagctacgagggcttcaacattacatttagcgagtacgatttggagccgtgtgatgaccccggagtgccggctttcagcagaagaataggattccattttggcgtgggagacagcctcacattttcctgttttctcggctaccgacttgaaggcgcaacaaaactaacctgtctcggtggaggaaggagagtctggtcagcacctctgccacggtgcgttgccgagtgtggggcttctgtgaagggcaacgagggaactcttcttagcccgaatttcccaagtaactacgataacaaccacgagtgtatttataagatcgagacggaggctggaaaaggaattcacctcagaacaagatcattccagctcttcgagggagacactttaaaggtgtacgacggtaaggactcctccagccggcctctcgggacttttactaagaacgagctgctaggtctgatcctgaactctacttcaaaccacctgtggctggagttcaacacaaatggatccgacacggatcagggattccaactgacttacacatcattcgacctcgtaaagtgcgaagacccaggaattccgaactacggatatcggatccgggatgaagggcactttaccgacacagtggtgctctactcatgtaaccctggttacgccatgcatggcagcaacactctgacatgcctaagtggcgatcgcagagtctgggacaaaccgcttcccagttgtatcgcagagtgcggtgggcaaatccacgctgctacttccggacggattctcagtcccggatatcccgcaccctacgacaataatctgcactgcacatggattattgaagcagacccaggcaagactatatcactgcacttcatcgtgttcgataccgaaatggcgcatgacatcctgaaagtatgggacgggcctgtggactcagatatcttgcttaaagaatggtcgggctcggccctccctgaagatatccattccactttcaatagcctgacactgcagttcgattccgacttctttatctcgaagagcggtttctctatccaattctccacatccatcgcagccacctgtaacgatccaggcatgccccagaacggaacccgttacggcgattcccgcgaagctggcgacacggtgacatttcagtgtgaccccggttaccaactgcagggtcaggctaaaataacttgcgtacagctgaataacagattcttttggcagccggatccgccaacatgtattgccgcatgtgggggaaacctgaccggacctgcgggtgttatcctctcccccaattatcctcagccatatcccccaggcaaagaatgtgactggagggtgaaggtgaacccagactttgtcatcgcactgatctttaagtcttttaatatggaaccatcgtacgactttcttcacatttacgagggagaggattctaacagcccattgatcggatcctaccaggggagtcaggcgcctgagcggattgagagtagcggaaactccctgtttctggcattccggtccgatgcttccgtggggttatcagggttcgccattgagttcaaggaaaagccacgagaagcctgcttcgaccccggtaacatcatgaacgggaccagagtcggcacagacttcaagctggggtctacaataacatatcagtgtgatagcggttataaaatcttggacccaagcagcattacttgtgtgattggagcagacgggaagcctagctgggatcaagtacttccttcatgcaacgctccctgtggaggacagtacaccgggtctgaaggtgtggtgctgagtcctaattatccccacaattacacagccggtcaaatttgcctgtattctattactgtcccaaaggaattcgtggtcttcggccaattcgcttactttcagacagcgctcaatgatcttgcagagctgtttgacgggacccatgcacaggcccgactgctgtcatcactgtcagggtcccattcaggagagaccttacctttggccacaagcaatcagatcctcttacggttttccgcgaaatccggcgctagcgccaggggatttcattttgtgtatcaggcggttccaaggacatctgatacacagtgctccagcgtgccggaacctagatacggcaggcgcatcgggtctgaatttagtgcgggatcaatcgtgaggttcgaatgcaaccctggttacctgttgcagggctccacagctcttcattgtcagtccgtccctaacgctcttgcccagtggaatgataccattccttcatgcgtggtaccatgctctggtaacttcacgcagagacggggtactatactgagtcccggatatccagagccttatggcaacaatctcaattgcatttggaaaattatcgtgacggagggctcaggtatacagatccaagtcatttccttcgcaactgagcagaactgggactcgctggaaattcacgacggcggagacgtcaccgctccacgattggggtcgtttagcggaaccacagtgcccgctctattgaactctacaagcaatcagttatatctacactttcagagcgatattagcgtggccgcagccggattccatctggagtataagacggtgggattggccgcttgtcaggagccagcactcccatctaacagtataaagataggggaccggtacatggttaatgacgtgttgtcattccagtgcgaacccggatatactctgcagggacgctcccacattagctgtatgcctggcaccgtccggcgttggaactacccatctccactgtgcatcgcaacatgtggtgggactctctctacactggggggtgtcatccttagccctggcttccctgggtcgtacccaaacaatctggattgtacatggcgcatttcacttccaatcggctatggggcacatatccagttcctgaatttttcaaccgaagccaatcatgacttccttgagattcagaatggtccttatcatacatctcctatgattggccagtttagcggaacggatctgccagccgctctgttaagtacaacacatgagacactgatccatttttactccgaccattcccaaaaccggcagggtttcaagctggcgtatcaagcctatgagttacagaactgccctgaccccccacccttccagaatggatacatgattaattccgactacagcgtggggcagagcgttagcttcgaatgttacccaggttatatcctgatcggccatcccgtgctgacttgtcagcacggtattaacagaaactggaattatccattccctcgttgcgacgccccatgcgggtacaatgtgacgagtcagaacggaactatatattctccagggttcccagatgaatatccaatactgaaagattgtatttggttgatcactgtacctccagggcacggggtctatattaatttcacactgttgcagacagaagcagtcaatgactacattgctgtgtgggatggcccagatcaaaattcgccacaattgggcgtgttcagtgggaatacggcgttagaaacagcatattcttccacgaatcaagtactgctgaagtttcacagcgatttttccaatgggggattcttcgtgctgaatttccatgcttttcaactgaagaagtgccagcctccaccagccgtgcctcaagccgaaatgctcacagaggacgatgatttcgaaataggcgattttgttaaataccagtgtcatcctgggtacacgctggttggaactgatattctgacttgtaagctgagctcacaactgcaatttgagggatctctgccaacttgcgaggcccaatgcccggcaaacgaagttaggactgggtcctctggagttatcctttctcctgggtaccctggcaattactttaactcccaaacttgttcctggtcaatcaaggtggaacctaactataatattacaatttttgtggacacgttccagtctgagaagcaattcgacgccctggaggtcttcgatgggtcaagtggacagagccccctactggtcgtcctgtcgggaaaccataccgaacagtctaacttcacctctcgcagcaaccaattatacctgaggtggagcactgatcacgctactagcaaaaaggggttcaagatccgctacgccgcaccctattgcagtctgacccaccccctgaagaacggagggatactaaaccggacagccggagctgtgggctcaaaggtacactacttttgcaaacccggatatcggatggtgggccattctaacgcaacttgtaggagaaatccgctgggtatgtaccaatgggacagcctaacacctctttgccaggctgtcagttgcggtatccctgagtcgcctggcaacggatcattcacgggtaacgaatttactctggattcaaaagtagtttacgaatgtcatgagggatttaaactcgagtcgtctcagcaagcgacagctgtatgccaggaggatggtctctggagtaataaggggaagccacctacatgcaaaccggtggcctgtcccagcatcgaggctcagctgtccgaacacgtcatatggcggctggtcagtggcagtctgaatgagtatggcgctcaggtcctgctcagttgctctcccggttactatctcgagggttggcgtctcctgaggtgccaagcaaatggcacgtggaatattggtgatgagcgtccatcatgcagagctgggcactgtggatcaccagaccccatcgtgaatggacatatatccggggatgggttcagctacagggacactgtggtttaccagtgcaaccctggatttcggttggtgggcacctccgttagaatctgcctccaggatcataaatggagcggtcaaacacctgtgtgcgtgcccatcacctgtgggcatcctggtaaccccgcacacggattcactaacggttccgaattcaacctcaatgacgtggtgaactttacttgtaacactggatatctcctgcagggcgtgagccgggctcagtgccggtcgaacggacagtggagtagccctttacctacatgtcgagtggtgaactgctctgatccaggcttcgtcgaaaatgcgattaggcacggtcagcaaaactttcctgagtccttcgagtacggaatgagcatcctgtatcactgtaagaaggggttctatcttttgggaagttctgccctcacgtgcatggcaaacggactgtgggacagatccttacctaagtgtctggctatcagctgcggccatcccggagtacccgctaacgccgtgctcactggagaactgttcacttatggagcagtcgtccactactcctgcaggggatcagagtctctcataggaaacgacactcgcgtctgccaagaggatagccactggtcaggcgctttgccccactgcaccggaaacaatcccggattttgtggagatcctggaacgcctgctcatggctcccggttgggggatgacttcaagaccaaatccctactccgattcagctgtgagatggggcaccagctgcgtgggagcccagaacgcacatgcctgctcaacggcagctggagtggcctccaacccgtctgcgaggcggtgctttgccctcaaccgccacccgtccaaaacgggaccgtggagggttccgatttcagatgggggtcatctattagttatagttgtatggacggctatcagctgtcccacagtgcaatcctctcgtgtgagggccgaggagtgtggaagggcgagatcccacagtgtcttcctgtgttctgcggagatccgggaatcccagcagaaggccgactctctggtaagagcttcacctataagtcagaagtattttttcagtgtaagtcccctttcatacttgtcggctcctcacgacgcgtgtgccaggccgatggaacttggtccggcatccagcctacttgcatagacccagcgcacaacacctgccccgacccaggaacgccgcactttgggattcagaatagttcacggggttacgaagtgggctctaccgtgttctttaggtgccgcaaaggttaccatatccaaggcagcactactagaacttgtctggctaatctgacgtggtccggaatccagacagaatgcatcccacacgcctgccggcagcctgagaccccggctcatgccgacgtgagagcaatcgacttgcctacgttcggatacacactggtttacacctgtcaccctggcttctttctggccggtggctcagagcataggacatgcaaggctgatatgaaatggacgggcaagtctcccgtctgcaagtccaagggcgtgagagaagtaaacgagacggtgaccaaaaccccagtaccttcagacgtgtttttcgtgaacagtctctggaaaggttactatgagtacctcggcaagcgccagcccgctaccctgacggtcgattggtttaatgccacaagttccaaagtgaacgccacgtttagcgaggcaagccccgtggaattgaagcttactggaatctacaagaaggaggaggcccaccttcttcttaaggcattccagatcaagggccaggccgacatttttgtctctaaattcgagaatgacaactggggcctggatggttatgtaagctctggcctggaacggggtgggttcacttttcaaggcgacatccatggaaaagattttggtaaatttaaactggagcgccaggaccccttgaatccagaccaagactcctcatcacactatcacgggacctctagcggttctgttgccgcagcaatcctggttccattcttcgctttaatcctctctgggttcgctttctatctctacaagcaccggacacgacccaaagtgcagtacaatgggtatgcgggtcacgaaaattcaaacggccaggcatcgtttgagaatccaatgtatgataccaatctcaaaccgacagaggccaaggccgtaaggtttgacacaactctgaacaccgtgtgcaccgtggtgtaa

SEQ ID NO: 227779 - DNA, 10698 bp, Artificial Sequence
  derived and/or modified sequence
atgacggcgtggaggaggtttcagtccctcctgcttctcctgggcctcctagtgttgtgtgccaggctgctgactgccgctaaaggccagaattgtggtggattggtgcagggccctaacggcactatagagtccccgggatttccacacggctaccccaactacgctaattgcacttggattatcattacaggcgaaagaaataggatccaactgtccttccacacatttgcgctagaggaggactttgatatactgagtgtctacgatggtcagccccagcagggaaacttaaaagtgaggctgtccggcttccaactcccctcctcgatcgtgtccactggtagtattttaacgctgtggttcactactgacttcgctgtgagcgcccaggggtttaaagctctctacgaagtgctgccttcacatacctgcggcaaccctggggagatccttaagggagtgttgcacggcacccgttttaatattggagacaaaattcgctactcttgcttgccgggatatatattggaggggcatgcaatcttgacttgtatagtaagcccaggcaacggcgcttcatgggatttccccgctccattttgcagagcagagggtgcgtgtgggggaacgctacggggtacctcgtcttcaatcagctctccacatttcccttcagaatacgaaaacaacgcggattgtacctggactatccttgctgagccgggagacaccatcgctcttgttttcacagacttccagttggaggagggttatgatttccttgaaatctcaggcacagaagctccaagcatctggctgaccgggatgaacctgccaagccccgtaatctcctcaaagaattggttaaggctacacttcacatctgactctaaccatcggagaaaaggattcaatgctcagtttcaggtgaagaaggctattgagctcaaatcccgcggtgtaaagatgctcccatccaaagatggcagccacaagaactcggtgctgagccagggcggagtggccttagtttcagatatgtgtcccgatcccggaatccccgagaatggcaggcgcgcaggcagcgatttttctcgggtgggggcaaatgtgcagttttcatgcgaggataactatgttctgcaggggtcaaaatccattacgtgtcagcgggtgaccgagacactcgcagcctggtccgaccacaggcctatttgccgagccagaacttgcggtagtaatctccgcggaccctctggggtcattaccagtccaaactaccccgttcaatatgaggataacgcacactgcgtctgggtgattaccacgacagaccccgataaagtaatcaagcttgcttttgaggagttcgagttagaaagaggttacgacacactgacagtaggcgatgccggaaaggtgggggacaccaggagcgtcctgtacgttctcactggtagcagcgtaccggacctcatagtttcgatgagtaatcagatgtggctccatctgcagagcgatgactccatcgggagtccagggtttaaggccgtataccaagagatcgaaaaagggggttgcggtgaccctggcatacctgcttatggtaaaaggaccggatccagcttcctgcatggtgacactttaacatttgagtgccctgcagctttcgagttggttggtgagagagtgatcacttgccagcagaacaatcagtggagcgggaataagccaagctgcgtgttttcctgttttttcaattttactgcctcttccggcattatactcagtccaaattatcccgaggagtatgggaacaatatgaactgtgtgtggcttataatctcagagcctggttcccggatccaccttatctttaatgattttgacgtggagccccaattcgatttcctcgcagtgaaagacgatggcataagtgatatcacagtcttgggcaccttcagcggcaacgaagtgccatcccagcttgcttcctccggccacattgtgagactggaatttcagtccgatcattcaactaccggccgtgggttcaacatcacttacaccacatttggacagaatgagtgccacgacccgggaattcccatcaacgggagaagatttggcgacagattcctgctcggttctagtgtgagttttcattgcgacgatggctttgtgaagactcagggatcggagtccatcacatgcattctccaagatggcaatgtggtttggtctagtacagtcccacggtgcgaggccccttgtggcggtcatctgaccgcttccagtggagtcatcctccctccgggttggccaggatactacaaggactcgttgcactgtgaatggatcatcgaggccaagccaggtcattctattaagattaccttcgatagattccagactgaggtgaattatgacacgttggaggtgcgtgacggacctgccagctcctcacctttgatcggggagtatcatgggacacaagcgcctcagtttctgattagcaccgggaactttatgtacctactctttaccacagacaatagccgctcatcgataggatttctgattcattatgaaagtgtgactctcgaatccgatagttgcctcgatccaggtattccagtcaatgggcaccgccacggcggagattttggaattagatctaccgtaaccttctcatgtgaccccggttataccctgtctgatgacgagcccctcgtgtgcgagagaaatcaccaatggaatcacgccctgccttcctgtgatgcactgtgtgggggatatatccaaggaaaatcaggaacagtgctgtccccaggcttcccagacttctacccaaatagcctgaattgcacatggactatcgaagtttcccatggcaaaggagtccagatgattttccacaccttccatttggaatcctctcatgactacctgcttataacggaagacgggagcttctctgagcctgtcgcaaggctcacaggcagtgtgcttcctcacaccattaaggcgggtctttttggtaatttcacggcccaacttcgcttcatttccgatttctcaatctcctacgaggggttcaacataaccttttccgagtacgacctggaaccgtgcgatgatcctggagtacctgccttctcacgccgaatcggatttcactttggcgtgggagatagtttaaccttttcctgtttcctgggatatcgactggaaggagctacaaagctgacgtgtctggggggtggtcgacgcgtgtggagcgctccgcttcctcgatgcgtcgcagaatgcggagcgtctgtcaaaggcaatgaagggacattattgtcgcctaatttccccagtaattatgataacaatcatgagtgcatctataaaattgaaactgaagctggaaaaggcattcacttgaggacccgctccttccagctcttcgagggagatacgctcaaggtttacgatggaaaggatagctcttccagaccgctggggactttcaccaaaaatgaactgcttggcctcatcctgaattctacaagcaatcatctatggctggaatttaacacgaacgggtccgacactgatcagggcttccaactgacttacacgagcttcgatctggtgaagtgtgaagatccaggcatccccaattatgggtatcgaataagagatgagggacactttactgatactgtggtgctctacagctgcaaccctggatatgcaatgcatgggtccaatacactgacatgcctgtctggggaccggcgagtctgggataaacctctcccaagttgtatcgcagagtgcggcggtcagatccacgcagccacctctgggcgtatcctgtcaccaggataccctgctccttatgacaataacctccattgcacctggattatcgaagccgatccgggtaagaccattagccttcattttatagtgttcgataccgaaatggctcacgatattctgaaggtttgggacggcccagttgactcagacatcctactgaaagaatggtcagggtcagctctgcctgaggacatacactctactttcaatagtcttacattacaattcgattcagatttttttatctcaaagtcgggcttttccatccaattctctactagcatcgctgccacatgcaatgatccaggcatgccacagaacggtacccgttacggcgattccagagaagcaggcgatacagtgactttccagtgtgaccctggctaccagttgcaagggcaggccaagatcacatgcgtacagctgaacaacaggttcttctggcagccagaccctcccacatgtatcgcagcgtgcggcggtaatctcaccggacccgctggggtaatcctgtctcccaactatccgcaaccctatccacccggaaaagaatgtgactggcgggtgaaagtcaacccagattttgtgatagccctgattttcaagagcttcaacatggaaccatcctatgattttctgcacatttatgagggggaagactctaacagtcctttgatcggtagctaccagggaagccaggctcctgagaggatcgagtcatcagggaattcgctgtttttggcctttcggtcagatgcttctgttggcctgtcaggattcgccattgaattcaaagagaagcctagggaagcttgcttcgacccaggtaatataatgaatggaacacgtgtgggaacggattttaagttaggatccactatcacataccagtgtgattcaggatacaaaatccttgacccaagctcgatcacctgcgtaatcggggctgacggtaagccttcctgggatcaggtactcccttcatgtaatgctccttgcgggggtcagtacacagggtctgaaggcgtggtgctttctcctaactacccacacaattatacggccggacaaatatgcttgtactccatcaccgtacccaaggaattcgtggtattcggccagtttgcctactttcaaacagctctgaacgatctggcggaattgttcgatggtacccatgcccaggccaggctcttgtccagcttgtcagggtcccatagtggggagactcttcccctagcaacatcaaaccagattctcctgcgcttttcagctaagagcggggcatccgccagaggcttccatttcgtgtaccaggcagtgccgcgaacaagcgacactcagtgtagctctgtccccgaacctaggtacgggcgacgcataggatcggaattctcagccggttctatagtacgcttcgaatgtaaccccggatacctgctgcagggaagcaccgctttgcactgccagtctgtccctaacgccctggcccaatggaatgacacaatccctagctgtgtcgtgccatgcagcgggaacttcacacaaaggagagggacaattctgtctcctggataccccgaaccatacggtaataatctgaactgtatatggaagattatcgtaacagagggcagtggaatccaaattcaagtcatcagtttcgccacggagcagaattgggactcacttgagattcacgacgggggagatgtgactgcacctcgtctggggtcctttagcggtaccacagtgccggctctgctaaattctaccagcaatcagctgtacttacacttccaatcagacatttctgtggcggcagccggatttcatctcgagtacaaaaccgttggcttggctgcctgtcaagagccagcgctgccatctaactccataaaaatcggcgatagatacatggtcaatgacgtgctgtcgttccagtgtgagccagggtacacgttgcagggcaggagccatatcagctgcatgccaggcaccgtcagacggtggaactatccctcgccactgtgcattgcgacatgtggcggtacactttcaaccctgggaggtgttatcctctcccccggattccccggatcttatcccaataaccttgactgtacttggagaattagcttgcctatcggctacggtgctcatatccagttcctcaatttcagtaccgaagccaatcacgactttctggagattcagaacggcccttaccacacctctccaatgatcggccagttttccggcacggacctgcctgctgctttgctaagtaccacccatgaaaccctgattcacttctattctgatcactctcagaatcggcagggcttcaagctggcctaccaggcgtatgaactgcagaactgcccagacccacccccatttcaaaatggctacatgatcaactcagattactccgtgggtcagtcagtgagtttcgaatgttatcctgggtatattctcatcgggcaccccgtgttaacttgtcagcacgggataaaccgcaactggaattacccatttccacggtgcgatgctccttgtggctacaatgtcacttcacaaaacgggacaatctattcacccggtttccccgacgagtatccgatactcaaagactgcatatggctgatcactgtgccgcctggccacggagtatacataaatttcacgctcctgcagaccgaagcagttaatgattatattgccgtgtgggacggccctgatcagaactcgccgcagctaggcgtgtttagcggaaatacagccttagagacagcttatagctcaaccaatcaggtgctcttaaaatttcactcagactttagcaacggcggattcttcgtgctgaacttccacgctttccagcttaagaagtgccagccgcctcctgctgtgccacaagccgaaatgctgacagaggatgacgactttgaaataggggactttgtgaagtatcagtgtcatcccggatataccctggtcgggactgacattctaacttgcaaactcagctctcagctacaatttgaggggagcttgccgacctgcgaggcacaatgtcccgcaaacgaagtgcggactggtagttccggagttatcctgtcaccaggctatccgggaaactactttaatagccagacctgttcgtggagtattaaagtcgagcccaactacaacataaccatttttgttgacacattccaaagcgaaaagcaatttgatgctttggaggtgttcgacggaagttctggacaatctccattacttgttgttctgagcgggaaccacactgagcagtcaaattttacaagtagatcaaatcagttatacctgaggtggtctaccgatcacgcgacctctaagaaaggctttaagatcaggtatgccgctccgtactgcagcttaacacacccattgaaaaacggaggcattttgaaccgcacagcaggcgctgtaggctccaaggttcactacttttgcaagccagggtatagaatggtgggacatagcaacgctacctgtagaagaaatccattggggatgtaccagtgggactctctgacacctctttgccaggctgtatcgtgcggaatcccggaatccccgggtaatgggagcttcaccggaaacgaattcaccctcgactctaaggttgtatacgaatgtcacgagggattcaagctcgaaagttcccaacaagccacggcagtgtgccaggaggatggactgtggtctaacaaaggtaagcccccaacgtgtaagcccgtggcttgcccctccatcgaagcccagttgtccgagcacgttatctggagattggtctccgggagcttgaatgaatacggagctcaagtacttctttcttgcagtccgggatactacttggagggctggagattgctgcggtgtcaagccaacggcacatggaatatcggtgatgagagaccctcttgccgtgtgatcagttgtggcagtctctcctttcctccaaatggcaataagatcgggaccctgactgtgtatggtgcaacggcgatcttcacttgcaacaccgggtatacactggtgggcagccacgttagagagtgcctagctaacggactgtggtccggcagtgagaccaggtgtctggcaggtcactgcggctcacccgatcctatcgtgaatggccacattagcggggacggcttctcttatcgagatacagtggtctatcagtgtaatcctggatttcgacttgtcggtacatcagttaggatctgtttacaggaccacaagtggagtgggcagacccccgtctgcgtcccgatcacttgtgggcacccgggtaaccctgctcacggctttactaatggcagtgaattcaacttgaatgatgtggttaactttacttgtaacacaggctacctccttcagggagtctcaagggctcagtgtagaagtaatgggcagtggtcctcaccacttcccacatgtagagtagtgaactgttctgatcccggttttgtcgagaacgctatcaggcatggtcaacagaacttcccagaaagcttcgagtatggcatgtccatcctgtatcactgcaagaaggggttttacctgttaggatcatcagctctcacttgcatggctaacggtctatgggatcgctcactgccaaaatgcctggcaataagttgtggacatccaggagtgccggcaaatgctgtgctcaccggcgaactcttcacctatggggctgttgtgcattacagctgccgcggttctgagtctttaatcggtaatgatacccgggtgtgccaagaggattcccattggtccggcgcactgccccactgcaccgggaataaccccggattctgcggcgaccccggtactccagcacacggctcacgcctcggcgatgattttaagaccaagagtctgctgcgcttttcatgtgagatgggtcatcagctgagaggctcaccggaacgaacatgtctgctcaacggatcgtggtctggtctgcagcctgtgtgcgaagccgtctcatgtggcaatccaggcactcccaccaacggtatgatcgtgagttccgacgggattctgtttagttcctcagtcatctatgcttgctgggagggatacaaaacatcgggacttatgacgaggcactgcaccgccaacggaacgtggacgggaactgctccagactgtacaatcatttcttgcggggatccaggaacacttgccaatggaatccagttcggaactgatttcactttcaataagaccgtctcctaccagtgtaatcctggatatgtgatggaggccgtgacttcggctactatcagatgcaccaaggacggacgctggaaccctagcaagccagtgtgtaaggcggtgttatgccctcagccccctccggtgcagaacggaaccgtggagggcagcgactttcgctgggggtcaagcatttcctattcctgcatggacggctaccagttgtcacattccgccatcctgtcttgcgaaggacgtggggtatggaagggagagatcccccagtgcctgcctgtcttttgtggcgacccgggaataccggcagagggcagactgtccggtaaatcattcacatacaagagcgaagtattctttcagtgcaagtctccttttatcttggtggggtcttctagacgtgtttgccaggctgacggcacgtggtccggcatccagcccacgtgcatagatccagcacacaatacctgcccagatcccggaacgccccacttcggtattcagaatagtagccgcggatacgaggtggggtccactgttttcttcagatgtagaaaagggtaccacattcagggatccactacacgtacctgtctcgctaacctgacgtggtccggcattcagacagagtgcatcccccatgcctgcagacagcctgagactccagctcacgccgacgttagggctattgaccttcctactttcggatataccctggtctacacatgtcatcctggattttttctggctggcggaagcgaacacaggacatgtaaggctgatatgaaatggactggaaaaagtcccgtgtgcaaaagtaagggagtgcgggaggtaaacgagaccgtgacgaagaccccagttccaagcgacgtgttcttcgtgaacagcctttggaaaggatattatgaatatttagggaagcgccagccggcaacactcaccgtcgattggttcaatgccacgtcttctaaagtgaatgcaacattcagcgaggccagccctgtcgagctgaagctgaccggtatatacaagaaagaggaagcccacttgctgctgaaagcttttcaaataaaggggcaggccgatattttcgtgagcaagttcgagaacgataactgggggctggatggatatgttagcagcggactggaaaggggaggctttactttccagggcgacattcacggaaaagactttggaaaatttaagctcgaacgccaagatccgctgaacccggatcaggactcaagctctcactatcatgggacatcgtccggctctgtcgccgcagctatcctggtgccttttttcgccctgattttgtcaggctttgcattttacctatacaaacatcgaactagacctaaggtgcagtacaatggctacgcaggacatgaaaactccaatggacaggcttccttcgagaaccccatgtatgacacaaatctgaagcctacagaagctaaagcagtccggtttgacaccactctcaatacagtctgcacagttgtttaa

SEQ ID NO: 227780 - DNA, 10695 bp, Artificial Sequence
  derived and/or modified sequence
atgacggcgtggagacggtttcagtcgttactactgctgcttggcctgctggtcctatgcgccagactcttgactgctgctaaggggcagaactgcgggggtttagtacaaggccctaacggcaccatcgaatcacctgggttccctcacggatatccaaattacgccaactgtacatggattataataaccggcgagcgaaaccggatacagctctctttccatacctttgctcttgaagaggacttcgacatcctctctgtgtatgacggccagccccaacagggtaacctgaaggtgcgcttatcaggcttccagctgccttcttctatcgtgtcaaccggatctattcttaccctttggtttaccacggacttcgccgtaagtgctcagggtttcaaggccctttacgaggtgctcccctctcatacctgcggtaatcctggagaaatactgaagggcgtcttgcacggcactcgcttcaatattggggacaagatcaggtactcctgtctgccaggctatatactggaagggcacgccatcctcacatgtatagtgagcccgggtaatggggcaagctgggatttccctgctcccttttgtcgggctgagggtgcatgtggtggtacgctgagggggacaagctcaagtatctcgtcaccccacttccctagtgaatacgagaacaatgcagactgcacttggaccatcctggcggagcctggtgatactattgctcttgtgtttaccgatttccagcttgaggagggctacgatttcttagaaatttccggaaccgaggccccatcaatctggttgacagggatgaatctaccctcgccagttatctcctcaaagaattggctgcgtctacattttacctcagatagtaatcataggaggaaggggttcaacgcccagtttcaggttaagaaagctatcgagttgaagtcccgaggtgtgaagatgctgccttctaaagacggctcccacaaaaattcggtgctgagtcaaggtggagtcgctttggtgagcgacatgtgtcccgatccgggaatcccggaaaatggtcgaagagccggttcagacttcagagtcggtgctaatgtccagtttagttgcgaggataactacgtactacagggttccaaatccattacatgccagagggtgacagaaacactagccgcttggagcgatcacaggccaatctgccgagctaggacttgtggcagcaatctgcgtgggccttctggtgtaattacgagtcccaattaccctgtccagtatgaggacaacgcccattgtgtgtgggtcattacaaccacggaccctgataaggtgatcaagttggcctttgaggaattcgagctagagcggggatacgatacattaaccgttggagacgcgggaaaagttggagacacccggagcgtactgtacgtactaacagggagttctgtgcctgacctgattgtgagtatgagtaatcagatgtggcttcacctgcagagcgatgacagcatcggaagcccgggtttcaaggccgtgtaccaggaaattgagaaggggggatgcggagatcctggaatacctgcctacggcaaaagaacaggctcgagtttcctgcacggggacacacttacctttgagtgcccagctgcgtttgaactggtgggcgagcgtgtcataacttgtcagcaaaataatcagtggtccgggaacaaaccgagttgtgttttcagttgcttcttcaacttcactgcaagtagtggaattattctctctcccaactatcctgaggaatacggcaacaacatgaattgcgtgtggctcatcatcagcgagccagggtcaagaatccatctgattttcaacgactttgacgtcgagccccagtttgacttccttgcagtcaaagatgacggcatttcggatatcactgtcctcggaacatttagcggaaatgaagtgccgtcccagttggcttctagtggccatattgttcggctggagttccagagcgatcatagtacaacagggaggggatttaatattacttatactacttttggccaaaatgagtgccatgatccaggcatcccaattaatggaagacggtttggtgataggtttctgcttggcagttcagtttcctttcattgcgatgacggattcgtgaagacccaggggtctgaatcaataacatgtatattacaggatggcaacgtggtttggtcttctactgtccctaggtgtgaagcaccatgcgggggacatctgacggcaagttcaggggtgatcctcccaccgggatggcctggatattacaaggactcactgcactgcgagtggatcattgaggcgaaacccggacactctatcaaaatcacttttgacaggtttcagaccgaagtaaactatgacaccttggaagtcagagacgggccagcgagtagttcacctctgatcggtgagtaccacgggactcaggctccccagtttctcatcagcacaggcaattttatgtacttgctcttcaccaccgataattcaagatcatccattgggtttctgatccattacgaaagcgttacactcgaatctgatagctgtctggaccccggaataccagtgaatggtcatcgccatggcggagattttggtatccggtctaccgtaaccttttcttgcgaccccggttacacactgtctgatgacgagccattagtatgtgagcgcaatcaccagtggaatcacgcactgccttcatgtgacgccctttgtggcggatacatccaggggaaaagtggcaccgttctgagccctggcttccctgacttctatcccaactccctgaattgcacatggactattgaggtgagccacggcaaaggcgtccaaatgatcttccacacttttcatctggagagcagccacgactacctgctaattacagaagacgggagctttagcgaacctgtggcaagactgactggaagcgtgctgccacacaccattaaagcaggactcttcgggaatttcaccgcccagctgcggttcatctctgatttttccatctcttacgaaggtttcaacattactttttccgaatatgatctggagccctgtgatgatcccggagtgccggcattctcacgcaggatcggctttcatttcggtgtcggcgatagtctcaccttctcttgcttcctcgggtaccggctggaaggcgcaacaaagctcacttgtctcggaggcggacgcagggtctggagcgcgcctctgcctcgttgcgtcgcagaatgcggggcttcggtaaaaggcaacgaaggtacgctactgagcccaaactttccttccaactatgataataaccatgaatgtatatataaaattgaaacagaagcaggaaagggcatccacctaagaacacgttcgtttcagctctttgaaggtgatacgctaaaggtttatgacggcaaggatagttcatccaggccattgggaacctttacaaagaacgagcttctgggcctgattctcaattccacaagcaaccatctgtggttagaatttaatacaaacggcagcgacaccgaccaaggattccagttaacctacacctccttcgacctggtcaagtgcgaagacccgggaatccctaactatgggtaccggatccgtgacgaaggtcacttcacagatacggttgtcttatattcttgcaaccctgggtatgccatgcacgggtcgaacaccctgacgtgcctctcaggggatcgcagggtatgggacaagcctcttccaagctgtattgccgagtgcggtggccagattcatgcagccacgtcgggcaggattctgtccccaggttatccggctccctacgacaataacttacactgcacttggattatcgaggctgaccctggcaaaactatatcgctacacttcattgtgttcgacacagagatggcccatgacatcctgaaagtgtgggacggtccggttgatagtgatatactcctgaaggaatggagcggctccgccctgccggaggacatccacagtacattcaattcactgacgcttcagttcgatagcgatttcttcatatccaaatccggcttcagtatccagttctctaccagtattgccgcaacctgtaatgatcctggcatgcctcaaaatgggacccggtacggagatagcagagaagcgggagatactgtaacattccaatgtgacccgggataccaattacagggtcaggccaaaatcacctgtgtgcagctcaataacagattcttctggcaaccagacccgcctacttgtattgctgcatgcggagggaatctgactgggcctgccggagtgatcctgtcgccaaactatccgcagccttatccaccaggcaaggaatgcgattggagagtgaaagtcaatcctgacttcgtgatcgctctgatttttaaaagctttaatatggagccatcatatgactttctgcacatctacgagggcgaggatagtaatagtcccctgatcgggtcatatcaagggtctcaagcccctgagaggattgagagctccggtaacagcttgtttcttgctttccgttccgacgcaagcgtgggattgagcggctttgcaattgagttcaaggagaagccccgagaagcctgttttgatcccggtaatatcatgaacgggactcgcgtgggaactgactttaaacttgggtctacaattacgtatcagtgtgattctggctacaagattctcgacccaagttccatcacatgcgtgataggcgcagacggcaagccctcctgggaccaggttctaccaagctgtaacgcgccttgcggtggccagtataccggatccgagggcgtagtcctatcaccgaattacccccataattacactgccggacagatatgtctgtacagcatcaccgtacccaaggaattcgtggttttcggccaatttgcctatttccagaccgcccttaacgatttggccgaattatttgatgggacccacgctcaggcgagactcttatcttcactgtcaggctcacattctggcgagacgctgcctctcgcaacttccaaccagatattgctgcgcttttctgctaagtcgggggcttccgctcgaggatttcacttcgtgtaccaagcagtacctcggacgtcggatactcagtgctcaagtgtcccagagcctcggtacggtcgcaggatcgggtccgaattcagcgcagggtccattgttagattcgagtgcaacccagggtatcttcttcaaggttctactgcactgcactgtcagtctgtcccgaacgccctggcccagtggaacgacacaataccttcttgcgtcgttccctgcagcggaaatttcacacagcggagaggaacaattctgagtcccggttaccccgagccctatggaaacaacctaaactgcatctggaaaatcatcgtcacagaaggcagcgggatccaaatccaggtgatttctttcgctaccgagcaaaattgggatagtctggaaattcatgatggcggtgatgtgactgctcccaggctgggctccttctcggggaccaccgtccccgctctcctaaattcaacctccaaccagctgtacttacatttccagtcagatatctccgtcgcggcagccggattccatctcgaatacaaaaccgtcggcctcgcggcttgccaagaacctgctctgccaagtaattccattaaaatcggcgaccgatacatggtcaacgacgtcctgagcttccagtgtgagcccggatatacgcttcagggccgaagccacatcagttgtatgcctgggacggtgagaaggtggaattatccttccccactgtgtatcgccacctgtggcggaaccctctccaccctcgggggtgttatactgtccccgggattccccggttcttatcctaataacttagattgtacatggaggatctcactgccgatcggctatggggctcatatccagttcctcaacttctcaactgaggctaaccatgactttctggagatccagaacggaccatatcacaccagtccgatgattggtcagttctcaggcaccgacctgcccgctgcgctcctctctacaacacatgaaaccctcattcatttctacagtgaccattctcagaatcggcagggtttcaagcttgcctaccaggcttacgaactgcagaactgtccggaccctcctcccttccagaatggatacatgataaacagtgattattcagtgggtcagtccgtaagtttcgagtgttatccaggatacatcttaattgggcacccagttctgacatgccagcacggaataaatcgcaattggaactacccctttcccaggtgcgacgcaccttgcggatacaacgtcacctcacagaatggcacaatctactctccgggatttcccgacgagtatccaatcctgaaagattgtatttggttgatcacggtccctcctggtcacggggtctacatcaacttcactcttctacagaccgaggctgtgaatgattatattgccgtttgggatggtccagatcagaactccccacaactcggcgtgttcagcggcaatacagctctggaaactgcctatagcagtacgaaccaggtcttactgaagtttcatagcgacttcagcaacgggggattctttgtgctgaacttccacgcgtttcagctgaagaaatgccagcctccacccgctgtgccacaagccgaaatgctgactgaggacgacgactttgagataggagattttgtcaaataccaatgtcaccccggatacaccctagtgggtacagatattttgacctgtaaactgagtagtcaactgcagtttgagggaagcctgccaacctgcgaggctcagtgcccggctaacgaagttcgcaccggctcctcaggtgtgattttatcccctggttaccctggcaactatttcaattcgcagacatgcagttggtctattaaagtagaacccaactataacatcaccatttttgttgacacttttcagtcggaaaaacagttcgacgctctcgaggtttttgacgggtcatcgggacagtctcccttgctggtcgtgttgtccggcaatcacaccgaacagtccaacttcacctctagatctaaccagctttacctgcggtggagcacggatcatgcaacgtcgaaaaagggcttcaagataagatacgccgcaccttattgcagcctgacacatccactgaagaatggtggtattctcaatagaacggctggggcagttgggagcaaagtgcattacttttgcaaacctgggtataggatggtaggtcattccaatgccacctgtcgcaggaaccctttaggtatgtaccagtgggattcattgactccactgtgtcaggcagtttcttgtgggatccccgagagtcctggcaacggttcattcaccggcaatgaattcaccttggactccaaggtggtttacgaatgtcacgagggctttaagttagagtctagccagcaagccaccgccgtgtgtcaggaggacgggctgtggtcaaataaaggaaagccgcctacatgtaaacctgtggcttgtccatcaattgaggcacagctgagtgagcacgtcatctggcggctggttagcggctctctgaacgagtatggggcacaggtgcttctgtcatgtagccctggttattatttggagggttggagattgctccgctgccaggcaaacggcacgtggaacatcggtgacgaacgcccttcctgtagagtcatctcctgtgggtctctgtcttttcccccaaatgggaacaaaattggtacattgacagtctacggagccactgcgatctttacctgtaacaccggctacaccctagtgggaagccatgtcagggaatgtcttgccaatgggctgtggtctgggtccgaaaccagatgtcttgccggacattgcggtagccctgatcccattgtaaatggccacatctccggcgacggtttcagctatcgcgacaccgttgtgtatcagtgtaatcctgggtttcgattagtgggcacgagtgtgcgtatatgtctgcaggatcataaatggtctggccagacacccgtctgcgtgccaatcacatgcggacatcccggaaacccagcccatggcttcactaatgggagtgaattcaacctcaacgacgtagtgaactttacatgcaacacaggctatctgctccagggcgtcagtcgcgctcagtgtcgatcaaatggacagtggagcagcccactgcctacttgccgagtggtgaattgctccgaccctggattcgttgagaatgctatccgtcacgggcagcagaatttccctgaatcgttcgaatacggcatgtcaatcctgtaccattgcaaaaaaggattttacctgctcgggtcttctgccctcacctgtatggccaatggcctttgggatcgtagcctgccaaagtgtctggccatctcgtgcggccaccctggtgtgccagccaatgccgttctaactggagaattgttcacctacggagctgttgtgcattactcttgtcggggaagcgagagcctgatcggcaacgatactcgtgtgtgtcaagaggactcccattggtccggggctcttccacactgtaccggtaataaccctggcttctgtggagatcccggaaccccagcccacggtagccgattgggcgacgactttaagacgaaaagtcttctaagatttagctgcgaaatggggcaccagcttagggggtcaccagaaaggacgtgcttactgaacgggtcctggtcagggctgcagcctgtgtgcgaagcagtctcctgtggaaaccctggcacgcctactaatggcatgattgtatcatccgatggcattctgttctcaagcagtgtgatctatgcctgttgggaaggatataagacgtctgggcttatgacgagacactgcacagccaatggaacatggactggaacagcaccagactgtaccattatcagctgcggcgaccctggaaccctggctaacggaattcagttcggaaccgattttacgtttaataagacagtgtcctatcagtgcaatcctggctatgtcatggaggccgttaccagcgctacaatcaggtgtacaaaagatggccgttggaatcccagcaaacccgtctgcaaggccgttctctgccctcagccgcctccagtgcaaaatggaacagtcgagggcagcgacttccgctggggcagcagcatctcttactcatgcatggacggctaccagctgtcccattcagccatcctttcctgcgagggacggggagtgtggaagggagagatcccccaatgtctgcccgtgttctgcggggatcctggcattccagccgagggacgtctgagtggcaagagttttacatataagtctgaagtgttcttccagtgcaaatctcccttcatccttgtgggatcctccagaagggtctgtcaggctgacggcacctggtccggtatccagcctacctgcatagacccagcccacaatacatgccccgatccgggtacacctcactttggtatacaaaatagctcaagagggtatgaggtgggttctaccgttttttttcgctgtcggaagggctaccacattcaggggtcaacaacgcgcacatgccttgccaacctcacatggagcgggatccaaacggagtgcattcctcatgcctgccgtcagcccgagacccccgcacacgcagacgtgagagccattgatcttcccacatttggctacacgctggtgtacacctgccaccctgggtttttcttagcaggaggatctgagcacaggacttgtaaagccgatatgaagtggaccggtaagagtcctgtctgcaagtctaaaggagtgcgcgaggttaatgaaaccgtgacaaagactccagttccaagcgatgtcttctttgtgaacagtctgtggaaaggttactatgagtatctgggaaagcgccagccggcaactctaacagttgattggtttaatgctacttcctcaaaggtcaatgcaacgtttagcgaggcctcccctgtggagctcaagctcaccggtatctacaaaaaagaggaggctcacctccttttaaaagcctttcaaataaaagggcaagctgacattttcgtgagcaagtttgagaatgacaattggggtctcgacggatacgtaagtagtggccttgaacgtggcggttttaccttccagggggacatccacggcaaggatttcggaaaattcaaattagagcggcaagatcccctgaacccagaccaggactcgagctcacattaccacggcactagtagcggaagcgtggccgctgccatcctcgtaccattttttgctctaattttgtccggcttcgctttctatctctacaaacatcgtacacgacctaaggttcagtataacggatatgcaggccatgagaattcgaatggtcaggcgtcatttgaaaatccaatgtacgacactaacctcaaaccaacggaagccaaagcagttcgatttgatacgaccctaaatactgtctgcacagtggtgtac

SEQ ID NO: 227781 - DNA, 6329 bp, Artificial Sequence
  derived and/or modified sequence
atgacagcttggcgacggttccaatccctactgctactgctcggtctgctggtgctgtgtgcgagactgcttactgcggctaagggacaaaattgtggtggccttgtccaggggccaaatggcaccattgagtctccaggcttccctcatgggtatccaaattatgcaaattgtacttggatcattattactggggaacggaacagaatccaactgtccttccatacatttgcactagaagaagactttgacatcctctccgtatatgatggtcagcctcaacagggcaaccttaaagtgcggctgtctggctttcagcttccatcctccatcgtctccaccggcagcattctgaccctttggttcacgacagactttgccgtatctgcacagggattcaaggctttgtatgaagttctgccaagtcacacctgcgggaatcccggagaaatcctgaagggagtcctccatggtacccgcttcaatattggagacaaaatccgttatagttgcctacccggatatatactagaagggcatgccattctgacttgtatcgtcagccccggtaacggcgcatcctgggacttccccgctcctttctgtagggccgaaggagcttgcggcggaaccctgcgtggaaccagctcatctatcagcagtccccacttcccctccgaatacgaaaacaacgcagattgtacttggactatcttggctgagcccggagacaccatcgccctagtattcactgacttccaacttgaggagggctatgacttcctggagatcagcggcacagaggctcccagtatctggctgaccggaatgaaccttccgagccctgtaatctcatctaagaattggctgcgacttcatttcaccagtgacagtaatcaccgcaggaagggcttcaatgcacaatttcaagtgaaaaaggctatcgagctcaaaagtcggggtgttaaaatgttgccgagtaaagatgggtcccataaaaacagcgttctgtcacaggggggagtagccctggtgagtgacatgtgtcctgatcccggaatacccgaaaatggcagacgtgctggatctgactttagagtgggtgcaaacgtgcagttctcctgtgaggacaactacgtgctccaaggatctaagtcaataacgtgccagagagtcacagagaccctagccgcatggtcagatcacaggcccatctgccgcgctaggacttgcgggtctaaccttcgcggtcctagcggggtaattacatctcccaattacccggtgcagtacgaggataatgcacactgtgtgtgggtgatcaccaccactgatcccgacaaggtgattaagctggccttcgaagagtttgaactggagcggggttatgataccctgacagtgggagatgccggaaaagtcggcgatacgcggtctgtgctgtatgtgctcactggatctagcgtgcctgatttgatcgttagcatgtcaaaccagatgtggctccatttgcagtctgacgattccattggcagtcccggattcaaagcagtttaccaagagatcgaaaagggcggatgtggcgaccccggtatacctgcctatggaaaacgcaccggctccagtttccttcacggagacactctgaccttcgagtgccctgctgcatttgaactggtgggagaaagagtgatcacatgtcagcagaacaatcaatggtctgggaacaagcctagctgtgtcttttcctgcttttttaatttcacggcaagcagtggaatcatcctgtcccccaactatcccgaggagtacggtaataacatgaattgcgtttggctgataatctcggagcctgggtcacgaatccacctgattttcaatgacttcgacgtggaaccgcagtttgatttcctggccgtgaaggacgacggcatcagcgacattacggtcttgggcacgtttagcggaaatgaggtccctagccagctggcctcttcaggccatatcgtccgactcgagtttcagtcagaccactcaaccaccggcaggggcttcaacatcacatataccacattcgggcagaacgagtgtcacgatccaggtattccgattaacggtcgcaggtttggtgaccggttcctcctgggcagctctgtcagcttccactgcgatgatggtttcgtcaagacgcagggatccgagtccataacctgtattctgcaggatggcaatgtagtgtggagtagcaccgttcctcggtgcgaagctccatgcggcggacacttaacagcaagctctggagtcatattaccaccgggatggcctggatactacaaagacagcttgcactgcgagtggattattgaggccaagccaggtcattccataaaaatcaccttcgaccggttccagacagaggtaaactatgacactctagaggtgagagatggcccagcctctagctctccacttattggggaataccacgggactcaagccccacagtttctgattagcactggaaacttcatgtacctgctctttacaacggataatagtaggagctcaatcggctttttaatccactacgaatccgtgacgctcgagtcagactcatgtctcgatccaggtatcccagtaaatggtcaccggcatggaggcgacttcggcattcgcagtacggtcacattttcttgtgatcctggatacacgttgtcagacgacgagccgttggtgtgtgagagaaaccatcagtggaatcacgccttgccaagctgtgacgctctttgcggtggttacattcaggggaaatcaggtactgtgctcagccccggtttccccgacttctatcccaacagcctaaattgcacatggaccattgaggtaagccacgggaagggagtccaaatgatcttccacaccttccatctcgagtcctcacacgattacctcctaatcacagaggatgggagctttagtgaacccgtcgctcggctaactggctccgtgttgccccacactatcaaagccggattgtttgggaacttcactgcacaactacgatttataagcgactttagcatttcctatgaaggctttaacatcacgttctcagaatacgacctggaaccttgcgacgatcctggcgttcccgctttctctaggcgtataggtttccactttggcgtgggtgattccctgactttcagctgttttctcggctatagacttgaaggcgcaaccaaactgacctgtcttggcggaggaagaagggtgtggtctgcccctctaccacgatgtgtggccgaatgtggcgcatcagtaaagggcaatgaaggtacactcttatcacccaactttccctctaactacgataacaaccatgagtgtatttataaaattgaaacggaggctggaaagggtatacatctgagaacgaggagctttcagttgttcgaaggtgatacacttaaagtctatgatggcaaggattcatcctcacgaccactcggcactttcactaagaatgaactgctgggtcttatcttgaacagcacatccaaccacctttggctggaatttaacaccaatggtagtgataccgaccaaggctttcagctgacttacacttcctttgatttggtgaaatgtgaagaccccggaatcccaaattacggctatcgaatccgcgacgaggggcacttcaccgataccgtcgtcctgtattcttgcaatccaggatatgcaatgcatggatcaaacactctgacttgtctgagcggagatcggcgagtgtgggataagcccttaccatcttgcatcgctgagtgtggtgggcagatccacgccgctacaagcggcagaatcttaagcccgggatatccagccccatatgataacaatttacattgcacctggattattgaagccgaccccggtaagactatttctcttcactttatcgtgtttgacacagagatggcacacgatatcctgaaggtctgggacggacctgtcgattcggatatcttgttgaaggagtggtccggctcagccctcccggaggacatccactcgacatttaactccttgaccctgcagttcgacagcgacttcttcatctcaaaatcaggcttttccatacagttttctacaagtatcgccgctacttgtaatgatccagggatgcctcagaatgggacccggtatggagactcacgggaggctggcgacaccgtgacttttcagtgcgatccaggatatcaactacagggccaggctaaaatcacttgcgtccagctgaataaccgattcttctggcagcccgatccgccaacctgcattgcagcctgcgggggtaatctgactgggcctgccggagtcatcttatcccccaactatcctcaaccctacccgcctggtaaggaatgtgactggagagtgaaggtgaatcctgactttgttatagcactcattttcaagtcatttaacatggagccatcttacgacttcttgcacatctatgaaggtgaagactccaattctcctctcattggctcctaccagggttcacaggcgccagaaagaatagaatccagtggcaattcgctcttcctagctttccggagtgacgcttccgtcgggctcagcgggttcgctattgagttcaaagagaaaccacgggaagcctgctttgatcctggaaacatcatgaacggtacaagagtagggacagattttaagctgggctcaactattacataccagtgtgactctggctacaagatcttggatccctctagcatcacttgtgtgataggggcagatggaaagccttcctgggatcaagtgctgccaagttgcaacgccccttgtgggggacagtacactgggtctgaaggggtggtcctgtccccaaactatccacacaattatactgcaggccaaatctgcctatacagcatcacagttcctaaagagtttgtggtgtttggacaatttgcctactttcagacggctctcaatgacctggcggagctattcgatgggacccacgctcaagctaggctccttagcagccttagcggctcccactccggagagactctgccgctagctacttctaatcaaatcctgctacgtttttccgccaaaagcggcgcatctgccaggggcttccattttgtgtatcaggcagtgcctcgaacgagcgatacacaatgcagctctgttcctgaacctcggtatggccgacgcatagggagcgaattttctgcaggctccatcgtacggttcgaatgtaaccccggatacttgcttcagggatcaaccgccctacattgccagagcgtccccaacgctctggctcaatggaacgacacaatacctagctgtgttgtgccctgctctgggaacttcacccagaggcgcggtactatactgagcccgggatatccagagccctacgggaacaaccttaactgcatatggaaaatcatcgtgaccgaaggttccggcatccaaattcaggtcatctccttcgcaacggaacagaactgggatagtctagagatccatgacggtggagacgtaaccgcccctcggttgggcagcttcagcggcacgaccgttcctgccttgctgaattctacttccaatcagctttatcttcacttccagtcagacatttcggttgcggctgccggatttcatcttgaatacaagaccgtgggcctggccgcatgccaggagcctgcactgccaagtaatagtatcaagatcggagaccgctacatggttaatgacgtcctcagtttccaatgtgaacctggttacaccctgcagggcaggtcacacatttcgtgcatgcctggtacagtcaggcggtggaactacccatcgccactttgtatcgctacatgcggcggaaccttgtccactcttggcggtgtcattttatcacccggttttcccggaagttaccccaataatctggattgcacatggaggatctccctcccgattggttacggcgcacatatacagtttctgaactttagtacggaggccaatcacgacttccttgagattcagaacggtccataccacacctcccccatgataggacagttcagtgggaccgatctccctgcagctttgctgtccactacgcacgaaacccttattcacttttactcggaccactctcaaaaccgccagggcttcaaactggcctatcaggggggttctggcaacatcggcccagcattcccatgcctcgacacaccatttcaggcacgctgccaaggagaagaacgcacattcaacta

SEQ ID NO: 227782 - DNA, 10163 bp, Artificial Sequence
  derived and/or modified sequence
atgaccgcgtggcggagattccaatctctgctgttgttgctcggactgctcgtattgtgtgccaggctgctgacggcggctaaagggcaaaattgcggcggactggtgcagggtcctaatgggacaatcgaatcgcccggttttccacacggatatcctaattacgctaattgcacctggataatcattactggagagcgcaatagaatccagctgtctttccacaccttcgcccttgaggaagattttgatattttatccgtctacgacggtcagccacagcagggcaacctcaaagtgagattatcaggattccagctaccctcaagtattgtgtcgacgggttccattctgaccttgtggtttactacagacttcgccgtgtcagctcaaggctttaaggcactctatgaggtcctgccctcacacacttgcggaaaccccggagaaatccttaaaggagttctacatggcactaggttcaatataggcgacaaaatccgctattcgtgtctccccggatatattctggaaggccacgcaatcctgacctgcattgtgtcccccggtaacggcgcatcctgggatttccccgcacctttttgcagagccgagggagcatgcggaggcacactcagaggaacttctagcagtattagctcgccccatttcccgtctgagtacgagaataatgccgactgcacttggacaatccttgccgagcctggcgatactattgcactcgtgtttaccgatttccaacttgaggaggggtatgattttcttgagatttctggaacagaagcacccagcatctggctgactggcatgaacctgccctctcctgttatatcctccaaaaattggctccggctgcacttcaccagcgactccaaccaccggaggaagggattcaacgcccagtttcaggtcaaaaaagcaatcgagttgaaatcccgaggagtcaagatgctccccagcaaggacgggagtcacaaaaattcggtgctgtcacagggtggggtcgccctggtatccgatatgtgcccagatcccggaatccctgagaacggtcgtcgggcaggctctgactttagggttggggctaacgtacaattctcctgtgaggataattacgtgctgcaaggaagtaaaagtattacctgtcagcgggttactgaaactctggccgcatggtccgaccatagacccatctgcagagcacgtacttgtggctctaatttgagaggaccttcaggtgtgatcaccagtcccaattacccagttcaatacgaggataatgcacactgcgtatgggtgatcaccaccaccgatcccgacaaagtcatcaaactcgctttcgaggagtttgagctggaacgcggatacgacaccctgaccgtaggagacgccggtaaagttggggacacgcgctcggtgttgtatgtgctgacaggatcttctgtcccagatctgattgtgtcgatgtcgaaccaaatgtggcttcacctacagtcagacgacagcatcggcagcccaggatttaaggctgtttaccaagagatcgaaaagggtgggtgtggcgatccaggtattcctgcatatggtaagagaactggaagttccttcctgcacggggacacactgacatttgagtgcccggctgcatttgagctggtgggcgaacgcgtgattacctgccaacagaacaaccagtggtctgggaacaaaccatcctgtgtctttagttgctttttcaatttcaccgctagcagcgggataattctctcccctaactatccagaggagtacgggaataacatgaactgcgtttggttgattatctccgagccgggaagtcgcatccacctcatcttcaatgactttgatgtggagccccagttcgacttcctggccgtgaaggatgatgggataagtgatatcacagtgctaggaacattctcaggcaacgaggttccgtcacagttggccagtagtggccacatcgtgaggctggagtttcagagtgatcactcaacaaccggcagaggcttcaacattacttacaccacatttggccagaacgagtgccacgaccccggaattcccattaacgggaggaggttcggtgacagatttcttctgggtagctccgtttctttccattgtgacgacggttttgtgaaaacccagggctccgaaagcattacgtgcattctgcaggacggtaacgtcgtatggtcatcaaccgtacctcgatgtgaagcgccatgcggtggccacctgactgcctctagcggggtgatcctgccgccagggtggccaggctattacaaggactccctgcactgcgagtggataatcgaggcgaaaccgggtcatagcattaaaattacattcgacagattccaaacggaggtgaattacgatacattggaggtacgggacggaccggcttccagctctcctcttatcggagagtaccatggcactcaggcccctcagttcctcatttccacggggaattttatgtacttgctgtttaccacagacaacagccggagttccatcgggttcttgatccattacgagagcgtgaccctggagtctgactcatgtctggaccctggaattccagtgaacggacatcggcacggcggagattttggaatccgcagcactgtcactttcagttgtgacccaggatacacactctcagatgatgagcctctcgtttgcgaaagaaaccatcagtggaaccacgcccttcctagttgtgatgctctgtgtggcggatatatccagggcaaatcaggcactgtgctatccccgggtttcccagacttctacccaaattctctgaattgcacttggactattgaagtgagtcatggtaaaggggtgcagatgattttccacacattccacctcgaatcctctcacgattatctgctcatcaccgaagacggatcattttctgaacccgtggcgaggctaaccggttcggtactcccccacacaatcaaggctgggctgtttggaaactttacagctcagctccggttcatttcggatttttcaatcagctacgagggcttcaacatcacgttcagcgaatacgatctcgagccttgcgacgatcctggtgtgcccgcattttcacggaggatcggcttccatttcggggtaggagacagtttgacattcagctgtttcttgggctatcgtctggagggggctactaaactcacgtgcttgggtggcggacgccgtgtgtggtcagctccactgccaaggtgtgttgcagagtgcggtgccagcgtgaaggggaatgagggaacccttttgtccccaaatttcccgtccaactatgacaataatcatgagtgcatctacaagattgagacagaagcgggaaaagggattcatctgagaacacggagttttcagctgtttgagggagatacgctgaaggtgtatgatggcaaagactcttcctccaggcctctgggcacattcacgaagaatgagttgctgggcctgattctgaattccacgtccaaccatctatggctcgagtttaacaccaatggaagcgacacagatcaaggttttcagctcacttacacatcattcgatctcgtgaagtgtgaggaccccggaatcccaaattatggctacagaatcagggacgaaggtcactttactgatacagttgtgttgtactcctgcaacccaggttatgcaatgcatgggtctaacacactgacatgcctcagcggtgacagaagagtgtgggacaagcccttaccctcatgtatcgcagaatgtgggggtcagatccacgctgccacaagtggaagaattctgtcccccggatacccagccccatatgacaataatctgcactgcacttggattatcgaggcagatccgggaaagacaataagcctgcattttatcgtcttcgacacagaaatggcccacgatatcctgaaggtatgggacggcccagtggacagcgatatcttgcttaaggagtggagcggtagcgctctccccgaagatattcacagcactttcaactccctcacgcttcagtttgactcagatttctttatttccaaatccgggtttagcatacagttctcgacaagtatagccgcaacctgcaacgacccaggtatgcctcagaatggaactcggtatggagattcaagagaagcaggtgatacagtgacgttccagtgcgacccaggctatcaacttcaaggccaggcgaagattacatgcgtacagcttaataaccggtttttctggcaaccagacccacccacttgcatcgcagcctgcggcggaaatctaaccggaccggctggagtaatcctatcaccgaactacccacagccctacccacctggcaaagaatgtgactggcgggtgaaagttaacccagattttgtaatcgcccttatattcaagtcctttaatatggagccaagttatgactttctgcatatttatgagggagaagactctaactcacctcttatcggctcatatcagggaagtcaagccccagagagaatcgagtcttccggcaattccctgttcttggcctttcgatctgatgcctcagtcggtctatctggtttcgctatcgagttcaaagagaaacctcgtgaagcttgcttcgatcccggaaatatcatgaatggaacccgcgtggggacagacttcaaacttgggagcacaattacataccagtgcgatagcggctataaaatcctggatccatctagcattacatgcgtgataggagctgatggaaagccatcctgggatcaagtgctcccaagctgtaatgccccatgtggcggtcagtatactggctccgagggggtagtactaagtcctaattacccccataattacaccgccggtcaaatctgcctgtatagtataactgtacccaaggaattcgtcgttttcgggcagttcgcttatttccagactgccctcaatgacctggccgagctctttgacggcacgcatgcacaggctaggcttctgtcttccttgtcaggtagtcactctggcgaaacacttcccctcgccacctcaaatcagatcctgctgagattctccgccaaatctggcgcttccgcaagaggtttccacttcgtgtaccaggccgtgccgcgaacatccgacactcagtgctcatctgtgcccgaaccgagatacggaaggcgcattggcagcgaattcagcgctggatccatcgtccggtttgagtgtaaccccggatatctattacaggggtccacggccctccactgtcagtcagtgcccaacgcacttgcacagtggaatgatactattcctagctgtgtggttccgtgctctggcaatttcacccaaaggcgaggaactatactgagccccggttatccggagccgtatggcaacaatttgaactgcatttggaaaatcatcgtgacggaaggctcaggtattcaaatccaggtcatatcctttgccacagaacaaaactgggacagcttagagatccacgacggaggagacgtgacagctccacggctcggctctttttctgggaccaccgtgcccgctctgctgaactctacatcaaaccagctgtaccttcacttccagtcagatatctctgtagcggctgctgggtttcacctcgaatacaagaccgtagggctcgcagcttgccaggagccagccttaccttcaaactccattaaaatcggtgacaggtatatggtcaacgatgtcctgtcattccagtgtgagcccggatatacactccaggggcgaagtcacatcagttgcatgccgggtactgtacgtcgatggaactaccctagcccgctgtgcatcgcgacttgtggcggaaccctgtcgaccctggggggagtgatcttgtcgcctggctttccaggtagttaccccaataatctggactgcacctggcggatcagccttcccatcggatacggcgctcacattcaattccttaacttttcgacggaagccaaccacgactttctcgagattcagaacgggccttatcacacaagtccaatgatcggtcaattcagcgggaccgatctccctgcagccctgttatcaacgacacatgagactctgatccatttctacagcgatcactcacagaataggcagggattcaagctggcatatcaggcgtatgagcttcagaactgccccgatccccctcccttccagaatggttacatgattaactctgattattccgtcggccagagtgtgtcatttgaatgctaccccggatatattctgattggccaccccgtcctcacctgccaacacggaatcaatagaaattggaattacccttttcctcgctgtgatgcaccttgtggctacaatgtcaccagccagaacgggacaatctattctcccggattccccgacgagtacccaattctaaaggactgtatttggttgatcacagttcctccaggacatggtgtatacatcaatttcactctgctccagacggaagcggtcaacgactacattgccgtgtgggacggtcccgaccaaaattcccctcaattaggggtattctctggaaacacagcattggagacagcgtactcgagcacaaatcaagtcctgctcaaattccattccgacttctctaacggcggattcttcgtgctcaactttcacgcttttcagttaaaaaaatgccaaccaccacccgcagttcctcaagccgaaatgttgacagaggatgatgactttgagatcggcgactttgttaaatatcagtgccacccgggatatacacttgtgggcactgatatccttacttgtaagctctctagtcaactgcagtttgagggatccctacctacgtgcgaggcacaatgcccggctaacgaggtgaggactggctcatccggcgtgattctctctcctggctacccaggaaattattttaactcccaaacctgcagctggtccatcaaggtggagcccaactataacattaccattttcgttgacacttttcaatctgaaaagcaatttgatgccctggaggtgtttgatggcagctccggacagagtcccttgctcgttgtgttgtcaggcaaccataccgaacaaagcaactttacttctcgttctaaccagctgtatctgcggtggtctactgatcacgcaacctctaaaaagggtttcaagatacggtatgcggctccatactgttctttaacacatccattaaagaacggaggcatcctcaatcggaccgcaggtgctgtcggatctaaggtgcattacttttgtaagcccggatatcggatggtgggacacagcaatgctacatgcagaaggaatccgctcggtatgtaccagtgggattcgcttacgcctttgtgccaggctgtaagttgtggaattcccgagagcccaggaaatggtagcttcactggcaacgaattcaccttggactctaaagttgtatacgaatgtcatgaggggttcaaactggagtcttcacagcaggctactgctgtctgccaggaggatggtttatggtccaataaggggaaaccacccacatgtaagccagtcgcatgtccctctattgaggctcaactgtctgagcacgtaatatggcgtctagttagcgggagcctgaacgaatatggagcacaggtgctcctgtcctgcagccccggttattatctggaaggctggaggctgttgagatgccaagccaatggtacttggaatataggggacgaacgaccgagctgccgggcaggacactgtggatctcccgatcccattgttaacggacatatctcgggcgacggtttcagctaccgcgatacagtggtatatcagtgtaatcccggatttcgcctcgtcgggacatcagtgcggatatgccttcaggaccacaagtggtccgggcagactcccgtctgtgtcccaataacttgtggacatcctggaaatcctgcgcacggtttcaccaacggctctgaatttaatttgaatgatgtggtgaactttacttgtaatacagggtatctgctacagggcgtcagccgtgcgcagtgccggtctaacggccagtggagtagtcccctgcccacttgccgcgtcgtgaactgctctgacccaggcttcgtggaaaatgccataagacacggccaacagaactttccagagtcatttgagtatggcatgtctatcctatatcattgtaagaagggcttctacctcttgggttccagtgccttaacttgtatggctaatggcctgtgggaccgcagcctgccaaagtgtctagccatcagttgtggccaccccggagtgcccgctaacgccgtcctgacaggcgagctttttacttacggcgcagtggtacattactcctgtcggggaagcgagtctctcatcggcaatgacaccagggtgtgccaagaggatagtcattggagcggcgctcttcctcactgtaccggtaataatcctggcttctgcggtgatccaggaactcccgctcacggcagtaggctgggtgacgatttcaagactaaatctctccttcgcttctcatgtgaaatggggcatcagttgcgagggagccccgagcgcacatgcctgctgaatgggtcgtggtccggattgcagccggtctgtgaagctgtgctgtgcccccaacccccacccgtccagaacggaaccgtggaaggttctgacttccgttggggatccagtatctcttactcctgtatggacggctaccagctgtcccactctgccattctctcctgtgagggacgtggagtctggaagggcgaaatccctcaatgtcttcctgtattctgtggagaccctggcattcccgcagaggggagactgtctggaaagtcctttacatataaaagcgaggtgttcttccagtgcaagtcacccttcatcctcgtgggcagcagccgcagagtgtgccaggctgatggcacctggtctggtatccaaccaacttgcatcgacccagcccacaatacctgtcccgatccaggaactccacactttggcatccaaaattccagccggggatatgaagtcggatctacagtctttttcagatgccggaaaggctatcatatccagggttcaacaaccaggacatgcttggcaaacctcacttggagcggcattcaaactgagtgcatacctcacgcttgccggcaaccagagacgccagcccacgccgacgtccgggcaattgacttaccaacatttggatatactctagtgtatacctgtcatcctggcttcttcttggcaggcggatccgagcaccgtacctgtaaagccgatatgaaatggaccggtaagtcaccggtttgtaaaagcaagggcgtccgggaagtcaatgaaactgtgacgaagacacccgtcccatctgacgtgttttttgtgaacagcctatggaaggggtactacgagtatctgggtaaacggcaaccggcaacactcacagtcgactggttcaatgcaacatctagtaaggtcaatgcgacttttagcgaggcgtctcccgtggaacttaaactgacgggcatctacaaaaaagaggaagctcatctgctgctcaaggctttccagatcaagggacaggctgacatttttgtttctaaattcgagaacgacaactggggcctggacggatacgtctctagtggattggaacgcggaggcttcaccttccagggggacatccatggcaaggactttggcaagtttaagctcgagaggcaggaccctcttaaccctgaccaggattcctcaagccactatcatgggacttcttccggctctgtggctgcagccatcctggtcccgttctttgctctcatcctcagcggctttgccttctatctgtataaacatcgtactcgacccaaggtgcagtacaatgggtatgcgggtcacgagaactcgaacggccaggccagcttcgagaatccgatgtacgacaccaatctgaaacctaccgaggcgaaggcagtgcggtttgacaccaccttaaacactgtttgtacggtcgtata

SEQ ID NO: 227783 - DNA, 10767 bp, Artificial Sequence
  derived and/or modified sequence
gttttacctagccacacttgtggaaatcctggagaaatcctgaaaggagttctgcatggaacgagattcaacataggagacaaaatccggtacagctgcctccctggctacatcttggaaggccacgccatcctgacctgcatcgtcagcccaggaaatggtgcatcgtgggacttcccagctcccttttgcagagctgagggagcctgcggaggaaccttacgcgggaccagcagctccatctccagcccgcacttcccttcagagtacgagaacaacgcggactgcacctggaccattctggctgagcccggggacaccattgcgctggtcttcactgactttcagctagaagaaggatatgatttcttagagatcagtggcacggaagctccatccatatggctgactggcatgaacctcccctctccagttatcagtagcaagaattggctacgactccatttcacctctgacagcaaccaccgacgcaaaggatttaacgctcagttccaagtgaaaaaggcgattgagttgaagtcaagaggagtcaagatgctgcccagcaaggatggaagccataaaaactctgtcttgagccaaggaggtgttgcattggtctctgacatgtgtccagatcctgggattccagaaaatggtagaagagcaggttccgacttcagtagggttggtgcaaatgtacagttttcatgtgaggacaattacgtgctccagggatctaaaagcatcacctgtcagagagttacagagacgctcgctgcttggagtgaccacaggcccatctgccgagcgagaacatgtggatccaatctgcgtgggcccagcggcgtcattacctcccctaattatccggttcagtatgaagataatgcacactgtgtgtgggtcatcaccaccaccgacccggacaaggtcatcaagcttgcctttgaagagtttgagctggagcgaggctatgacaccctgacggttggtgatgctgggaaggtgggagacaccagatcggtcttgtacgtgctcacgggatccagtgttcctgacctcattgtgagcatgagcaaccagatgtggctacatctgcagtcggatgatagcattggctcacctgggtttaaagctgtttaccaagaaattgaaaagggagggtgtggggatcctggaatccccgcctatgggaagcggacgggcagcagtttcctccatggagatacactcacctttgaatgcccggcggcctttgagctggtgggggagagagttatcacctgtcagcagaacaatcagtggtctggcaacaagcccagctgtgtattttcatgtttcttcaactttacggcatcatctgggattattctgtcaccaaattatccagaggaatatgggaacaacatgaactgtgtctggttgattatctcggagccaggaagtcgaattcacctaatctttaatgattttgatgttgagcctcagtttgactttctcgcggtcaaggatgatggcatttctgacataactgtcctgggtactttttctggcaatgaagtgccttcccagctggccagcagtgggcatatagttcgcttggaatttcagtctgaccattccactactggcagagggttcaacatcacttacaccacatttggtcagaatgagtgccatgatcctggcattcctataaacggacgacgttttggtgacaggtttctactcgggagctcggtttctttccactgtgatgatggctttgtcaagacccagggatccgagtccattacctgcatactgcaagacgggaacgtggtctggagctccaccgtgccccgctgtgaagctccatgtggtggacatctgacagcgtccagcggagtcattttgcctcctggatggccaggatattataaggattctttacattgtgaatggataattgaagcaaaaccaggccactctatcaaaataacttttgacagatttcagacagaggtcaattatgacaccttggaggtcagagatgggccagccagttcgtccccactgatcggcgagtaccacggcacccaggcaccccagttcctcatcagcaccgggaacttcatgtacctgctgttcaccactgacaacagccgctccagcatcggcttcctcatccactatgagagtgtgacgcttgagtcggattcctgcctggacccgggcatccctgtgaacggccatcgccacggtggagactttggcatcaggtccacagtgactttcagctgtgacccggggtacacactaagtgacgacgagcccctcgtctgtgagaggaaccaccagtggaaccacgccttgcccagctgcgacgctctatgtggaggctacatccaagggaagagtggaacagtcctttctcctgggtttccagatttttatccaaactctctaaactgcacgtggaccattgaagtgtctcatgggaaaggagttcaaatgatctttcacacctttcatcttgagagttcccacgactatttactgatcacagaggatggaagtttttccgagcccgttgccaggctcaccgggtcggtgttgcctcatacgatcaaggcaggcctgtttggaaacttcactgcccagcttcggtttatatcagacttctcaatttcgtacgagggcttcaatatcacattttcagaatatgacctggagccatgtgatgatcctggagtccctgccttcagccgaagaattggttttcactttggtgtgggagactctctgacgttttcctgcttcctgggatatcgtttagaaggtgccaccaagcttacctgcctgggtgggggccgccgtgtgtggagtgcacctctgccaaggtgtgtggccgaatgtggagcaagtgtcaaaggaaatgaaggaacattactgtctccaaattttccatccaattatgataataaccatgagtgtatctataaaatagaaacagaagccggcaagggcatccaccttagaacacgaagcttccagctgtttgaaggagatactctaaaggtatatgatggaaaagacagttcctcacgtccactgggcacgttcactaaaaatgaacttctggggctgatcctaaacagcacatccaatcacctgtggctagagttcaacaccaatggatctgacaccgaccaaggttttcaactcacctataccagttttgatctggtaaaatgtgaggatccgggcatccctaactacggctataggatccgtgatgaaggccactttaccgacactgtagttctgtacagttgcaacccggggtacgccatgcatggcagcaacaccctgacctgtttgagtggagacaggagagtgtgggacaaaccactaccttcgtgcatagcggaatgtggtggtcagatccatgcagccacatcaggacgaatattgtcccctggctatccagctccgtatgacaacaacctccactgcacctggattatagaggcagacccaggaaagaccattagcctccatttcattgttttcgacacggagatggctcacgacatcctcaaggtctgggacgggccggtggacagtgacatcctgctgaaggagtggagtggctccgcccttccggaggacatccacagcaccttcaactcactcaccctgcagttcgacagcgacttcttcatcagcaagtctggcttctccatccagttctccacctcaattgcagccacctgtaacgatccaggtatgccccaaaatggcacccgctatggagacagcagagaggctggagacaccgtcacattccagtgtgaccctggctatcagctccaaggacaagccaaaatcacctgtgtgcagctgaataaccggttcttttggcaaccagaccctcctacatgcatagctgcttgtggagggaatctgacgggcccagcaggtgttattttgtcacccaactacccacagccgtatcctcctgggaaggaatgtgactggagagtaaaagtgaacccggactttgtcatcgccttgatattcaaaagtttcaacatggagcccagctatgacttcctacacatctatgaaggggaagattccaacagccccctcattgggagttaccagggctctcaggccccagaaagaatagagagtagcggaaacagcctgtttctggcatttcggagtgatgcctccgtgggcctttcagggttcgccattgaatttaaagagaaaccacgggaagcttgttttgacccaggaaatataatgaatgggacaagagttggaacagacttcaagcttggctccaccatcacctaccagtgtgactctggctataagattcttgacccctcatccatcacctgtgtgattggggctgatgggaaaccctcctgggaccaagtgctgccctcctgcaatgctccctgtggaggccagtacacgggatcagaaggggtagttttatcaccaaactacccccataattacacagctggtcaaatatgcctctattccatcacggtaccaaaggaattcgtggtctttggacagtttgcctatttccagacagccctgaatgatttggcagaattatttgatggaacccatgcacaggccagacttctcagctcactctcggggtctcactcaggggaaacattgcccttggctacgtcaaatcaaattctgctccgattcagtgcaaagagcggtgcctctgcccgcggcttccacttcgtgtatcaagctgttcctcgtaccagtgacacccaatgcagctctgtccccgagcccagatacggaaggagaattggttctgagttttctgccggctccatcgtccgattcgagtgcaacccgggatacctgcttcagggttccacggcgctccactgccagtccgtgcccaacgccttggcacagtggaacgacacgatccccagctgtgtggtaccctgcagtggcaatttcactcaacgaagaggtacaatcctgtcccccggctaccctgagccatacggaaacaacttgaactgtatatggaagatcatagttacggagggctcgggaattcaggatccaagtgatcagttttgccacggagcagaactgggacttgagatccacgatggtggggatgtgaccgcacccagactgggaagcttctcaggcaccacagtaccggcactgctgaacagtacttccaaccaactctacctgcatttccagtctgacattagtgtggcagctgctggtttccacctggaatacaaaactgtaggtcttgctgcatgccaagaaccagccctccccagcaacagcatcaaaatcggagatcggtacatggtgaacgacgtgctctccttccagtgcgagcccgggtacaccctgcagggccgttcccacatttcctgtatgccagggaccgttcgccgttggaactatccgtctcccctgtgcattgcaacctgtggagggacgctgagcaccttgggtggtgtgatcctgagccccggcttcccaggttcttaccccaacaacttagactgcacctggaggatctcattacccatcggctatggtgcacatattcagtttctgaatttttctaccgaagctaatcatgacttccttgaaattcaaaatggaccttaccacaccagccccatgattggacaatttagcggcacggatctccccgcggccctgctgagcacaacgcatgaaaccctcatccacttttatagtgaccattcgcaaaaccggcaaggatttaaacttgcttaccaagcctatgaattacagaactgtccagatccacccccatttcagaatgggtacatgatcaactcggattacagcgtggggcaatcagtatctttcgagtgttatcctgggtacattctaataggccatcctgtcctcacttgtcagcatgggatcaacagaaactggaactacccttttccaagatgtgatgccccttgtgggtacaacgtaacttctcagaacggcaccatctactcccctggctttcctgatgagtatccgatcctgaaggactgcatttggctcatcacggtgcctccagggcacggagtttacatcaacttcaccctgttacagacggaagctgtcaacgattacattgctgtttgggacggtcccgatcagaactcaccccagctgggagttttcagtggcaacacagccctcgaaacggcgtatagctccaccaaccaagtcctgctcaagttccacagcgacttttcaaatggaggcttctttgtcctcaatttccacgcatttcagctcaagaaatgtcaacctcccccagcggttccacaggcagaaatgcttactgaggatgatgatttcgaaataggagattttgtgaagtaccagtgccaccccgggtacaccttggtggggaccgacattctgacttgcaagctcagttcccagttgcagtttgagggttctctcccaacatgtgaagcacaatgcccagcaaatgaagtccggactggatcatcgggagtcattctcagtccagggtatccgggtaattattttaactcccagacttgctcttggagtattaaagtggaaccaaactacaacattaccatctttgtggacacatttcaaagtgaaaagcagtttgatgcactggaagtgtttgatggttcttctgggcaaagtcctctgctagtagtcttaagtgggaatcatactgaacaatcaaattttacaagcaggagtaatcagttatatctccgctggtccactgaccatgccaccagtaagaaaggattcaagattcgctatgcagcaccttactgcagtttgacccaccccctgaagaatgggggtattctaaacaggactgcaggagcggttggaagcaaagtgcattatttttgcaagcctggataccgaatggtcggccacagcaatgcaacctgtagacgaaacccacttggcatgtaccagtgggactccctcacgccactctgccaggctgtgtcctgtggaatcccagaatccccaggaaacggttcatttaccgggaacgagttcactttggacagtaaagtggtctatgaatgtcatgagggcttcaagcttgaatccagccagcaagcaacagccgtgtgtcaagaagatgggttgtggagtaacaaggggaagccgcccacgtgtaagccggtcgcttgccccagcattgaagctcagctctcagaacatgtcatctggaggctggtttcaggatccttgaatgagtacggtgctcaagtattgctgagctgcagtcctggttactacttagaaggctggaggctcctgcggtgccaggccaatgggacgtggaacataggagatgagaggccaagctgtcgagttatctcgtgtggaagcctttcctttcccccaaatggcaacaagattggaacgttgacagtttatggggccacagctatatttacgtgcaacaccggctacacgcttgtggggtctcatgtcagagagtgcttggcaaatgggctctggagcggcagcgaaactcgatgtctggctggccactgcggttccccagacccgattgtgaacggtcacattagtggagatggcttcagttacagagacacggtggtttaccagtgcaatcctggtttccggcttgtgggaacttccgtgaggatatgcctgcaagaccacaagtggtctggacaaacgcctgtctgtgtccccatcacatgtggtcaccctggaaaccctgcccacggattcactaatggcagtgagttcaacctgaatgatgtcgtgaatttcacctgcaacacgggctatttgctgcagggcgtgtctcgagcccagtgtcggagcaacggccagtggagtagccctctgcccacgtgtcgagtggtgaactgttctgatccaggctttgtggaaaatgccattcgtcacgggcaacagaacttccctgagagttttgagtatggaatgagtatcctgtaccattgcaagaagggattttacttgctgggatcttcagccttgacctgtatggcaaatggcttatgggaccgatccctgcccaagtgtttggctatatcgtgtggacacccaggggtccctgccaacgccgtcctcactggagagctgtttacctatggcgccgtcgtgcactactcctgcagagggagcgagagcctcataggcaacgacacgagagtgtgccaggaagacagtcactggagcggggcactgccccactgcacaggaaataatcctggattctgtggtgatccggggaccccagcacatgggtctcggcttggtgatgactttaagacaaagagtcttctccgcttctcctgtgaaatggggcaccagctgaggggctcccctgaacgcacgtgtttgctcaatgggtcatggtcaggactgcagccggtgtgtgaggccgtgtcctgtggcaaccctggcacacccaccaacggaatgattgtcagtagtgatggcattctgttctccagctcggtcatctatgcctgctgggaaggctacaagacctcagggctcatgacacggcattgcacagccaatgggacctggacaggcactgctcccgactgcacaattataagttgtggggatccaggcacactagcaaatggcatccagtttgggaccgacttcaccttcaacaagactgtgagctatcagtgtaacccaggctatgtcatggaagcagtcacatccgccactattcgctgtaccaaagacggcaggtggaatccgagcaaacctgtctgcaaagccgtgctgtgtcctcagccgccgccggtgcagaatggaacagtggagggaagtgatttccgctggggctccagcataagttacagctgcatggacggttaccagctctctcactccgccatcctctcctgtgaaggtcgcggggtgtggaaaggagagatcccccagtgtctccctgtgttctgcggagaccctggcatccccgcagaagggcgacttagtgggaaaagtttcacctataagtccgaagtcttcttccagtgcaaatctccatttatactcgtgggatcctccagaagagtctgccaagctgacggcacgtggagcggcatacaacccacctgcattgatcctgctcataacacctgcccagaccctggtacgccacactttggaatacagaatagctccagaggctatgaggttggaagcacggtttttttcaggtgcagaaaaggctaccatattcaaggttccacgactcgcacctgccttgccaatttaacatggagtgggatacagaccgaatgtatacctcatgcctgcagacagccagaaaccccggcacacgcggatgtgagagccatcgatcttcctactttcggctacaccttagtgtacacctgccatccaggctttttcctcgcagggggatctgagcacagaacatgtaaagcagacatgaaatggacaggaaagtcgcctgtgtgtaaaagtaaaggagtgagagaagttaatgaaacagttactaaaactccagttccttcagatgtctttttcgtcaattcactgtggaaggggtattatgaatatttagggaaaagacaacccgccactctaactgttgactggttcaatgcaacaagcagtaaggtgaatgccaccttcagcgaagcctcgccagtggagctgaagttgacaggcatttacaagaaggaggaggcccacttactcctgaaagcttttcaaattaaaggccaggcagatatttttgtaagcaagttcgaaaatgacaactggggactagatggttatgtgtcatctggacttgaaagaggaggatttacttttcaaggtgacattcatggaaaagactttggaaaatttaagctagaaaggcaagatcctttaaacccagatcaagactcttccagtcattaccacggcaccagcagtggctctgtggcggctgccattctggttcctttctttgctctaattttatcagggtttgcattttacctctacaaacacagaacgagaccaaaagttcaatacaatggctatgctgggcatgaaaacagcaatggacaagcatcgtttgaaaaccccatgtatgatacaaacttaaaacccacagaagccaaggctgtgaggtttgacacaactctgaacacagtctgtacagtggtatagccctcagtgccccaacaggactgattcatagccatacctctgatggacaagcagtgattcctttggtgccatataccactctcccttccactctggctttactgcagcgatcttcaaccttgtctactggcataagtgcagcggggatctctactcaaatgtgtcagggtcttctacggatcaaactacacatgcgttttcattccaaaagtgggttctaaatgcctggctgcatctgtatgaaatcaaggcacactccaggaagactgccacgtcgcgccaacacgtcatactcaatgcctcagactttcatatttctgtgttgctgagatgcctttcaatgcaatcgtctgggctcgtggatatgtccctcaggtgcggtgacagaatggtggcaccacgatatgtgttctcttgtgttgtttttcctttttaaacccccatgaacacgaatactctgaaaaaaataaaaagctttctggaaga

SEQ ID NO: 227784 - DNA, 10938 bp, Artificial Sequence
  derived and/or modified sequence
ccttcctgcccggctcggccggcgctcgtccccggccccggccccgccagcccgggtctccgcgctcggagcagctcagccctgcagtggctcgggacccgatgctatgagagggaagcgagccgggcgcccagaccttcaggaggcgtcggatgcgcggcgggtcttgggaccgggctctctctccggctcgccttgccctcgggtgattatttggctccgctcatagccctgccttcctcggaggagccatcggtgtcgcgtgcgtgtggagtatctgcagacatgactgcgtggaggagattccagtcgctgctcctgcttctcgggctgctggtgctgtgcgcgaggctcctcactgcagcgaagggtcagaactgtggaggcttagtccagggtcccaatggcactattgagagcccagggtttcctcacgggtatccgaactatgccaactgcacctggatcatcatcacgggcgagcgcaataggatacagttgtccttccatacctttgctcttgaagaagattttgatattttatcagtttacgatggacagcctcaacaagggaatttaaaagtgagattatcgggatttcagctgccctcctctatagtgagtacaggatctatcctcactctgtggttcacgacagacttcgctgtgagtgcccaaggtttcaaagcattatatgaagttttacctagccacacttgtggaaatcctggagaaatcctgaaaggagttctgcatggaacgagattcaacataggagacaaaatccggtacagctgcctccctggctacatcttggaaggccacgccatcctgacctgcatcgtcagcccaggaaatggtgcatcgtgggacttcccagctcccttttgcagagctgagggagcctgcggaggaaccttacgcgggaccagcagctccatctccagcccgcacttcccttcagagtacgagaacaacgcggactgcacctggaccattctggctgagcccggggacaccattgcgctggtcttcactgactttcagctagaagaaggatatgatttcttagagatcagtggcacggaagctccatccatatggctaactggcatgaacctcccctctccagttatcagtagcaagaattggctacgactccatttcacctctgacagcaaccaccgacgcaaaggatttaacgctcagttccaagtgaaaaaggcgattgagttgaagtcaagaggagtcaagatgctgcccagcaaggatggaagccataaaaactctgtcttgagccaaggaggtgttgcattggtctctgacatgtgtccagatcctgggattccagaaaatggtagaagagcaggttccgacttcagtagggttggtgcaaatgtacagttttcatgtgaggacaattacgtgctccagggatctaaaagcatcacctgtcagagagttacagagacgctcgctgcttggagtgaccacaggcccatctgccgagcgagaacatgtggatccaatctgcgtgggcccagcggcgtcattacctcccctaattatccggttcagtatgaagataatgcacactgtgtgtgggtcatcaccaccaccgacccggacaaggtcatcaagcttgcctttgaagagtttgagctggagcgaggctatgacaccctgacggttggtgatgctgggaaggtgggagacaccagatcggtcttgtacgtgctcacgggatccagtgttcctgacctcattgtgagcatgagcaaccagatgtggctacatctgcagtcggatgatagcattggctcacctgggtttaaagctgtttaccaagaaattgaaaagggagggtgtggggatcctggaatccccgcctatgggaagcggacgggcagcagtttcctccatggagatacactcacctttgaatgcccggcggcctttgagctggtgggggagagagttatcacctgtcagcagaacaatcagtggtctggcaacaagcccagctgtgtattttcatgtttcttcaactttacggcatcatctgggattattctgtcaccaaattatccagaggaatatgggaacaacatgaactgtgtctggttgattatctcggagccaggaagtcgaattcacctaatctttaatgattttgatgttgagcctcagtttgactttctcgcggtcaaggatgatggcatttctgacataactgtcctgggtactttttctggcaatgaagtgccttcccagctggccagcagtgggcatatagttcgcttggaatttcagtctgaccattccactactggcagagggttcaacatcacttacaccacatttggtcagaatgagtgccatgatcctggcattcctataaacggacgacgttttggtgacaggtttctactcgggagctcggtttctttccactgtgatgatggctttgtcaagacccagggatccgagtccattacctgcatactgcaagacgggaacgtggtctggagctccaccgtgccccgctgtgaagctccatgtggtggacatctgacagcgtccagcggagtcattttgcctcctggatggccaggatattataaggattctttacattgtgaatggataattgaagcaaaaccaggccactctatcaaaataacttttgacagatttcagacagaggtcaattatgacaccttggaggtcagagatgggccagccagttcgtccccactgatcggcgagtaccacggcacccaggcaccccagttcctcatcagcaccgggaacttcatgtacctgctgttcaccactgacaacagccgctccagcatcggcttcctcatccactatgagagtgtgacgcttgagtcggattcctgcctggacccgggcatccctgtgaacggccatcgccacggtggagactttggcatcaggtccacagtgactttcagctgtgacccggggtacacactaagtgacgacgagcccctcgtctgtgagaggaaccaccagtggaaccacgccttgcccagctgcgacgctctatgtggaggctacatccaagggaagagtggaacagtcctttctcctgggtttccagatttttatccaaactctctaaactgcacgtggaccattgaagtgtctcatgggaaaggagttcaaatgatctttcacacctttcatcttgagagttcccacgactatttactgatcacagaggatggaagtttttccgagcccgttgccaggctcaccgggtcggtgttgcctcatacgatcaaggcaggcctgtttggaaacttcactgcccagcttcggtttatatcagacttctcaatttcgtacgagggcttcaatatcacattttcagaatatgacctggagccatgtgatgatcctggagtccctgccttcagccgaagaattggttttcactttggtgtgggagactctctgacgttttcctgcttcctgggatatcgtttagaaggtgccaccaagcttacctgcctgggtgggggccgccgtgtgtggagtgcacctctgccaaggtgtgtggccgaatgtggagcaagtgtcaaaggaaatgaaggaacattactgtctccaaattttccatccaattatgataataaccatgagtgtatctataaaatagaaacagaagccggcaagggcatccaccttagaacacgaagcttccagctgtttgaaggagatactctaaaggtatatgatggaaaagacagttcctcacgtccactgggcacgttcactaaaaatgaacttctggggctgatcctaaacagcacatccaatcacctgtggctagagttcaacaccaatggatctgacaccgaccaaggttttcaactcacctataccagttttgatctggtaaaatgtgaggatccgggcatccctaactacggctataggatccgtgatgaaggccactttaccgacactgtagttctgtacagttgcaacccggggtacgccatgcatggcagcaacaccctgacctgtttgagtggagacaggagagtgtgggacaaaccactaccttcgtgcatagcggaatgtggtggtcagatccatgcagccacatcaggacgaatattgtcccctggctatccagctccgtatgacaacaacctccactgcacctggattatagaggcagacccaggaaagaccattagcctccatttcattgttttcgacacggagatggctcacgacatcctcaaggtctgggacgggccggtggacagtgacatcctgctgaaggagtggagtggctccgcccttccggaggacatccacagcaccttcaactcactcaccctgcagttcgacagcgacttcttcatcagcaagtctggcttctccatccagttctccacctcaattgcagccacctgtaacgatccaggtatgccccaaaatggcacccgctatggagacagcagagaggctggagacaccgtcacattccagtgtgaccctggctatcagctccaaggacaagccaaaatcacctgtgtgcagctgaataaccggttcttttggcaaccagaccctcctacatgcatagctgcttgtggagggaatctgacgggcccagcaggtgttattttgtcacccaactacccacagccgtatcctcctgggaaggaatgtgactggagagtaaaagtgaacccggactttgtcatcgccttgatattcaaaagtttcaacatggagcccagctatgacttcctacacatctatgaaggggaagattccaacagccccctcattgggagttaccagggctctcaggccccagaaagaatagagagtagcggaaacagcctgtttctggcatttcggagtgatgcctccgtgggcctttcagggttcgccattgaatttaaagagaaaccacgggaagcttgttttgacccaggaaatataatgaatgggacaagagttggaacagacttcaagcttggctccaccatcacctaccagtgtgactctggctataagattcttgacccctcatccatcacctgtgtgattggggctgatgggaaaccctcctgggaccaagtgctgccctcctgcaatgctccctgtggaggccagtacacgggatcagaaggggtagttttatcaccaaactacccccataattacacagctggtcaaatatgcctctattccatcacggtaccaaaggaattcgtggtctttggacagtttgcctatttccagacagccctgaatgatttggcagaattatttgatggaacccatgcacaggccagacttctcagctcactctcggggtctcactcaggggaaacattgcccttggctacgtcaaatcaaattctgctccgattcagtgcaaagagcggtgcctctgcccgcggcttccacttcgtgtatcaagctgttcctcgtaccagtgacacccaatgcagctctgtccccgagcccagatacggaaggagaattggttctgagttttctgccggctccatcgtccgattcgagtgcaacccgggatacctgcttcagggttccacggcgctccactgccagtccgtgcccaacgccttggcacagtggaacgacacgatccccagctgtgtggtaccctgcagtggcaatttcactcaacgaagaggtacaatcctgtcccccggctaccctgagccatacggaaacaacttgaactgtatatggaagatcatagttacggagggctcgggaattcagatccaagtgatcagttttgccacggagcagaactgggactcccttgagatccacgatggtggggatgtgaccgcacccagactgggaagcttctcaggcaccacagtaccggcactgctgaacagtacttccaaccaactctacctgcatttccagtctgacattagtgtggcagctgctggtttccacctggaatacaaaactgtaggtcttgctgcatgccaagaaccagccctccccagcaacagcatcaaaatcggagatcggtacatggtgaacgacgtgctctccttccagtgcgagcccgggtacaccctgcagggccgttcccacatttcctgtatgccagggaccgttcgccgttggaactatccgtctcccctgtgcattgcaacctgtggagggacgctgagcaccttgggtggtgtgatcctgagccccggcttcccaggttcttaccccaacaacttagactgcacctggaggatctcattacccatcggctatggtgcacatattcagtttctgaatttttctaccgaagctaatcatgacttccttgaaattcaaaatggaccttaccacaccagccccatgattggacaatttagcggcacggatctccccgcggccctgctgagcacaacgcatgaaaccctcatccacttttatagtgaccattcgcaaaaccggcaaggatttaaacttgcttaccaagcctatgaattacagaactgtccagatccacccccatttcagaatgggtacatgatcaactcggattacagcgtggggcaatcagtatctttcgagtgttatcctgggtacattctaataggccatcctgtcctcacttgtcagcatgggatcaacagaaactggaactacccttttccaagatgtgatgccccttgtgggtacaacgtaacttctcagaacggcaccatctactcccctggctttcctgatgagtatccgatcctgaaggactgcatttggctcatcacggtgcctccagggcacggagtttacatcaacttcaccctgttacagacggaagctgtcaacgattacattgctgtttgggacggtcccgatcagaactcaccccagctgggagttttcagtggcaacacagccctcgaaacggcgtatagctccaccaaccaagtcctgctcaagttccacagcgacttttcaaatggaggcttctttgtcctcaatttccacgcatttcagctcaagaaatgtcaacctcccccagcggttccacaggcagaaatgcttactgaggatgatgatttcgaaataggagattttgtgaagtaccagtgccaccccgggtacaccttggtggggaccgacattctgacttgcaagctcagttcccagttgcagtttgagggttctctcccaacatgtgaagcacaatgcccagcaaatgaagtccggactggatcatcgggagtcattctcagtccagggtatccgggtaattattttaactcccagacttgctcttggagtattaaagtggaaccaaactacaacattaccatctttgtggacacatttcaaagtgaaaagcagtttgatgcactggaagtgtttgatggttcttctgggcaaagtcctctgctagtagtcttaagtgggaatcatactgaacaatcaaattttacaagcaggagtaatcagttatatctccgctggtccactgaccatgccaccagtaagaaaggattcaagattcgctatgcagcaccttactgcagtttgacccaccccctgaagaatgggggtattctaaacaggactgcaggagcggttggaagcaaagtgcattatttttgcaagcctggataccgaatggtcggccacagcaatgcaacctgtagacgaaacccacttggcatgtaccagtgggactccctcacgccactctgccaggctgtgtcctgtggaatcccagaatccccaggaaacggttcatttaccgggaacgagttcactttggacagtaaagtggtctatgaatgtcatgagggcttcaagcttgaatccagccagcaagcaacagccgtgtgtcaagaagatgggttgtggagtaacaaggggaagccgcccacgtgtaagccggtcgcttgccccagcattgaagctcagctctcagaacatgtcatctggaggctggtttcaggatccttgaatgagtacggtgctcaagtattgctgagctgcagtcctggttactacttagaaggctggaggctcctgcggtgccaggccaatgggacgtggaacataggagatgagaggccaagctgtcgagctggccactgcggttccccagacccgattgtgaacggtcacattagtggagatggcttcagttacagagacacggtggtttaccagtgcaatcctggtttccggcttgtgggaacttccgtgaggatatgcctgcaagaccacaagtggtctggacaaacgcctgtctgtgtccccatcacatgtggtcaccctggaaaccctgcccacggattcactaatggcagtgagttcaacctgaatgatgtcgtgaatttcacctgcaacacgggctatttgctgcagggcgtgtctcgagcccagtgtcggagcaacggccagtggagtagccctctgcccacgtgtcgagtggtgaactgttctgatccaggctttgtggaaaatgccattcgtcacgggcaacagaacttccctgagagttttgagtatggaatgagtatcctgtaccattgcaagaagggattttacttgctgggatcttcagccttgacctgtatggcaaatggcttatgggaccgatccctgcccaagtgtttggctatatcgtgtggacacccaggggtccctgccaacgccgtcctcactggagagctgtttacctatggcgccgtcgtgcactactcctgcagagggagcgagagcctcataggcaacgacacgagagtgtgccaggaagacagtcactggagcggggcactgccccactgcacaggaaataatcctggattctgtggtgatccggggaccccagcacatgggtctcggcttggtgatgactttaagacaaagagtcttctccgcttctcctgtgaaatggggcaccagctgaggggctcccctgaacgcacgtgtttgctcaatgggtcatggtcaggactgcagccggtgtgtgaggccgtgctgtgtcctcagccgccgccggtgcagaatggaacagtggagggaagtgatttccgctggggctccagcataagttacagctgcatggacggttaccagctctctcactccgccatcctctcctgtgaaggtcgcggggtgtggaaaggagagatcccccagtgtctccctgtgttctgcggagaccctggcatccccgcagaagggcgacttagtgggaaaagtttcacctataagtccgaagtcttcttccagtgcaaatctccatttatactcgtgggatcctccagaagagtctgccaagctgacggcacgtggagcggcatacaacccacctgcattgatcctgctcataacacctgcccagaccctggtacgccacactttggaatacagaatagctccagaggctatgaggttggaagcacggtttttttcaggtgcagaaaaggctaccatattcaaggttccacgactcgcacctgccttgccaatttaacatggagtgggatacagaccgaatgtatacctcatgcctgcagacagccagaaaccccggcacacgcggatgtgagagccatcgatcttcctactttcggctacaccttagtgtacacctgccatccaggctttttcctcgcagggggatctgagcacagaacatgtaaagcagacatgaaatggacaggaaagtcgcctgtgtgtaaaagtaaaggagtgagagaagttaatgaaacagttactaaaactccagttccttcagatgtctttttcgtcaattcactgtggaaggggtattatgaatatttagggaaaagacaacccgccactctaactgttgactggttcaatgcaacaagcagtaaggtgaatgccaccttcagcgaagcctcgccagtggagctgaagttgacaggcatttacaagaaggaggaggcccacttactcctgaaagcttttcaaattaaaggccaggcagatatttttgtaagcaagttcgaaaatgacaactggggactagatggttatgtgtcatctggacttgaaagaggaggatttacttttcaaggtgacattcatggaaaagactttggaaaatttaagctagaaaggcaagatcctttaaacccagatcaagactcttccagtcattaccacggcaccagcagtggctctgtggcggctgccattctggttcctttctttgctctaattttatcagggtttgcattttacctctacaaacacagaacgagaccaaaagttcaatacaatggctatgctgggcatgaaaacagcaatggacaagcatcgtttgaaaaccccatgtatgatacaaacttaaaacccacagaagccaaggctgtgaggtttgacacaactctgaacacagtctgtacagtggtatagccctcagtgccccaacaggactgattcatagccatacctctgatggacaagcagtgattcctttggtgccatataccactctcccttccactctggctttactgcagcgatcttcaaccttgtctactggcataagtgcagcggggatctctactcaaatgtgtcagggtcttctacggatcaaactacacatgcgttttcattccaaaagtgggttctaaatgcctggctgcatctgtatgaaatcaaggcacactccaggaagactgccacgtcgcgccaacacgtcatactcaatgcctcagactttcatatttctgtgttgctgagatgcctttcaatgcaatcgtctgggctcgtggatatgtccctcaggtgcggtgacagaatggtggcaccacgatatgtgttctcttgtgttgtttttcctttttaaacccccatgaacacgaatactctgaaaaaaataaaaagctttctggaaga

SEQ ID NO: 227785 - DNA, 11740 bp, Artificial Sequence
  derived and/or modified sequence
gactgcgccgtgcccagcctcggtcccctctctgtgggtaaggatggttgagtccagcctccacggcagcggctccttgtgccactagcagcccttcttctgcgctctccgccttttctctctagactggatctctcctcccccccgcgcccccctccccgcatctcccactcgctggctctctctccagctgcctcctctccaggtctctcctggctgcgcgcgctcctctccccgcttctccccctcccgcagcctcgccgccttggtgccttcctgcccggctcggccggcgctcgtccccggccccggccccgccagcccgggtctccgcgctcggagcagctcagccctgcagtggctcgggacccgatgctatgagagggaagcgagccgggcgcccagaccttcaggaggcgtcggatgcgcggcgggtcttgggaccgggctctctctccggctcgccttgccctcgggtgattatttggctccgctcatagccctgccttcctcggaggagccatcggtgtcgcgtgcgtgtggagtatctgcagacatgactgcgtggaggagattccagtcgctgctcctgcttctcgggctgctggtgctgtgcgcgaggctcctcactgcagcgaagggtcagaactgtggaggcttagtccagggtcccaatggcactattgagagcccagggtttcctcacgggtatccgaactatgccaactgcacctggatcatcatcacgggcgagcgcaataggatacagttgtccttccatacctttgctcttgaagaagattttgatattttatcagtttacgatggacagcctcaacaagggaatttaaaagtgagattatcgggatttcagctgccctcctctatagtgagtacaggatctatcctcactctgtggttcacgacagacttcgctgtgagtgcccaaggtttcaaagcattatatgaagttttacctagccacacttgtggaaatcctggagaaatcctgaaaggagttctgcatggaacgagattcaacataggagacaaaatccggtacagctgcctccctggctacatcttggaaggccacgccatcctgacctgcatcgtcagcccaggaaatggtgcatcgtgggacttcccagctcccttttgcagagctgagggagcctgcggaggaaccttacgcgggaccagcagctccatctccagcccgcacttcccttcagagtacgagaacaacgcggactgcacctggaccattctggctgagcccggggacaccattgcgctggtcttcactgactttcagctagaagaaggatatgatttcttagagatcagtggcacggaagctccatccatatggctaactggcatgaacctcccctctccagttatcagtagcaagaattggctacgactccatttcacctctgacagcaaccaccgacgcaaaggatttaacgctcagttccaagtgaaaaaggcgattgagttgaagtcaagaggagtcaagatgctgcccagcaaggatggaagccataaaaactctgtcttgagccaaggaggtgttgcattggtctctgacatgtgtccagatcctgggattccagaaaatggtagaagagcaggttccgacttcagtagggttggtgcaaatgtacagttttcatgtgaggacaattacgtgctccagggatctaaaagcatcacctgtcagagagttacagagacgctcgctgcttggagtgaccacaggcccatctgccgagcgagaacatgtggatccaatctgcgtgggcccagcggcgtcattacctcccctaattatccggttcagtatgaagataatgcacactgtgtgtgggtcatcaccaccaccgacccggacaaggtcatcaagcttgcctttgaagagtttgagctggagcgaggctatgacaccctgacggttggtgatgctgggaaggtgggagacaccagatcggtcttgtacgtgctcacgggatccagtgttcctgacctcattgtgagcatgagcaaccagatgtggctacatctgcagtcggatgatagcattggctcacctgggtttaaagctgtttaccaagaaattgaaaagggagggtgtggggatcctggaatccccgcctatgggaagcggacgggcagcagtttcctccatggagatacactcacctttgaatgcccggcggcctttgagctggtgggggagagagttatcacctgtcagcagaacaatcagtggtctggcaacaagcccagctgtgtattttcatgtttcttcaactttacggcatcatctgggattattctgtcaccaaattatccagaggaatatgggaacaacatgaactgtgtctggttgattatctcggagccaggaagtcgaattcacctaatctttaatgattttgatgttgagcctcagtttgactttctcgcggtcaaggatgatggcatttctgacataactgtcctgggtactttttctggcaatgaagtgccttcccagctggccagcagtgggcatatagttcgcttggaatttcagtctgaccattccactactggcagagggttcaacatcacttacaccacatttggtcagaatgagtgccatgatcctggcattcctataaacggacgacgttttggtgacaggtttctactcgggagctcggtttctttccactgtgatgatggctttgtcaagacccagggatccgagtccattacctgcatactgcaagacgggaacgtggtctggagctccaccgtgccccgctgtgaagctccatgtggtggacatctgacagcgtccagcggagtcattttgcctcctggatggccaggatattataaggattctttacattgtgaatggataattgaagcaaaaccaggccactctatcaaaataacttttgacagatttcagacagaggtcaattatgacaccttggaggtcagagatgggccagccagttcgtccccactgatcggcgagtaccacggcacccaggcaccccagttcctcatcagcaccgggaacttcatgtacctgctgttcaccactgacaacagccgctccagcatcggcttcctcatccactatgagagtgtgacgcttgagtcggattcctgcctggacccgggcatccctgtgaacggccatcgccacggtggagactttggcatcaggtccacagtgactttcagctgtgacccggggtacacactaagtgacgacgagcccctcgtctgtgagaggaaccaccagtggaaccacgccttgcccagctgcgacgctctatgtggaggctacatccaagggaagagtggaacagtcctttctcctgggtttccagatttttatccaaactctctaaactgcacgtggaccattgaagtgtctcatgggaaaggagttcaaatgatctttcacacctttcatcttgagagttcccacgactatttactgatcacagaggatggaagtttttccgagcccgttgccaggctcaccgggtcggtgttgcctcatacgatcaaggcaggcctgtttggaaacttcactgcccagcttcggtttatatcagacttctcaatttcgtacgagggcttcaatatcacattttcagaatatgacctggagccatgtgatgatcctggagtccctgccttcagccgaagaattggttttcactttggtgtgggagactctctgacgttttcctgcttcctgggatatcgtttagaaggtgccaccaagcttacctgcctgggtgggggccgccgtgtgtggagtgcacctctgccaaggtgtgtggccgaatgtggagcaagtgtcaaaggaaatgaaggaacattactgtctccaaattttccatccaattatgataataaccatgagtgtatctataaaatagaaacagaagccggcaagggcatccaccttagaacacgaagcttccagctgtttgaaggagatactctaaaggtatatgatggaaaagacagttcctcacgtccactgggcacgttcactaaaaatgaacttctggggctgatcctaaacagcacatccaatcacctgtggctagagttcaacaccaatggatctgacaccgaccaaggttttcaactcacctataccagttttgatctggtaaaatgtgaggatccgggcatccctaactacggctataggatccgtgatgaaggccactttaccgacactgtagttctgtacagttgcaacccggggtacgccatgcatggcagcaacaccctgacctgtttgagtggagacaggagagtgtgggacaaaccactaccttcgtgcatagcggaatgtggtggtcagatccatgcagccacatcaggacgaatattgtcccctggctatccagctccgtatgacaacaacctccactgcacctggattatagaggcagacccaggaaagaccattagcctccatttcattgttttcgacacggagatggctcacgacatcctcaaggtctgggacgggccggtggacagtgacatcctgctgaaggagtggagtggctccgcccttccggaggacatccacagcaccttcaactcactcaccctgcagttcgacagcgacttcttcatcagcaagtctggcttctccatccagttctccacctcaattgcagccacctgtaacgatccaggtatgccccaaaatggcacccgctatggagacagcagagaggctggagacaccgtcacattccagtgtgaccctggctatcagctccaaggacaagccaaaatcacctgtgtgcagctgaataaccggttcttttggcaaccagaccctcctacatgcatagctgcttgtggagggaatctgacgggcccagcaggtgttattttgtcacccaactacccacagccgtatcctcctgggaaggaatgtgactggagagtaaaagtgaacccggactttgtcatcgccttgatattcaaaagtttcaacatggagcccagctatgacttcctacacatctatgaaggggaagattccaacagccccctcattgggagttaccagggctctcaggccccagaaagaatagagagtagcggaaacagcctgtttctggcatttcggagtgatgcctccgtgggcctttcagggttcgccattgaatttaaagagaaaccacgggaagcttgttttgacccaggaaatataatgaatgggacaagagttggaacagacttcaagcttggctccaccatcacctaccagtgtgactctggctataagattcttgacccctcatccatcacctgtgtgattggggctgatgggaaaccctcctgggaccaagtgctgccctcctgcaatgctccctgtggaggccagtacacgggatcagaaggggtagttttatcaccaaactacccccataattacacagctggtcaaatatgcctctattccatcacggtaccaaaggaattcgtggtctttggacagtttgcctatttccagacagccctgaatgatttggcagaattatttgatggaacccatgcacaggccagacttctcagctcactctcggggtctcactcaggggaaacattgcccttggctacgtcaaatcaaattctgctccgattcagtgcaaagagcggtgcctctgcccgcggcttccacttcgtgtatcaagctgttcctcgtaccagtgacacccaatgcagctctgtccccgagcccagatacggaaggagaattggttctgagttttctgccggctccatcgtccgattcgagtgcaacccgggatacctgcttcagggttccacggcgctccactgccagtccgtgcccaacgccttggcacagtggaacgacacgatccccagctgtgtggtaccctgcagtggcaatttcactcaacgaagaggtacaatcctgtcccccggctaccctgagccatacggaaacaacttgaactgtatatggaagatcatagttacggagggctcgggaattcagatccaagtgatcagttttgccacggagcagaactgggactcccttgagatccacgatggtggggatgtgaccgcacccagactgggaagcttctcaggcaccacagtaccggcactgctgaacagtacttccaaccaactctacctgcatttccagtctgacattagtgtggcagctgctggtttccacctggaatacaaaactgtaggtcttgctgcatgccaagaaccagccctccccagcaacagcatcaaaatcggagatcggtacatggtgaacgacgtgctctccttccagtgcgagcccgggtacaccctgcagggccgttcccacatttcctgtatgccagggaccgttcgccgttggaactatccgtctcccctgtgcattgcaacctgtggagggacgctgagcaccttgggtggtgtgatcctgagccccggcttcccaggttcttaccccaacaacttagactgcacctggaggatctcattacccatcggctatggtgcacatattcagtttctgaatttttctaccgaagctaatcatgacttccttgaaattcaaaatggaccttaccacaccagccccatgattggacaatttagcggcacggatctccccgcggccctgctgagcacaacgcatgaaaccctcatccacttttatagtgaccattcgcaaaaccggcaaggatttaaacttgcttaccaagcctatgaattacagaactgtccagatccacccccatttcagaatgggtacatgatcaactcggattacagcgtggggcaatcagtatctttcgagtgttatcctgggtacattctaataggccatcctgtcctcacttgtcagcatgggatcaacagaaactggaactacccttttccaagatgtgatgccccttgtgggtacaacgtaacttctcagaacggcaccatctactcccctggctttcctgatgagtatccgatcctgaaggactgcatttggctcatcacggtgcctccagggcacggagtttacatcaacttcaccctgttacagacggaagctgtcaacgattacattgctgtttgggacggtcccgatcagaactcaccccagctgggagttttcagtggcaacacagccctcgaaacggcgtatagctccaccaaccaagtcctgctcaagttccacagcgacttttcaaatggaggcttctttgtcctcaatttccacgcatttcagctcaagaaatgtcaacctcccccagcggttccacaggcagaaatgcttactgaggatgatgatttcgaaataggagattttgtgaagtaccagtgccaccccgggtacaccttggtggggaccgacattctgacttgcaagctcagttcccagttgcagtttgagggttctctcccaacatgtgaagcacaatgcccagcaaatgaagtccggactggatcatcgggagtcattctcagtccagggtatccgggtaattattttaactcccagacttgctcttggagtattaaagtggaaccaaactacaacattaccatctttgtggacacatttcaaagtgaaaagcagtttgatgcactggaagtgtttgatggttcttctgggcaaagtcctctgctagtagtcttaagtgggaatcatactgaacaatcaaattttacaagcaggagtaatcagttatatctccgctggtccactgaccatgccaccagtaagaaaggattcaagattcgctatgcagcaccttactgcagtttgacccaccccctgaagaatgggggtattctaaacaggactgcaggagcggttggaagcaaagtgcattatttttgcaagcctggataccgaatggtcggccacagcaatgcaacctgtagacgaaacccacttggcatgtaccagtgggactccctcacgccactctgccaggctgtgtcctgtggaatcccagaatccccaggaaacggttcatttaccgggaacgagttcactttggacagtaaagtggtctatgaatgtcatgagggcttcaagcttgaatccagccagcaagcaacagccgtgtgtcaagaagatgggttgtggagtaacaaggggaagccgcccacgtgtaagccggtcgcttgccccagcattgaagctcagctctcagaacatgtcatctggaggctggtttcaggatccttgaatgagtacggtgctcaagtattgctgagctgcagtcctggttactacttagaaggctggaggctcctgcggtgccaggccaatgggacgtggaacataggagatgagaggccaagctgtcgagttatctcgtgtggaagcctttcctttcccccaaatggcaacaagattggaacgttgacagtttatggggccacagctatatttacgtgcaacaccggctacacgcttgtggggtctcatgtcagagagtgcttggcaaatgggctctggagcggcagcgaaactcgatgtctggctggccactgcggttccccagacccgattgtgaacggtcacattagtggagatggcttcagttacagagacacggtggtttaccagtgcaatcctggtttccggcttgtgggaacttccgtgaggatatgcctgcaagaccacaagtggtctggacaaacgcctgtctgtgtccccatcacatgtggtcaccctggaaaccctgcccacggattcactaatggcagtgagttcaacctgaatgatgtcgtgaatttcacctgcaacacgggctatttgctgcagggcgtgtctcgagcccagtgtcggagcaacggccagtggagtagccctctgcccacgtgtcgagtggtgaactgttctgatccaggctttgtggaaaatgccattcgtcacgggcaacagaacttccctgagagttttgagtatggaatgagtatcctgtaccattgcaagaagggattttacttgctgggatcttcagccttgacctgtatggcaaatggcttatgggaccgatccctgcccaagtgtttggctatatcgtgtggacacccaggggtccctgccaacgccgtcctcactggagagctgtttacctatggcgccgtcgtgcactactcctgcagagggagcgagagcctcataggcaacgacacgagagtgtgccaggaagacagtcactggagcggggcactgccccactgcacaggaaataatcctggattctgtggtgatccggggaccccagcacatgggtctcggcttggtgatgactttaagacaaagagtcttctccgcttctcctgtgaaatggggcaccagctgaggggctcccctgaacgcacgtgtttgctcaatgggtcatggtcaggactgcagccggtgtgtgaggccgtgtcctgtggcaaccctggcacacccaccaacggaatgattgtcagtagtgatggcattctgttctccagctcggtcatctatgcctgctgggaaggctacaagacctcagggctcatgacacggcattgcacagccaatgggacctggacaggcactgctcccgactgcacaattataagttgtggggatccaggcacactagcaaatggcatccagtttgggaccgacttcaccttcaacaagactgtgagctatcagtgtaacccaggctatgtcatggaagcagtcacatccgccactattcgctgtaccaaagacggcaggtggaatccgagcaaacctgtctgcaaagccgtgctgtgtcctcagccgccgccggtgcagaatggaacagtggagggaagtgatttccgctggggctccagcataagttacagctgcatggacggttaccagctctctcactccgccatcctctcctgtgaaggtcgcggggtgtggaaaggagagatcccccagtgtctccctgtgttctgcggagaccctggcatccccgcagaagggcgacttagtgggaaaagtttcacctataagtccgaagtcttcttccagtgcaaatctccatttatactcgtgggatcctccagaagagtctgccaagctgacggcacgtggagcggcatacaacccacctgcattgatcctgctcataacacctgcccagaccctggtacgccacactttggaatacagaatagctccagaggctatgaggttggaagcacggtttttttcaggtgcagaaaaggctaccatattcaaggttccacgactcgcacctgccttgccaatttaacatggagtgggatacagaccgaatgtatacctcatgcctgcagacagccagaaaccccggcacacgcggatgtgagagccatcgatcttcctactttcggctacaccttagtgtacacctgccatccaggctttttcctcgcagggggatctgagcacagaacatgtaaagcagacatgaaatggacaggaaagtcgcctgtgtgtaaaagtaaaggagtgagagaagttaatgaaacagttactaaaactccagttccttcagatgtctttttcgtcaattcactgtggaaggggtattatgaatatttagggaaaagacaacccgccactctaactgttgactggttcaatgcaacaagcagtaaggtgaatgccaccttcagcgaagcctcgccagtggagctgaagttgacaggcatttacaagaaggaggaggcccacttactcctgaaagcttttcaaattaaaggccaggcagatatttttgtaagcaagttcgaaaatgacaactggggactagatggttatgtgtcatctggacttgaaagaggaggatttacttttcaaggtgacattcatggaaaagactttggaaaatttaagctagaaaggcaagatcctttaaacccagatcaagactcttccagtcattaccacggcaccagcagtggctctgtggcggctgccattctggttcctttctttgctctaattttatcagggtttgcattttacctctacaaacacagaacgagaccaaaagttcaatacaatggctatgctgggcatgaaaacagcaatggacaagcatcgtttgaaaaccccatgtatgatacaaacttaaaacccacagaagccaaggctgtgaggtttgacacaactctgaacacagtctgtacagtggtatagccctcagtgccccaacaggactgattcatagccatacctctgatggacaagcagtgattcctttggtgccatataccactctcccttccactctggctttactgcagcgatcttcaaccttgtctactggcataagtgcagcggggatctctactcaaatgtgtcagggtcttctacggatcaaactacacatgcgttttcattccaaaagtgggttctaaatgcctggctgcatctgtatgaaatcaaggcacactccaggaagactgccacgtcgcgccaacacgtcatactcaatgcctcagactttcatatttctgtgttgctgagatgcctttcaatgcaatcgtctgggctcgtggatatgtccctcaggtgcggtgacagaatggtggcaccacgatatgtgttctcttgtgttgtttttcctttttaaacccccatgaacacgaatactctgaaaaaaataaaaagctttctggaaga

SEQ ID NO: 227786 - DNA, 10695 bp, Artificial Sequence
  derived and/or modified sequence
atgactgcgtggaggagattccagtcgctgctcctgcttctcgggctgctggtgctgtgcgcgaggctcctcactgcagcgaagggtcagaactgtggaggcttagtccagggtcccaatggcactattgagagcccagggtttcctcacgggtatccgaactatgccaactgcacctggatcatcatcacgggcgagcgcaataggatacagttgtccttccatacctttgctcttgaagaagattttgatattttatcagtttacgatggacagcctcaacaagggaatttaaaagtgagattatcgggatttcagctgccctcctctatagtgagtacaggatctatcctcactctgtggttcacgacagacttcgctgtgagtgcccaaggtttcaaagcattatatgaagttttacctagccacacttgtggaaatcctggagaaatcctgaaaggagttctgcatggaacgagattcaacataggagacaaaatccggtacagctgcctccctggctacatcttggaaggccacgccatcctgacctgcatcgtcagcccaggaaatggtgcatcgtgggacttcccagctcccttttgcagagctgagggagcctgcggaggaaccttacgcgggaccagcagctccatctccagcccgcacttcccttcagagtacgagaacaacgcggactgcacctggaccattctggctgagcccggggacaccattgcgctggtcttcactgactttcagctagaagaaggatatgatttcttagagatcagtggcacggaagctccatccatatggctaactggcatgaacctcccctctccagttatcagtagcaagaattggctacgactccatttcacctctgacagcaaccaccgacgcaaaggatttaacgctcagttccaagtgaaaaaggcgattgagttgaagtcaagaggagtcaagatgctgcccagcaaggatggaagccataaaaactctgtcttgagccaaggaggtgttgcattggtctctgacatgtgtccagatcctgggattccagaaaatggtagaagagcaggttccgacttcagggttggtgcaaatgtacagttttcatgtgaggacaattacgtgctccagggatctaaaagcatcacctgtcagagagttacagagacgctcgctgcttggagtgaccacaggcccatctgccgagcgagaacatgtggatccaatctgcgtgggcccagcggcgtcattacctcccctaattatccggttcagtatgaagataatgcacactgtgtgtgggtcatcaccaccaccgacccggacaaggtcatcaagcttgcctttgaagagtttgagctggagcgaggctatgacaccctgacggttggtgatgctgggaaggtgggagacaccagatcggtcttgtacgtgctcacgggatccagtgttcctgacctcattgtgagcatgagcaaccagatgtggctacatctgcagtcggatgatagcattggctcacctgggtttaaagctgtttaccaagaaattgaaaagggagggtgtggggatcctggaatccccgcctatgggaagcggacgggcagcagtttcctccatggagatacactcacctttgaatgcccggcggcctttgagctggtgggggagagagttatcacctgtcagcagaacaatcagtggtctggcaacaagcccagctgtgtattttcatgtttcttcaactttacggcatcatctgggattattctgtcaccaaattatccagaggaatatgggaacaacatgaactgtgtctggttgattatctcggagccaggaagtcgaattcacctaatctttaatgattttgatgttgagcctcagtttgactttctcgcggtcaaggatgatggcatttctgacataactgtcctgggtactttttctggcaatgaagtgccttcccagctggccagcagtgggcatatagttcgcttggaatttcagtctgaccattccactactggcagagggttcaacatcacttacaccacatttggtcagaatgagtgccatgatcctggcattcctataaacggacgacgttttggtgacaggtttctactcgggagctcggtttctttccactgtgatgatggctttgtcaagacccagggatccgagtccattacctgcatactgcaagacgggaacgtggtctggagctccaccgtgccccgctgtgaagctccatgtggtggacatctgacagcgtccagcggagtcattttgcctcctggatggccaggatattataaggattctttacattgtgaatggataattgaagcaaaaccaggccactctatcaaaataacttttgacagatttcagacagaggtcaattatgacaccttggaggtcagagatgggccagccagttcgtccccactgatcggcgagtaccacggcacccaggcaccccagttcctcatcagcaccgggaacttcatgtacctgctgttcaccactgacaacagccgctccagcatcggcttcctcatccactatgagagtgtgacgcttgagtcggattcctgcctggacccgggcatccctgtgaacggccatcgccacggtggagactttggcatcaggtccacagtgactttcagctgtgacccggggtacacactaagtgacgacgagcccctcgtctgtgagaggaaccaccagtggaaccacgccttgcccagctgcgacgctctatgtggaggctacatccaagggaagagtggaacagtcctttctcctgggtttccagatttttatccaaactctctaaactgcacgtggaccattgaagtgtctcatgggaaaggagttcaaatgatctttcacacctttcatcttgagagttcccacgactatttactgatcacagaggatggaagtttttccgagcccgttgccaggctcaccgggtcggtgttgcctcatacgatcaaggcaggcctgtttggaaacttcactgcccagcttcggtttatatcagacttctcaatttcgtacgagggcttcaatatcacattttcagaatatgacctggagccatgtgatgatcctggagtccctgccttcagccgaagaattggttttcactttggtgtgggagactctctgacgttttcctgcttcctgggatatcgtttagaaggtgccaccaagcttacctgcctgggtgggggccgccgtgtgtggagtgcacctctgccaaggtgtgtggccgaatgtggagcaagtgtcaaaggaaatgaaggaacattactgtctccaaattttccatccaattatgataataaccatgagtgtatctataaaatagaaacagaagccggcaagggcatccaccttagaacacgaagcttccagctgtttgaaggagatactctaaaggtatatgatggaaaagacagttcctcacgtccactgggcacgttcactaaaaatgaacttctggggctgatcctaaacagcacatccaatcacctgtggctagagttcaacaccaatggatctgacaccgaccaaggttttcaactcacctataccagttttgatctggtaaaatgtgaggatccgggcatccctaactacggctataggatccgtgatgaaggccactttaccgacactgtagttctgtacagttgcaacccggggtacgccatgcatggcagcaacaccctgacctgtttgagtggagacaggagagtgtgggacaaaccactaccttcgtgcatagcggaatgtggtggtcagatccatgcagccacatcaggacgaatattgtcccctggctatccagctccgtatgacaacaacctccactgcacctggattatagaggcagacccaggaaagaccattagcctccatttcattgttttcgacacggagatggctcacgacatcctcaaggtctgggacgggccggtggacagtgacatcctgctgaaggagtggagtggctccgcccttccggaggacatccacagcaccttcaactcactcaccctgcagttcgacagcgacttcttcatcagcaagtctggcttctccatccagttctccacctcaattgcagccacctgtaacgatccaggtatgccccaaaatggcacccgctatggagacagcagagaggctggagacaccgtcacattccagtgtgaccctggctatcagctccaaggacaagccaaaatcacctgtgtgcagctgaataaccggttcttttggcaaccagaccctcctacatgcatagctgcttgtggagggaatctgacgggcccagcaggtgttattttgtcacccaactacccacagccgtatcctcctgggaaggaatgtgactggagagtaaaagtgaacccggactttgtcatcgccttgatattcaaaagtttcaacatggagcccagctatgacttcctacacatctatgaaggggaagattccaacagccccctcattgggagttaccagggctctcaggccccagaaagaatagagagtagcggaaacagcctgtttctggcatttcggagtgatgcctccgtgggcctttcagggttcgccattgaatttaaagagaaaccacgggaagcttgttttgacccaggaaatataatgaatgggacaagagttggaacagacttcaagcttggctccaccatcacctaccagtgtgactctggctataagattcttgacccctcatccatcacctgtgtgattggggctgatgggaaaccctcctgggaccaagtgctgccctcctgcaatgctccctgtggaggccagtacacgggatcagaaggggtagttttatcaccaaactacccccataattacacagctggtcaaatatgcctctattccatcacggtaccaaaggaattcgtggtctttggacagtttgcctatttccagacagccctgaatgatttggcagaattatttgatggaacccatgcacaggccagacttctcagctcactctcggggtctcactcaggggaaacattgcccttggctacgtcaaatcaaattctgctccgattcagtgcaaagagcggtgcctctgcccgcggcttccacttcgtgtatcaagctgttcctcgtaccagtgacacccaatgcagctctgtccccgagcccagatacggaaggagaattggttctgagttttctgccggctccatcgtccgattcgagtgcaacccgggatacctgcttcagggttccacggcgctccactgccagtccgtgcccaacgccttggcacagtggaacgacacgatccccagctgtgtggtaccctgcagtggcaatttcactcaacgaagaggtacaatcctgtcccccggctaccctgagccatacggaaacaacttgaactgtatatggaagatcatagttacggagggctcgggaattcagatccaagtgatcagttttgccacggagcagaactgggactcccttgagatccacgatggtggggatgtgaccgcacccagactgggaagcttctcaggcaccacagtaccggcactgctgaacagtacttccaaccaactctacctgcatttccagtctgacattagtgtggcagctgctggtttccacctggaatacaaaactgtaggtcttgctgcatgccaagaaccagccctccccagcaacagcatcaaaatcggagatcggtacatggtgaacgacgtgctctccttccagtgcgagcccgggtacaccctgcagggccgttcccacatttcctgtatgccagggaccgttcgccgttggaactatccgtctcccctgtgcattgcaacctgtggagggacgctgagcaccttgggtggtgtgatcctgagccccggcttcccaggttcttaccccaacaacttagactgcacctggaggatctcattacccatcggctatggtgcacatattcagtttctgaatttttctaccgaagctaatcatgacttccttgaaattcaaaatggaccttaccacaccagccccatgattggacaatttagcggcacggatctccccgcggccctgctgagcacaacgcatgaaaccctcatccacttttatagtgaccattcgcaaaaccggcaaggatttaaacttgcttaccaagcctatgaattacagaactgtccagatccacccccatttcagaatgggtacatgatcaactcggattacagcgtggggcaatcagtatctttcgagtgttatcctgggtacattctaataggccatcctgtcctcacttgtcagcatgggatcaacagaaactggaactacccttttccaagatgtgatgccccttgtgggtacaacgtaacttctcagaacggcaccatctactcccctggctttcctgatgagtatccgatcctgaaggactgcatttggctcatcacggtgcctccagggcacggagtttacatcaacttcaccctgttacagacggaagctgtcaacgattacattgctgtttgggacggtcccgatcagaactcaccccagctgggagttttcagtggcaacacagccctcgaaacggcgtatagctccaccaaccaagtcctgctcaagttccacagcgacttttcaaatggaggcttctttgtcctcaatttccacgcatttcagctcaagaaatgtcaacctcccccagcggttccacaggcagaaatgcttactgaggatgatgatttcgaaataggagattttgtgaagtaccagtgccaccccgggtacaccttggtggggaccgacattctgacttgcaagctcagttcccagttgcagtttgagggttctctcccaacatgtgaagcacaatgcccagcaaatgaagtccggactggatcatcgggagtcattctcagtccagggtatccgggtaattattttaactcccagacttgctcttggagtattaaagtggaaccaaactacaacattaccatctttgtggacacatttcaaagtgaaaagcagtttgatgcactggaagtgtttgatggttcttctgggcaaagtcctctgctagtagtcttaagtgggaatcatactgaacaatcaaattttacaagcaggagtaatcagttatatctccgctggtccactgaccatgccaccagtaagaaaggattcaagattcgctatgcagcaccttactgcagtttgacccaccccctgaagaatgggggtattctaaacaggactgcaggagcggttggaagcaaagtgcattatttttgcaagcctggataccgaatggtcggccacagcaatgcaacctgtagacgaaacccacttggcatgtaccagtgggactccctcacgccactctgccaggctgtgtcctgtggaatcccagaatccccaggaaacggttcatttaccgggaacgagttcactttggacagtaaagtggtctatgaatgtcatgagggcttcaagcttgaatccagccagcaagcaacagccgtgtgtcaagaagatgggttgtggagtaacaaggggaagccgcccacgtgtaagccggtcgcttgccccagcattgaagctcagctctcagaacatgtcatctggaggctggtttcaggatccttgaatgagtacggtgctcaagtattgctgagctgcagtcctggttactacttagaaggctggaggctcctgcggtgccaggccaatgggacgtggaacataggagatgagaggccaagctgtcgagttatctcgtgtggaagcctttcctttcccccaaatggcaacaagattggaacgttgacagtttatggggccacagctatatttacgtgcaacaccggctacacgcttgtggggtctcatgtcagagagtgcttggcaaatgggctctggagcggcagcgaaactcgatgtctggctggccactgcggttccccagacccgattgtgaacggtcacattagtggagatggcttcagttacagagacacggtggtttaccagtgcaatcctggtttccggcttgtgggaacttccgtgaggatatgcctgcaagaccacaagtggtctggacaaacgcctgtctgtgtccccatcacatgtggtcaccctggaaaccctgcccacggattcactaatggcagtgagttcaacctgaatgatgtcgtgaatttcacctgcaacacgggctatttgctgcagggcgtgtctcgagcccagtgtcggagcaacggccagtggagtagccctctgcccacgtgtcgagtggtgaactgttctgatccaggctttgtggaaaatgccattcgtcacgggcaacagaacttccctgagagttttgagtatggaatgagtatcctgtaccattgcaagaagggattttacttgctgggatcttcagccttgacctgtatggcaaatggcttatgggaccgatccctgcccaagtgtttggctatatcgtgtggacacccaggggtccctgccaacgccgtcctcactggagagctgtttacctatggcgccgtcgtgcactactcctgcagagggagcgagagcctcataggcaacgacacgagagtgtgccaggaagacagtcactggagcggggcactgccccactgcacaggaaataatcctggattctgtggtgatccggggaccccagcacatgggtctcggcttggtgatgactttaagacaaagagtcttctccgcttctcctgtgaaatggggcaccagctgaggggctcccctgaacgcacgtgtttgctcaatgggtcatggtcaggactgcagccggtgtgtgaggccgtgtcctgtggcaaccctggcacacccaccaacggaatgattgtcagtagtgatggcattctgttctccagctcggtcatctatgcctgctgggaaggctacaagacctcagggctcatgacacggcattgcacagccaatgggacctggacaggcactgctcccgactgcacaattataagttgtggggatccaggcacactagcaaatggcatccagtttgggaccgacttcaccttcaacaagactgtgagctatcagtgtaacccaggctatgtcatggaagcagtcacatccgccactattcgctgtaccaaagacggcaggtggaatccgagcaaacctgtctgcaaagccgtgctgtgtcctcagccgccgccggtgcagaatggaacagtggagggaagtgatttccgctggggctccagcataagttacagctgcatggacggttaccagctctctcactccgccatcctctcctgtgaaggtcgcggggtgtggaaaggagagatcccccagtgtctccctgtgttctgcggagaccctggcatccccgcagaagggcgacttagtgggaaaagtttcacctataagtccgaagtcttcttccagtgcaaatctccatttatactcgtgggatcctccagaagagtctgccaagctgacggcacgtggagcggcatacaacccacctgcattgatcctgctcataacacctgcccagaccctggtacgccacactttggaatacagaatagctccagaggctatgaggttggaagcacggtttttttcaggtgcagaaaaggctaccatattcaaggttccacgactcgcacctgccttgccaatttaacatggagtgggatacagaccgaatgtatacctcatgcctgcagacagccagaaaccccggcacacgcggatgtgagagccatcgatcttcctactttcggctacaccttagtgtacacctgccatccaggctttttcctcgcagggggatctgagcacagaacatgtaaagcagacatgaaatggacaggaaagtcgcctgtgtgtaaaagtaaaggagtgagagaagttaatgaaacagttactaaaactccagttccttcagatgtctttttcgtcaattcactgtggaaggggtattatgaatatttagggaaaagacaacccgccactctaactgttgactggttcaatgcaacaagcagtaaggtgaatgccaccttcagcgaagcctcgccagtggagctgaagttgacaggcatttacaagaaggaggaggcccacttactcctgaaagcttttcaaattaaaggccaggcagatatttttgtaagcaagttcgaaaatgacaactggggactagatggttatgtgtcatctggacttgaaagaggaggatttacttttcaaggtgacattcatggaaaagactttggaaaatttaagctagaaaggcaagatcctttaaacccagatcaagactcttccagtcattaccacggcaccagcagtggctctgtggcggctgccattctggttcctttctttgctctaattttatcagggtttgcattttacctctacaaacacagaacgagaccaaaagttcaatacaatggctatgctgggcatgaaaacagcaatggacaagcatcgtttgaaaaccccatgtatgatacaaacttaaaacccacagaagccaaggctgtgaggtttgacacaactctgaacacagtctgtacagtggtatag

SEQ ID NO: 227787 - DNA, 6330 bp, Artificial Sequence
  derived and/or modified sequence
atgactgcgtggaggagattccagtcgctgctcctgcttctcgggctgctggtgctgtgcgcgaggctcctcactgcagcgaagggtcagaactgtggaggcttagtccagggtcccaatggcactattgagagcccagggtttcctcacgggtatccgaactatgccaactgcacctggatcatcatcacgggcgagcgcaataggatacagttgtccttccatacctttgctcttgaagaagattttgatattttatcagtttacgatggacagcctcaacaagggaatttaaaagtgagattatcgggatttcagctgccctcctctatagtgagtacaggatctatcctcactctgtggttcacgacagacttcgctgtgagtgcccaaggtttcaaagcattatatgaagttttacctagccacacttgtggaaatcctggagaaatcctgaaaggagttctgcatggaacgagattcaacataggagacaaaatccggtacagctgcctccctggctacatcttggaaggccacgccatcctgacctgcatcgtcagcccaggaaatggtgcatcgtgggacttcccagctcccttttgcagagctgagggagcctgcggaggaaccttacgcgggaccagcagctccatctccagcccgcacttcccttcagagtacgagaacaacgcggactgcacctggaccattctggctgagcccggggacaccattgcgctggtcttcactgactttcagctagaagaaggatatgatttcttagagatcagtggcacggaagctccatccatatggctaactggcatgaacctcccctctccagttatcagtagcaagaattggctacgactccatttcacctctgacagcaaccaccgacgcaaaggatttaacgctcagttccaagtgaaaaaggcgattgagttgaagtcaagaggagtcaagatgctgcccagcaaggatggaagccataaaaactctgtcttgagccaaggaggtgttgcattggtctctgacatgtgtccagatcctgggattccagaaaatggtagaagagcaggttccgacttcagggttggtgcaaatgtacagttttcatgtgaggacaattacgtgctccagggatctaaaagcatcacctgtcagagagttacagagacgctcgctgcttggagtgaccacaggcccatctgccgagcgagaacatgtggatccaatctgcgtgggcccagcggcgtcattacctcccctaattatccggttcagtatgaagataatgcacactgtgtgtgggtcatcaccaccaccgacccggacaaggtcatcaagcttgcctttgaagagtttgagctggagcgaggctatgacaccctgacggttggtgatgctgggaaggtgggagacaccagatcggtcttgtacgtgctcacgggatccagtgttcctgacctcattgtgagcatgagcaaccagatgtggctacatctgcagtcggatgatagcattggctcacctgggtttaaagctgtttaccaagaaattgaaaagggagggtgtggggatcctggaatccccgcctatgggaagcggacgggcagcagtttcctccatggagatacactcacctttgaatgcccggcggcctttgagctggtgggggagagagttatcacctgtcagcagaacaatcagtggtctggcaacaagcccagctgtgtattttcatgtttcttcaactttacggcatcatctgggattattctgtcaccaaattatccagaggaatatgggaacaacatgaactgtgtctggttgattatctcggagccaggaagtcgaattcacctaatctttaatgattttgatgttgagcctcagtttgactttctcgcggtcaaggatgatggcatttctgacataactgtcctgggtactttttctggcaatgaagtgccttcccagctggccagcagtgggcatatagttcgcttggaatttcagtctgaccattccactactggcagagggttcaacatcacttacaccacatttggtcagaatgagtgccatgatcctggcattcctataaacggacgacgttttggtgacaggtttctactcgggagctcggtttctttccactgtgatgatggctttgtcaagacccagggatccgagtccattacctgcatactgcaagacgggaacgtggtctggagctccaccgtgccccgctgtgaagctccatgtggtggacatctgacagcgtccagcggagtcattttgcctcctggatggccaggatattataaggattctttacattgtgaatggataattgaagcaaaaccaggccactctatcaaaataacttttgacagatttcagacagaggtcaattatgacaccttggaggtcagagatgggccagccagttcgtccccactgatcggcgagtaccacggcacccaggcaccccagttcctcatcagcaccgggaacttcatgtacctgctgttcaccactgacaacagccgctccagcatcggcttcctcatccactatgagagtgtgacgcttgagtcggattcctgcctggacccgggcatccctgtgaacggccatcgccacggtggagactttggcatcaggtccacagtgactttcagctgtgacccggggtacacactaagtgacgacgagcccctcgtctgtgagaggaaccaccagtggaaccacgccttgcccagctgcgacgctctatgtggaggctacatccaagggaagagtggaacagtcctttctcctgggtttccagatttttatccaaactctctaaactgcacgtggaccattgaagtgtctcatgggaaaggagttcaaatgatctttcacacctttcatcttgagagttcccacgactatttactgatcacagaggatggaagtttttccgagcccgttgccaggctcaccgggtcggtgttgcctcatacgatcaaggcaggcctgtttggaaacttcactgcccagcttcggtttatatcagacttctcaatttcgtacgagggcttcaatatcacattttcagaatatgacctggagccatgtgatgatcctggagtccctgccttcagccgaagaattggttttcactttggtgtgggagactctctgacgttttcctgcttcctgggatatcgtttagaaggtgccaccaagcttacctgcctgggtgggggccgccgtgtgtggagtgcacctctgccaaggtgtgtggccgaatgtggagcaagtgtcaaaggaaatgaaggaacattactgtctccaaattttccatccaattatgataataaccatgagtgtatctataaaatagaaacagaagccggcaagggcatccaccttagaacacgaagcttccagctgtttgaaggagatactctaaaggtatatgatggaaaagacagttcctcacgtccactgggcacgttcactaaaaatgaacttctggggctgatcctaaacagcacatccaatcacctgtggctagagttcaacaccaatggatctgacaccgaccaaggttttcaactcacctataccagttttgatctggtaaaatgtgaggatccgggcatccctaactacggctataggatccgtgatgaaggccactttaccgacactgtagttctgtacagttgcaacccggggtacgccatgcatggcagcaacaccctgacctgtttgagtggagacaggagagtgtgggacaaaccactaccttcgtgcatagcggaatgtggtggtcagatccatgcagccacatcaggacgaatattgtcccctggctatccagctccgtatgacaacaacctccactgcacctggattatagaggcagacccaggaaagaccattagcctccatttcattgttttcgacacggagatggctcacgacatcctcaaggtctgggacgggccggtggacagtgacatcctgctgaaggagtggagtggctccgcccttccggaggacatccacagcaccttcaactcactcaccctgcagttcgacagcgacttcttcatcagcaagtctggcttctccatccagttctccacctcaattgcagccacctgtaacgatccaggtatgccccaaaatggcacccgctatggagacagcagagaggctggagacaccgtcacattccagtgtgaccctggctatcagctccaaggacaagccaaaatcacctgtgtgcagctgaataaccggttcttttggcaaccagaccctcctacatgcatagctgcttgtggagggaatctgacgggcccagcaggtgttattttgtcacccaactacccacagccgtatcctcctgggaaggaatgtgactggagagtaaaagtgaacccggactttgtcatcgccttgatattcaaaagtttcaacatggagcccagctatgacttcctacacatctatgaaggggaagattccaacagccccctcattgggagttaccagggctctcaggccccagaaagaatagagagtagcggaaacagcctgtttctggcatttcggagtgatgcctccgtgggcctttcagggttcgccattgaatttaaagagaaaccacgggaagcttgttttgacccaggaaatataatgaatgggacaagagttggaacagacttcaagcttggctccaccatcacctaccagtgtgactctggctataagattcttgacccctcatccatcacctgtgtgattggggctgatgggaaaccctcctgggaccaagtgctgccctcctgcaatgctccctgtggaggccagtacacgggatcagaaggggtagttttatcaccaaactacccccataattacacagctggtcaaatatgcctctattccatcacggtaccaaaggaattcgtggtctttggacagtttgcctatttccagacagccctgaatgatttggcagaattatttgatggaacccatgcacaggccagacttctcagctcactctcggggtctcactcaggggaaacattgcccttggctacgtcaaatcaaattctgctccgattcagtgcaaagagcggtgcctctgcccgcggcttccacttcgtgtatcaagctgttcctcgtaccagtgacacccaatgcagctctgtccccgagcccagatacggaaggagaattggttctgagttttctgccggctccatcgtccgattcgagtgcaacccgggatacctgcttcagggttccacggcgctccactgccagtccgtgcccaacgccttggcacagtggaacgacacgatccccagctgtgtggtaccctgcagtggcaatttcactcaacgaagaggtacaatcctgtcccccggctaccctgagccatacggaaacaacttgaactgtatatggaagatcatagttacggagggctcgggaattcagatccaagtgatcagttttgccacggagcagaactgggactcccttgagatccacgatggtggggatgtgaccgcacccagactgggaagcttctcaggcaccacagtaccggcactgctgaacagtacttccaaccaactctacctgcatttccagtctgacattagtgtggcagctgctggtttccacctggaatacaaaactgtaggtcttgctgcatgccaagaaccagccctccccagcaacagcatcaaaatcggagatcggtacatggtgaacgacgtgctctccttccagtgcgagcccgggtacaccctgcagggccgttcccacatttcctgtatgccagggaccgttcgccgttggaactatccgtctcccctgtgcattgcaacctgtggagggacgctgagcaccttgggtggtgtgatcctgagccccggcttcccaggttcttaccccaacaacttagactgcacctggaggatctcattacccatcggctatggtgcacatattcagtttctgaatttttctaccgaagctaatcatgacttccttgaaattcaaaatggaccttaccacaccagccccatgattggacaatttagcggcacggatctccccgcggccctgctgagcacaacgcatgaaaccctcatccacttttatagtgaccattcgcaaaaccggcaaggatttaaacttgcttaccaaggaggatctggaaacattggtcctgctttcccatgtcttgacaccccattccaagccagatgtcaaggagaagaaaggactttcaattaa

SEQ ID NO: 227788 - DNA, 10164 bp, Artificial Sequence
  derived and/or modified sequence
atgactgcgtggaggagattccagtcgctgctcctgcttctcgggctgctggtgctgtgcgcgaggctcctcactgcagcgaagggtcagaactgtggaggcttagtccagggtcccaatggcactattgagagcccagggtttcctcacgggtatccgaactatgccaactgcacctggatcatcatcacgggcgagcgcaataggatacagttgtccttccatacctttgctcttgaagaagattttgatattttatcagtttacgatggacagcctcaacaagggaatttaaaagtgagattatcgggatttcagctgccctcctctatagtgagtacaggatctatcctcactctgtggttcacgacagacttcgctgtgagtgcccaaggtttcaaagcattatatgaagttttacctagccacacttgtggaaatcctggagaaatcctgaaaggagttctgcatggaacgagattcaacataggagacaaaatccggtacagctgcctccctggctacatcttggaaggccacgccatcctgacctgcatcgtcagcccaggaaatggtgcatcgtgggacttcccagctcccttttgcagagctgagggagcctgcggaggaaccttacgcgggaccagcagctccatctccagcccgcacttcccttcagagtacgagaacaacgcggactgcacctggaccattctggctgagcccggggacaccattgcgctggtcttcactgactttcagctagaagaaggatatgatttcttagagatcagtggcacggaagctccatccatatggctaactggcatgaacctcccctctccagttatcagtagcaagaattggctacgactccatttcacctctgacagcaaccaccgacgcaaaggatttaacgctcagttccaagtgaaaaaggcgattgagttgaagtcaagaggagtcaagatgctgcccagcaaggatggaagccataaaaactctgtcttgagccaaggaggtgttgcattggtctctgacatgtgtccagatcctgggattccagaaaatggtagaagagcaggttccgacttcagggttggtgcaaatgtacagttttcatgtgaggacaattacgtgctccagggatctaaaagcatcacctgtcagagagttacagagacgctcgctgcttggagtgaccacaggcccatctgccgagcgagaacatgtggatccaatctgcgtgggcccagcggcgtcattacctcccctaattatccggttcagtatgaagataatgcacactgtgtgtgggtcatcaccaccaccgacccggacaaggtcatcaagcttgcctttgaagagtttgagctggagcgaggctatgacaccctgacggttggtgatgctgggaaggtgggagacaccagatcggtcttgtacgtgctcacgggatccagtgttcctgacctcattgtgagcatgagcaaccagatgtggctacatctgcagtcggatgatagcattggctcacctgggtttaaagctgtttaccaagaaattgaaaagggagggtgtggggatcctggaatccccgcctatgggaagcggacgggcagcagtttcctccatggagatacactcacctttgaatgcccggcggcctttgagctggtgggggagagagttatcacctgtcagcagaacaatcagtggtctggcaacaagcccagctgtgtattttcatgtttcttcaactttacggcatcatctgggattattctgtcaccaaattatccagaggaatatgggaacaacatgaactgtgtctggttgattatctcggagccaggaagtcgaattcacctaatctttaatgattttgatgttgagcctcagtttgactttctcgcggtcaaggatgatggcatttctgacataactgtcctgggtactttttctggcaatgaagtgccttcccagctggccagcagtgggcatatagttcgcttggaatttcagtctgaccattccactactggcagagggttcaacatcacttacaccacatttggtcagaatgagtgccatgatcctggcattcctataaacggacgacgttttggtgacaggtttctactcgggagctcggtttctttccactgtgatgatggctttgtcaagacccagggatccgagtccattacctgcatactgcaagacgggaacgtggtctggagctccaccgtgccccgctgtgaagctccatgtggtggacatctgacagcgtccagcggagtcattttgcctcctggatggccaggatattataaggattctttacattgtgaatggataattgaagcaaaaccaggccactctatcaaaataacttttgacagatttcagacagaggtcaattatgacaccttggaggtcagagatgggccagccagttcgtccccactgatcggcgagtaccacggcacccaggcaccccagttcctcatcagcaccgggaacttcatgtacctgctgttcaccactgacaacagccgctccagcatcggcttcctcatccactatgagagtgtgacgcttgagtcggattcctgcctggacccgggcatccctgtgaacggccatcgccacggtggagactttggcatcaggtccacagtgactttcagctgtgacccggggtacacactaagtgacgacgagcccctcgtctgtgagaggaaccaccagtggaaccacgccttgcccagctgcgacgctctatgtggaggctacatccaagggaagagtggaacagtcctttctcctgggtttccagatttttatccaaactctctaaactgcacgtggaccattgaagtgtctcatgggaaaggagttcaaatgatctttcacacctttcatcttgagagttcccacgactatttactgatcacagaggatggaagtttttccgagcccgttgccaggctcaccgggtcggtgttgcctcatacgatcaaggcaggcctgtttggaaacttcactgcccagcttcggtttatatcagacttctcaatttcgtacgagggcttcaatatcacattttcagaatatgacctggagccatgtgatgatcctggagtccctgccttcagccgaagaattggttttcactttggtgtgggagactctctgacgttttcctgcttcctgggatatcgtttagaaggtgccaccaagcttacctgcctgggtgggggccgccgtgtgtggagtgcacctctgccaaggtgtgtggccgaatgtggagcaagtgtcaaaggaaatgaaggaacattactgtctccaaattttccatccaattatgataataaccatgagtgtatctataaaatagaaacagaagccggcaagggcatccaccttagaacacgaagcttccagctgtttgaaggagatactctaaaggtatatgatggaaaagacagttcctcacgtccactgggcacgttcactaaaaatgaacttctggggctgatcctaaacagcacatccaatcacctgtggctagagttcaacaccaatggatctgacaccgaccaaggttttcaactcacctataccagttttgatctggtaaaatgtgaggatccgggcatccctaactacggctataggatccgtgatgaaggccactttaccgacactgtagttctgtacagttgcaacccggggtacgccatgcatggcagcaacaccctgacctgtttgagtggagacaggagagtgtgggacaaaccactaccttcgtgcatagcggaatgtggtggtcagatccatgcagccacatcaggacgaatattgtcccctggctatccagctccgtatgacaacaacctccactgcacctggattatagaggcagacccaggaaagaccattagcctccatttcattgttttcgacacggagatggctcacgacatcctcaaggtctgggacgggccggtggacagtgacatcctgctgaaggagtggagtggctccgcccttccggaggacatccacagcaccttcaactcactcaccctgcagttcgacagcgacttcttcatcagcaagtctggcttctccatccagttctccacctcaattgcagccacctgtaacgatccaggtatgccccaaaatggcacccgctatggagacagcagagaggctggagacaccgtcacattccagtgtgaccctggctatcagctccaaggacaagccaaaatcacctgtgtgcagctgaataaccggttcttttggcaaccagaccctcctacatgcatagctgcttgtggagggaatctgacgggcccagcaggtgttattttgtcacccaactacccacagccgtatcctcctgggaaggaatgtgactggagagtaaaagtgaacccggactttgtcatcgccttgatattcaaaagtttcaacatggagcccagctatgacttcctacacatctatgaaggggaagattccaacagccccctcattgggagttaccagggctctcaggccccagaaagaatagagagtagcggaaacagcctgtttctggcatttcggagtgatgcctccgtgggcctttcagggttcgccattgaatttaaagagaaaccacgggaagcttgttttgacccaggaaatataatgaatgggacaagagttggaacagacttcaagcttggctccaccatcacctaccagtgtgactctggctataagattcttgacccctcatccatcacctgtgtgattggggctgatgggaaaccctcctgggaccaagtgctgccctcctgcaatgctccctgtggaggccagtacacgggatcagaaggggtagttttatcaccaaactacccccataattacacagctggtcaaatatgcctctattccatcacggtaccaaaggaattcgtggtctttggacagtttgcctatttccagacagccctgaatgatttggcagaattatttgatggaacccatgcacaggccagacttctcagctcactctcggggtctcactcaggggaaacattgcccttggctacgtcaaatcaaattctgctccgattcagtgcaaagagcggtgcctctgcccgcggcttccacttcgtgtatcaagctgttcctcgtaccagtgacacccaatgcagctctgtccccgagcccagatacggaaggagaattggttctgagttttctgccggctccatcgtccgattcgagtgcaacccgggatacctgcttcagggttccacggcgctccactgccagtccgtgcccaacgccttggcacagtggaacgacacgatccccagctgtgtggtaccctgcagtggcaatttcactcaacgaagaggtacaatcctgtcccccggctaccctgagccatacggaaacaacttgaactgtatatggaagatcatagttacggagggctcgggaattcagatccaagtgatcagttttgccacggagcagaactgggactcccttgagatccacgatggtggggatgtgaccgcacccagactgggaagcttctcaggcaccacagtaccggcactgctgaacagtacttccaaccaactctacctgcatttccagtctgacattagtgtggcagctgctggtttccacctggaatacaaaactgtaggtcttgctgcatgccaagaaccagccctccccagcaacagcatcaaaatcggagatcggtacatggtgaacgacgtgctctccttccagtgcgagcccgggtacaccctgcagggccgttcccacatttcctgtatgccagggaccgttcgccgttggaactatccgtctcccctgtgcattgcaacctgtggagggacgctgagcaccttgggtggtgtgatcctgagccccggcttcccaggttcttaccccaacaacttagactgcacctggaggatctcattacccatcggctatggtgcacatattcagtttctgaatttttctaccgaagctaatcatgacttccttgaaattcaaaatggaccttaccacaccagccccatgattggacaatttagcggcacggatctccccgcggccctgctgagcacaacgcatgaaaccctcatccacttttatagtgaccattcgcaaaaccggcaaggatttaaacttgcttaccaagcctatgaattacagaactgtccagatccacccccatttcagaatgggtacatgatcaactcggattacagcgtggggcaatcagtatctttcgagtgttatcctgggtacattctaataggccatcctgtcctcacttgtcagcatgggatcaacagaaactggaactacccttttccaagatgtgatgccccttgtgggtacaacgtaacttctcagaacggcaccatctactcccctggctttcctgatgagtatccgatcctgaaggactgcatttggctcatcacggtgcctccagggcacggagtttacatcaacttcaccctgttacagacggaagctgtcaacgattacattgctgtttgggacggtcccgatcagaactcaccccagctgggagttttcagtggcaacacagccctcgaaacggcgtatagctccaccaaccaagtcctgctcaagttccacagcgacttttcaaatggaggcttctttgtcctcaatttccacgcatttcagctcaagaaatgtcaacctcccccagcggttccacaggcagaaatgcttactgaggatgatgatttcgaaataggagattttgtgaagtaccagtgccaccccgggtacaccttggtggggaccgacattctgacttgcaagctcagttcccagttgcagtttgagggttctctcccaacatgtgaagcacaatgcccagcaaatgaagtccggactggatcatcgggagtcattctcagtccagggtatccgggtaattattttaactcccagacttgctcttggagtattaaagtggaaccaaactacaacattaccatctttgtggacacatttcaaagtgaaaagcagtttgatgcactggaagtgtttgatggttcttctgggcaaagtcctctgctagtagtcttaagtgggaatcatactgaacaatcaaattttacaagcaggagtaatcagttatatctccgctggtccactgaccatgccaccagtaagaaaggattcaagattcgctatgcagcaccttactgcagtttgacccaccccctgaagaatgggggtattctaaacaggactgcaggagcggttggaagcaaagtgcattatttttgcaagcctggataccgaatggtcggccacagcaatgcaacctgtagacgaaacccacttggcatgtaccagtgggactccctcacgccactctgccaggctgtgtcctgtggaatcccagaatccccaggaaacggttcatttaccgggaacgagttcactttggacagtaaagtggtctatgaatgtcatgagggcttcaagcttgaatccagccagcaagcaacagccgtgtgtcaagaagatgggttgtggagtaacaaggggaagccgcccacgtgtaagccggtcgcttgccccagcattgaagctcagctctcagaacatgtcatctggaggctggtttcaggatccttgaatgagtacggtgctcaagtattgctgagctgcagtcctggttactacttagaaggctggaggctcctgcggtgccaggccaatgggacgtggaacataggagatgagaggccaagctgtcgagctggccactgcggttccccagacccgattgtgaacggtcacattagtggagatggcttcagttacagagacacggtggtttaccagtgcaatcctggtttccggcttgtgggaacttccgtgaggatatgcctgcaagaccacaagtggtctggacaaacgcctgtctgtgtccccatcacatgtggtcaccctggaaaccctgcccacggattcactaatggcagtgagttcaacctgaatgatgtcgtgaatttcacctgcaacacgggctatttgctgcagggcgtgtctcgagcccagtgtcggagcaacggccagtggagtagccctctgcccacgtgtcgagtggtgaactgttctgatccaggctttgtggaaaatgccattcgtcacgggcaacagaacttccctgagagttttgagtatggaatgagtatcctgtaccattgcaagaagggattttacttgctgggatcttcagccttgacctgtatggcaaatggcttatgggaccgatccctgcccaagtgtttggctatatcgtgtggacacccaggggtccctgccaacgccgtcctcactggagagctgtttacctatggcgccgtcgtgcactactcctgcagagggagcgagagcctcataggcaacgacacgagagtgtgccaggaagacagtcactggagcggggcactgccccactgcacaggaaataatcctggattctgtggtgatccggggaccccagcacatgggtctcggcttggtgatgactttaagacaaagagtcttctccgcttctcctgtgaaatggggcaccagctgaggggctcccctgaacgcacgtgtttgctcaatgggtcatggtcaggactgcagccggtgtgtgaggccgtgctgtgtcctcagccgccgccggtgcagaatggaacagtggagggaagtgatttccgctggggctccagcataagttacagctgcatggacggttaccagctctctcactccgccatcctctcctgtgaaggtcgcggggtgtggaaaggagagatcccccagtgtctccctgtgttctgcggagaccctggcatccccgcagaagggcgacttagtgggaaaagtttcacctataagtccgaagtcttcttccagtgcaaatctccatttatactcgtgggatcctccagaagagtctgccaagctgacggcacgtggagcggcatacaacccacctgcattgatcctgctcataacacctgcccagaccctggtacgccacactttggaatacagaatagctccagaggctatgaggttggaagcacggtttttttcaggtgcagaaaaggctaccatattcaaggttccacgactcgcacctgccttgccaatttaacatggagtgggatacagaccgaatgtatacctcatgcctgcagacagccagaaaccccggcacacgcggatgtgagagccatcgatcttcctactttcggctacaccttagtgtacacctgccatccaggctttttcctcgcagggggatctgagcacagaacatgtaaagcagacatgaaatggacaggaaagtcgcctgtgtgtaaaagtaaaggagtgagagaagttaatgaaacagttactaaaactccagttccttcagatgtctttttcgtcaattcactgtggaaggggtattatgaatatttagggaaaagacaacccgccactctaactgttgactggttcaatgcaacaagcagtaaggtgaatgccaccttcagcgaagcctcgccagtggagctgaagttgacaggcatttacaagaaggaggaggcccacttactcctgaaagcttttcaaattaaaggccaggcagatatttttgtaagcaagttcgaaaatgacaactggggactagatggttatgtgtcatctggacttgaaagaggaggatttacttttcaaggtgacattcatggaaaagactttggaaaatttaagctagaaaggcaagatcctttaaacccagatcaagactcttccagtcattaccacggcaccagcagtggctctgtggcggctgccattctggttcctttctttgctctaattttatcagggtttgcattttacctctacaaacacagaacgagaccaaaagttcaatacaatggctatgctgggcatgaaaacagcaatggacaagcatcgtttgaaaaccccatgtatgatacaaacttaaaacccacagaagccaaggctgtgaggtttgacacaactctgaacacagtctgtacagtggtatag

SEQ ID NO: 227789 - DNA, 10281 bp, Artificial Sequence
  derived and/or modified sequence
gtgctgcccagccacacctgcggcaaccccggcgagatcctgaagggcgtgctgcacggcaccagattcaacatcggcgacaagatcagatacagctgcctgcccggctacatcctggagggccacgccatcctgacctgcatcgtgagccccggcaacggcgccagctgggacttccccgcccccttctgcagagccgagggcgcctgcggcggcaccctgagaggcaccagcagcagcatcagcagcccccacttccccagcgagtacgagaacaacgccgactgcacctggaccatcctggccgagcccggcgacaccatcgccctggtgttcaccgacttccagctggaggagggctacgacttcctggagatcagcggcaccgaggcccccagcatctggctgaccggcatgaacctgcccagccccgtgatcagcagcaagaactggctgagactgcacttcaccagcgacagcaaccacagaagaaagggcttcaacgcccagttccaggtgaagaaggccatcgagctgaagagcagaggcgtgaagatgctgcccagcaaggacggcagccacaagaacagcgtgctgagccagggcggcgtggccctggtgagcgacatgtgccccgaccccggcatccccgagaacggcagaagagccggcagcgacttcagcagagtgggcgccaacgtgcagttcagctgcgaggacaactacgtgctgcagggcagcaagagcatcacctgccagagagtgaccgagaccctggccgcctggagcgaccacagacccatctgcagagccagaacctgcggcagcaacctgagaggccccagcggcgtgatcaccagccccaactaccccgtgcagtacgaggacaacgcccactgcgtgtgggtgatcaccaccaccgaccccgacaaggtgatcaagctggccttcgaggagttcgagctggagagaggctacgacaccctgaccgtgggcgacgccggcaaggtgggcgacaccagaagcgtgctgtacgtgctgaccggcagcagcgtgcccgacctgatcgtgagcatgagcaaccagatgtggctgcacctgcagagcgacgacagcatcggcagccccggcttcaaggccgtgtaccaggagatcgagaagggcggctgcggcgaccccggcatccccgcctacggcaagagaaccggcagcagcttcctgcacggcgacaccctgaccttcgagtgccccgccgccttcgagctggtgggcgagagagtgatcacctgccagcagaacaaccagtggagcggcaacaagcccagctgcgtgttcagctgcttcttcaacttcaccgccagcagcggcatcatcctgagccccaactaccccgaggagtacggcaacaacatgaactgcgtgtggctgatcatcagcgagcccggcagcagaatccacctgatcttcaacgacttcgacgtggagccccagttcgacttcctggccgtgaaggacgacggcatcagcgacatcaccgtgctgggcaccttcagcggcaacgaggtgcccagccagctggccagcagcggccacatcgtgagactggagttccagagcgaccacagcaccaccggcagaggcttcaacatcacctacaccaccttcggccagaacgagtgccacgaccccggcatccccatcaacggcagaagattcggcgacagattcctgctgggcagcagcgtgagcttccactgcgacgacggcttcgtgaagacccagggcagcgagagcatcacctgcatcctgcaggacggcaacgtggtgtggagcagcaccgtgcccagatgcgaggccccctgcggcggccacctgaccgccagcagcggcgtgatcctgccccccggctggcccggctactacaaggacagcctgcactgcgagtggatcatcgaggccaagcccggccacagcatcaagatcaccttcgacagattccagaccgaggtgaactacgacaccctggaggtgagagacggccccgccagcagcagccccctgatcggcgagtaccacggcacccaggccccccagttcctgatcagcaccggcaacttcatgtacctgctgttcaccaccgacaacagcagaagcagcatcggcttcctgatccactacgagagcgtgaccctggagagcgacagctgcctggaccccggcatccccgtgaacggccacagacacggcggcgacttcggcatcagaagcaccgtgaccttcagctgcgaccccggctacaccctgagcgacgacgagcccctggtgtgcgagagaaaccaccagtggaaccacgccctgcccagctgcgacgccctgtgcggcggctacatccagggcaagagcggcaccgtgctgagccccggcttccccgacttctaccccaacagcctgaactgcacctggaccatcgaggtgagccacggcaagggcgtgcagatgatcttccacaccttccacctggagagcagccacgactacctgctgatcaccgaggacggcagcttcagcgagcccgtggccagactgaccggcagcgtgctgccccacaccatcaaggccggcctgttcggcaacttcaccgcccagctgagattcatcagcgacttcagcatcagctacgagggcttcaacatcaccttcagcgagtacgacctggagccctgcgacgaccccggcgtgcccgccttcagcagaagaatcggcttccacttcggcgtgggcgacagcctgaccttcagctgcttcctgggctacagactggagggcgccaccaagctgacctgcctgggcggcggcagaagagtgtggagcgcccccctgcccagatgcgtggccgagtgcggcgccagcgtgaagggcaacgagggcaccctgctgagccccaacttccccagcaactacgacaacaaccacgagtgcatctacaagatcgagaccgaggccggcaagggcatccacctgagaaccagaagcttccagctgttcgagggcgacaccctgaaggtgtacgacggcaaggacagcagcagcagacccctgggcaccttcaccaagaacgagctgctgggcctgatcctgaacagcaccagcaaccacctgtggctggagttcaacaccaacggcagcgacaccgaccagggcttccagctgacctacaccagcttcgacctggtgaagtgcgaggaccccggcatccccaactacggctacagaatcagagacgagggccacttcaccgacaccgtggtgctgtacagctgcaaccccggctacgccatgcacggcagcaacaccctgacctgcctgagcggcgacagaagagtgtgggacaagcccctgcccagctgcatcgccgagtgcggcggccagatccacgccgccaccagcggcagaatcctgagccccggctaccccgccccctacgacaacaacctgcactgcacctggatcatcgaggccgaccccggcaagaccatcagcctgcacttcatcgtgttcgacaccgagatggcccacgacatcctgaaggtgtgggacggccccgtggacagcgacatcctgctgaaggagtggagcggcagcgccctgcccgaggacatccacagcaccttcaacagcctgaccctgcagttcgacagcgacttcttcatcagcaagagcggcttcagcatccagttcagcaccagcatcgccgccacctgcaacgaccccggcatgccccagaacggcaccagatacggcgacagcagagaggccggcgacaccgtgaccttccagtgcgaccccggctaccagctgcagggccaggccaagatcacctgcgtgcagctgaacaacagattcttctggcagcccgacccccccacctgcatcgccgcctgcggcggcaacctgaccggccccgccggcgtgatcctgagccccaactacccccagccctacccccccggcaaggagtgcgactggagagtgaaggtgaaccccgacttcgtgatcgccctgatcttcaagagcttcaacatggagcccagctacgacttcctgcacatctacgagggcgaggacagcaacagccccctgatcggcagctaccagggcagccaggcccccgagagaatcgagagcagcggcaacagcctgttcctggccttcagaagcgacgccagcgtgggcctgagcggcttcgccatcgagttcaaggagaagcccagagaggcctgcttcgaccccggcaacatcatgaacggcaccagagtgggcaccgacttcaagctgggcagcaccatcacctaccagtgcgacagcggctacaagatcctggaccccagcagcatcacctgcgtgatcggcgccgacggcaagcccagctgggaccaggtgctgcccagctgcaacgccccctgcggcggccagtacaccggcagcgagggcgtggtgctgagccccaactacccccacaactacaccgccggccagatctgcctgtacagcatcaccgtgcccaaggagttcgtggtgttcggccagttcgcctacttccagaccgccctgaacgacctggccgagctgttcgacggcacccacgcccaggccagactgctgagcagcctgagcggcagccacagcggcgagaccctgcccctggccaccagcaaccagatcctgctgagattcagcgccaagagcggcgccagcgccagaggcttccacttcgtgtaccaggccgtgcccagaaccagcgacacccagtgcagcagcgtgcccgagcccagatacggcagaagaatcggcagcgagttcagcgccggcagcatcgtgagattcgagtgcaaccccggctacctgctgcagggcagcaccgccctgcactgccagagcgtgcccaacgccctggcccagtggaacgacaccatccccagctgcgtggtgccctgcagcggcaacttcacccagagaagaggcaccatcctgagccccggctaccccgagccctacggcaacaacctgaactgcatctggaagatcatcgtgaccgagggcagcggcatccaggaccccagcgaccagttctgccacggcgccgagctgggcctggagatccacgacggcggcgacgtgaccgcccccagactgggcagcttcagcggcaccaccgtgcccgccctgctgaacagcaccagcaaccagctgtacctgcacttccagagcgacatcagcgtggccgccgccggcttccacctggagtacaagaccgtgggcctggccgcctgccaggagcccgccctgcccagcaacagcatcaagatcggcgacagatacatggtgaacgacgtgctgagcttccagtgcgagcccggctacaccctgcagggcagaagccacatcagctgcatgcccggcaccgtgagaagatggaactaccccagccccctgtgcatcgccacctgcggcggcaccctgagcaccctgggcggcgtgatcctgagccccggcttccccggcagctaccccaacaacctggactgcacctggagaatcagcctgcccatcggctacggcgcccacatccagttcctgaacttcagcaccgaggccaaccacgacttcctggagatccagaacggcccctaccacaccagccccatgatcggccagttcagcggcaccgacctgcccgccgccctgctgagcaccacccacgagaccctgatccacttctacagcgaccacagccagaacagacagggcttcaagctggcctaccaggcctacgagctgcagaactgccccgaccccccccccttccagaacggctacatgatcaacagcgactacagcgtgggccagagcgtgagcttcgagtgctaccccggctacatcctgatcggccaccccgtgctgacctgccagcacggcatcaacagaaactggaactaccccttccccagatgcgacgccccctgcggctacaacgtgaccagccagaacggcaccatctacagccccggcttccccgacgagtaccccatcctgaaggactgcatctggctgatcaccgtgccccccggccacggcgtgtacatcaacttcaccctgctgcagaccgaggccgtgaacgactacatcgccgtgtgggacggccccgaccagaacagcccccagctgggcgtgttcagcggcaacaccgccctggagaccgcctacagcagcaccaaccaggtgctgctgaagttccacagcgacttcagcaacggcggcttcttcgtgctgaacttccacgccttccagctgaagaagtgccagcccccccccgccgtgccccaggccgagatgctgaccgaggacgacgacttcgagatcggcgacttcgtgaagtaccagtgccaccccggctacaccctggtgggcaccgacatcctgacctgcaagctgagcagccagctgcagttcgagggcagcctgcccacctgcgaggcccagtgccccgccaacgaggtgagaaccggcagcagcggcgtgatcctgagccccggctaccccggcaactacttcaacagccagacctgcagctggagcatcaaggtggagcccaactacaacatcaccatcttcgtggacaccttccagagcgagaagcagttcgacgccctggaggtgttcgacggcagcagcggccagagccccctgctggtggtgctgagcggcaaccacaccgagcagagcaacttcaccagcagaagcaaccagctgtacctgagatggagcaccgaccacgccaccagcaagaagggcttcaagatcagatacgccgccccctactgcagcctgacccaccccctgaagaacggcggcatcctgaacagaaccgccggcgccgtgggcagcaaggtgcactacttctgcaagcccggctacagaatggtgggccacagcaacgccacctgcagaagaaaccccctgggcatgtaccagtgggacagcctgacccccctgtgccaggccgtgagctgcggcatccccgagagccccggcaacggcagcttcaccggcaacgagttcaccctggacagcaaggtggtgtacgagtgccacgagggcttcaagctggagagcagccagcaggccaccgccgtgtgccaggaggacggcctgtggagcaacaagggcaagccccccacctgcaagcccgtggcctgccccagcatcgaggcccagctgagcgagcacgtgatctggagactggtgagcggcagcctgaacgagtacggcgcccaggtgctgctgagctgcagccccggctactacctggagggctggagactgctgagatgccaggccaacggcacctggaacatcggcgacgagagacccagctgcagagtgatcagctgcggcagcctgagcttcccccccaacggcaacaagatcggcaccctgaccgtgtacggcgccaccgccatcttcacctgcaacaccggctacaccctggtgggcagccacgtgagagagtgcctggccaacggcctgtggagcggcagcgagaccagatgcctggccggccactgcggcagccccgaccccatcgtgaacggccacatcagcggcgacggcttcagctacagagacaccgtggtgtaccagtgcaaccccggcttcagactggtgggcaccagcgtgagaatctgcctgcaggaccacaagtggagcggccagacccccgtgtgcgtgcccatcacctgcggccaccccggcaaccccgcccacggcttcaccaacggcagcgagttcaacctgaacgacgtggtgaacttcacctgcaacaccggctacctgctgcagggcgtgagcagagcccagtgcagaagcaacggccagtggagcagccccctgcccacctgcagagtggtgaactgcagcgaccccggcttcgtggagaacgccatcagacacggccagcagaacttccccgagagcttcgagtacggcatgagcatcctgtaccactgcaagaagggcttctacctgctgggcagcagcgccctgacctgcatggccaacggcctgtgggacagaagcctgcccaagtgcctggccatcagctgcggccaccccggcgtgcccgccaacgccgtgctgaccggcgagctgttcacctacggcgccgtggtgcactacagctgcagaggcagcgagagcctgatcggcaacgacaccagagtgtgccaggaggacagccactggagcggcgccctgccccactgcaccggcaacaaccccggcttctgcggcgaccccggcacccccgcccacggcagcagactgggcgacgacttcaagaccaagagcctgctgagattcagctgcgagatgggccaccagctgagaggcagccccgagagaacctgcctgctgaacggcagctggagcggcctgcagcccgtgtgcgaggccgtgagctgcggcaaccccggcacccccaccaacggcatgatcgtgagcagcgacggcatcctgttcagcagcagcgtgatctacgcctgctgggagggctacaagaccagcggcctgatgaccagacactgcaccgccaacggcacctggaccggcaccgcccccgactgcaccatcatcagctgcggcgaccccggcaccctggccaacggcatccagttcggcaccgacttcaccttcaacaagaccgtgagctaccagtgcaaccccggctacgtgatggaggccgtgaccagcgccaccatcagatgcaccaaggacggcagatggaaccccagcaagcccgtgtgcaaggccgtgctgtgcccccagcccccccccgtgcagaacggcaccgtggagggcagcgacttcagatggggcagcagcatcagctacagctgcatggacggctaccagctgagccacagcgccatcctgagctgcgagggcagaggcgtgtggaagggcgagatcccccagtgcctgcccgtgttctgcggcgaccccggcatccccgccgagggcagactgagcggcaagagcttcacctacaagagcgaggtgttcttccagtgcaagagccccttcatcctggtgggcagcagcagaagagtgtgccaggccgacggcacctggagcggcatccagcccacctgcatcgaccccgcccacaacacctgccccgaccccggcaccccccacttcggcatccagaacagcagcagaggctacgaggtgggcagcaccgtgttcttcagatgcagaaagggctaccacatccagggcagcaccaccagaacctgcctggccaacctgacctggagcggcatccagaccgagtgcatcccccacgcctgcagacagcccgagacccccgcccacgccgacgtgagagccatcgacctgcccaccttcggctacaccctggtgtacacctgccaccccggcttcttcctggccggcggcagcgagcacagaacctgcaaggccgacatgaagtggaccggcaagagccccgtgtgcaagagcaagggcgtgagagaggtgaacgagaccgtgaccaagacccccgtgcccagcgacgtgttcttcgtgaacagcctgtggaagggctactacgagtacctgggcaagagacagcccgccaccctgaccgtggactggttcaacgccaccagcagcaaggtgaacgccaccttcagcgaggccagccccgtggagctgaagctgaccggcatctacaagaaggaggaggcccacctgctgctgaaggccttccagatcaagggccaggccgacatcttcgtgagcaagttcgagaacgacaactggggcctggacggctacgtgagcagcggcctggagagaggcggcttcaccttccagggcgacatccacggcaaggacttcggcaagttcaagctggagagacaggaccccctgaaccccgaccaggacagcagcagccactaccacggcaccagcagcggcagcgtggccgccgccatcctggtgcccttcttcgccctgatcctgagcggcttcgccttctacctgtacaagcacagaaccagacccaaggtgcagtacaacggctacgccggccacgagaacagcaacggccaggccagcttcgagaaccccatgtacgacaccaacctgaagcccaccgaggccaaggccgtgagattcgacaccaccctgaacaccgtgtgcaccgtggtgtag

SEQ ID NO: 227790 - DNA, 10167 bp, Artificial Sequence
  derived and/or modified sequence
atgaccgcctggagaagattccagagcctgctgctgctgctgggcctgctggtgctgtgcgccagactgctgaccgccgccaagggccagaactgcggcggcctggtgcagggccccaacggcaccatcgagagccccggcttcccccacggctaccccaactacgccaactgcacctggatcatcatcaccggcgagagaaacagaatccagctgagcttccacaccttcgccctggaggaggacttcgacatcctgagcgtgtacgacggccagccccagcagggcaacctgaaggtgagactgagcggcttccagctgcccagcagcatcgtgagcaccggcagcatcctgaccctgtggttcaccaccgacttcgccgtgagcgcccagggcttcaaggccctgtacgaggtgctgcccagccacacctgcggcaaccccggcgagatcctgaagggcgtgctgcacggcaccagattcaacatcggcgacaagatcagatacagctgcctgcccggctacatcctggagggccacgccatcctgacctgcatcgtgagccccggcaacggcgccagctgggacttccccgcccccttctgcagagccgagggcgcctgcggcggcaccctgagaggcaccagcagcagcatcagcagcccccacttccccagcgagtacgagaacaacgccgactgcacctggaccatcctggccgagcccggcgacaccatcgccctggtgttcaccgacttccagctggaggagggctacgacttcctggagatcagcggcaccgaggcccccagcatctggctgaccggcatgaacctgcccagccccgtgatcagcagcaagaactggctgagactgcacttcaccagcgacagcaaccacagaagaaagggcttcaacgcccagttccaggtgaagaaggccatcgagctgaagagcagaggcgtgaagatgctgcccagcaaggacggcagccacaagaacagcgtgctgagccagggcggcgtggccctggtgagcgacatgtgccccgaccccggcatccccgagaacggcagaagagccggcagcgacttcagcagagtgggcgccaacgtgcagttcagctgcgaggacaactacgtgctgcagggcagcaagagcatcacctgccagagagtgaccgagaccctggccgcctggagcgaccacagacccatctgcagagccagaacctgcggcagcaacctgagaggccccagcggcgtgatcaccagccccaactaccccgtgcagtacgaggacaacgcccactgcgtgtgggtgatcaccaccaccgaccccgacaaggtgatcaagctggccttcgaggagttcgagctggagagaggctacgacaccctgaccgtgggcgacgccggcaaggtgggcgacaccagaagcgtgctgtacgtgctgaccggcagcagcgtgcccgacctgatcgtgagcatgagcaaccagatgtggctgcacctgcagagcgacgacagcatcggcagccccggcttcaaggccgtgtaccaggagatcgagaagggcggctgcggcgaccccggcatccccgcctacggcaagagaaccggcagcagcttcctgcacggcgacaccctgaccttcgagtgccccgccgccttcgagctggtgggcgagagagtgatcacctgccagcagaacaaccagtggagcggcaacaagcccagctgcgtgttcagctgcttcttcaacttcaccgccagcagcggcatcatcctgagccccaactaccccgaggagtacggcaacaacatgaactgcgtgtggctgatcatcagcgagcccggcagcagaatccacctgatcttcaacgacttcgacgtggagccccagttcgacttcctggccgtgaaggacgacggcatcagcgacatcaccgtgctgggcaccttcagcggcaacgaggtgcccagccagctggccagcagcggccacatcgtgagactggagttccagagcgaccacagcaccaccggcagaggcttcaacatcacctacaccaccttcggccagaacgagtgccacgaccccggcatccccatcaacggcagaagattcggcgacagattcctgctgggcagcagcgtgagcttccactgcgacgacggcttcgtgaagacccagggcagcgagagcatcacctgcatcctgcaggacggcaacgtggtgtggagcagcaccgtgcccagatgcgaggccccctgcggcggccacctgaccgccagcagcggcgtgatcctgccccccggctggcccggctactacaaggacagcctgcactgcgagtggatcatcgaggccaagcccggccacagcatcaagatcaccttcgacagattccagaccgaggtgaactacgacaccctggaggtgagagacggccccgccagcagcagccccctgatcggcgagtaccacggcacccaggccccccagttcctgatcagcaccggcaacttcatgtacctgctgttcaccaccgacaacagcagaagcagcatcggcttcctgatccactacgagagcgtgaccctggagagcgacagctgcctggaccccggcatccccgtgaacggccacagacacggcggcgacttcggcatcagaagcaccgtgaccttcagctgcgaccccggctacaccctgagcgacgacgagcccctggtgtgcgagagaaaccaccagtggaaccacgccctgcccagctgcgacgccctgtgcggcggctacatccagggcaagagcggcaccgtgctgagccccggcttccccgacttctaccccaacagcctgaactgcacctggaccatcgaggtgagccacggcaagggcgtgcagatgatcttccacaccttccacctggagagcagccacgactacctgctgatcaccgaggacggcagcttcagcgagcccgtggccagactgaccggcagcgtgctgccccacaccatcaaggccggcctgttcggcaacttcaccgcccagctgagattcatcagcgacttcagcatcagctacgagggcttcaacatcaccttcagcgagtacgacctggagccctgcgacgaccccggcgtgcccgccttcagcagaagaatcggcttccacttcggcgtgggcgacagcctgaccttcagctgcttcctgggctacagactggagggcgccaccaagctgacctgcctgggcggcggcagaagagtgtggagcgcccccctgcccagatgcgtggccgagtgcggcgccagcgtgaagggcaacgagggcaccctgctgagccccaacttccccagcaactacgacaacaaccacgagtgcatctacaagatcgagaccgaggccggcaagggcatccacctgagaaccagaagcttccagctgttcgagggcgacaccctgaaggtgtacgacggcaaggacagcagcagcagacccctgggcaccttcaccaagaacgagctgctgggcctgatcctgaacagcaccagcaaccacctgtggctggagttcaacaccaacggcagcgacaccgaccagggcttccagctgacctacaccagcttcgacctggtgaagtgcgaggaccccggcatccccaactacggctacagaatcagagacgagggccacttcaccgacaccgtggtgctgtacagctgcaaccccggctacgccatgcacggcagcaacaccctgacctgcctgagcggcgacagaagagtgtgggacaagcccctgcccagctgcatcgccgagtgcggcggccagatccacgccgccaccagcggcagaatcctgagccccggctaccccgccccctacgacaacaacctgcactgcacctggatcatcgaggccgaccccggcaagaccatcagcctgcacttcatcgtgttcgacaccgagatggcccacgacatcctgaaggtgtgggacggccccgtggacagcgacatcctgctgaaggagtggagcggcagcgccctgcccgaggacatccacagcaccttcaacagcctgaccctgcagttcgacagcgacttcttcatcagcaagagcggcttcagcatccagttcagcaccagcatcgccgccacctgcaacgaccccggcatgccccagaacggcaccagatacggcgacagcagagaggccggcgacaccgtgaccttccagtgcgaccccggctaccagctgcagggccaggccaagatcacctgcgtgcagctgaacaacagattcttctggcagcccgacccccccacctgcatcgccgcctgcggcggcaacctgaccggccccgccggcgtgatcctgagccccaactacccccagccctacccccccggcaaggagtgcgactggagagtgaaggtgaaccccgacttcgtgatcgccctgatcttcaagagcttcaacatggagcccagctacgacttcctgcacatctacgagggcgaggacagcaacagccccctgatcggcagctaccagggcagccaggcccccgagagaatcgagagcagcggcaacagcctgttcctggccttcagaagcgacgccagcgtgggcctgagcggcttcgccatcgagttcaaggagaagcccagagaggcctgcttcgaccccggcaacatcatgaacggcaccagagtgggcaccgacttcaagctgggcagcaccatcacctaccagtgcgacagcggctacaagatcctggaccccagcagcatcacctgcgtgatcggcgccgacggcaagcccagctgggaccaggtgctgcccagctgcaacgccccctgcggcggccagtacaccggcagcgagggcgtggtgctgagccccaactacccccacaactacaccgccggccagatctgcctgtacagcatcaccgtgcccaaggagttcgtggtgttcggccagttcgcctacttccagaccgccctgaacgacctggccgagctgttcgacggcacccacgcccaggccagactgctgagcagcctgagcggcagccacagcggcgagaccctgcccctggccaccagcaaccagatcctgctgagattcagcgccaagagcggcgccagcgccagaggcttccacttcgtgtaccaggccgtgcccagaaccagcgacacccagtgcagcagcgtgcccgagcccagatacggcagaagaatcggcagcgagttcagcgccggcagcatcgtgagattcgagtgcaaccccggctacctgctgcagggcagcaccgccctgcactgccagagcgtgcccaacgccctggcccagtggaacgacaccatccccagctgcgtggtgccctgcagcggcaacttcacccagagaagaggcaccatcctgagccccggctaccccgagccctacggcaacaacctgaactgcatctggaagatcatcgtgaccgagggcagcggcatccagatccaggtgatcagcttcgccaccgagcagaactgggacagcctggagatccacgacggcggcgacgtgaccgcccccagactgggcagcttcagcggcaccaccgtgcccgccctgctgaacagcaccagcaaccagctgtacctgcacttccagagcgacatcagcgtggccgccgccggcttccacctggagtacaagaccgtgggcctggccgcctgccaggagcccgccctgcccagcaacagcatcaagatcggcgacagatacatggtgaacgacgtgctgagcttccagtgcgagcccggctacaccctgcagggcagaagccacatcagctgcatgcccggcaccgtgagaagatggaactaccccagccccctgtgcatcgccacctgcggcggcaccctgagcaccctgggcggcgtgatcctgagccccggcttccccggcagctaccccaacaacctggactgcacctggagaatcagcctgcccatcggctacggcgcccacatccagttcctgaacttcagcaccgaggccaaccacgacttcctggagatccagaacggcccctaccacaccagccccatgatcggccagttcagcggcaccgacctgcccgccgccctgctgagcaccacccacgagaccctgatccacttctacagcgaccacagccagaacagacagggcttcaagctggcctaccaggcctacgagctgcagaactgccccgaccccccccccttccagaacggctacatgatcaacagcgactacagcgtgggccagagcgtgagcttcgagtgctaccccggctacatcctgatcggccaccccgtgctgacctgccagcacggcatcaacagaaactggaactaccccttccccagatgcgacgccccctgcggctacaacgtgaccagccagaacggcaccatctacagccccggcttccccgacgagtaccccatcctgaaggactgcatctggctgatcaccgtgccccccggccacggcgtgtacatcaacttcaccctgctgcagaccgaggccgtgaacgactacatcgccgtgtgggacggccccgaccagaacagcccccagctgggcgtgttcagcggcaacaccgccctggagaccgcctacagcagcaccaaccaggtgctgctgaagttccacagcgacttcagcaacggcggcttcttcgtgctgaacttccacgccttccagctgaagaagtgccagcccccccccgccgtgccccaggccgagatgctgaccgaggacgacgacttcgagatcggcgacttcgtgaagtaccagtgccaccccggctacaccctggtgggcaccgacatcctgacctgcaagctgagcagccagctgcagttcgagggcagcctgcccacctgcgaggcccagtgccccgccaacgaggtgagaaccggcagcagcggcgtgatcctgagccccggctaccccggcaactacttcaacagccagacctgcagctggagcatcaaggtggagcccaactacaacatcaccatcttcgtggacaccttccagagcgagaagcagttcgacgccctggaggtgttcgacggcagcagcggccagagccccctgctggtggtgctgagcggcaaccacaccgagcagagcaacttcaccagcagaagcaaccagctgtacctgagatggagcaccgaccacgccaccagcaagaagggcttcaagatcagatacgccgccccctactgcagcctgacccaccccctgaagaacggcggcatcctgaacagaaccgccggcgccgtgggcagcaaggtgcactacttctgcaagcccggctacagaatggtgggccacagcaacgccacctgcagaagaaaccccctgggcatgtaccagtgggacagcctgacccccctgtgccaggccgtgagctgcggcatccccgagagccccggcaacggcagcttcaccggcaacgagttcaccctggacagcaaggtggtgtacgagtgccacgagggcttcaagctggagagcagccagcaggccaccgccgtgtgccaggaggacggcctgtggagcaacaagggcaagccccccacctgcaagcccgtggcctgccccagcatcgaggcccagctgagcgagcacgtgatctggagactggtgagcggcagcctgaacgagtacggcgcccaggtgctgctgagctgcagccccggctactacctggagggctggagactgctgagatgccaggccaacggcacctggaacatcggcgacgagagacccagctgcagagccggccactgcggcagccccgaccccatcgtgaacggccacatcagcggcgacggcttcagctacagagacaccgtggtgtaccagtgcaaccccggcttcagactggtgggcaccagcgtgagaatctgcctgcaggaccacaagtggagcggccagacccccgtgtgcgtgcccatcacctgcggccaccccggcaaccccgcccacggcttcaccaacggcagcgagttcaacctgaacgacgtggtgaacttcacctgcaacaccggctacctgctgcagggcgtgagcagagcccagtgcagaagcaacggccagtggagcagccccctgcccacctgcagagtggtgaactgcagcgaccccggcttcgtggagaacgccatcagacacggccagcagaacttccccgagagcttcgagtacggcatgagcatcctgtaccactgcaagaagggcttctacctgctgggcagcagcgccctgacctgcatggccaacggcctgtgggacagaagcctgcccaagtgcctggccatcagctgcggccaccccggcgtgcccgccaacgccgtgctgaccggcgagctgttcacctacggcgccgtggtgcactacagctgcagaggcagcgagagcctgatcggcaacgacaccagagtgtgccaggaggacagccactggagcggcgccctgccccactgcaccggcaacaaccccggcttctgcggcgaccccggcacccccgcccacggcagcagactgggcgacgacttcaagaccaagagcctgctgagattcagctgcgagatgggccaccagctgagaggcagccccgagagaacctgcctgctgaacggcagctggagcggcctgcagcccgtgtgcgaggccgtgctgtgcccccagcccccccccgtgcagaacggcaccgtggagggcagcgacttcagatggggcagcagcatcagctacagctgcatggacggctaccagctgagccacagcgccatcctgagctgcgagggcagaggcgtgtggaagggcgagatcccccagtgcctgcccgtgttctgcggcgaccccggcatccccgccgagggcagactgagcggcaagagcttcacctacaagagcgaggtgttcttccagtgcaagagccccttcatcctggtgggcagcagcagaagagtgtgccaggccgacggcacctggagcggcatccagcccacctgcatcgaccccgcccacaacacctgccccgaccccggcaccccccacttcggcatccagaacagcagcagaggctacgaggtgggcagcaccgtgttcttcagatgcagaaagggctaccacatccagggcagcaccaccagaacctgcctggccaacctgacctggagcggcatccagaccgagtgcatcccccacgcctgcagacagcccgagacccccgcccacgccgacgtgagagccatcgacctgcccaccttcggctacaccctggtgtacacctgccaccccggcttcttcctggccggcggcagcgagcacagaacctgcaaggccgacatgaagtggaccggcaagagccccgtgtgcaagagcaagggcgtgagagaggtgaacgagaccgtgaccaagacccccgtgcccagcgacgtgttcttcgtgaacagcctgtggaagggctactacgagtacctgggcaagagacagcccgccaccctgaccgtggactggttcaacgccaccagcagcaaggtgaacgccaccttcagcgaggccagccccgtggagctgaagctgaccggcatctacaagaaggaggaggcccacctgctgctgaaggccttccagatcaagggccaggccgacatcttcgtgagcaagttcgagaacgacaactggggcctggacggctacgtgagcagcggcctggagagaggcggcttcaccttccagggcgacatccacggcaaggacttcggcaagttcaagctggagagacaggaccccctgaaccccgaccaggacagcagcagccactaccacggcaccagcagcggcagcgtggccgccgccatcctggtgcccttcttcgccctgatcctgagcggcttcgccttctacctgtacaagcacagaaccagacccaaggtgcagtacaacggctacgccggccacgagaacagcaacggccaggccagcttcgagaaccccatgtacgacaccaacctgaagcccaccgaggccaaggccgtgagattcgacaccaccctgaacaccgtgtgcaccgtggtgtag

SEQ ID NO: 227791 - DNA, 10698 bp, Artificial Sequence
  derived and/or modified sequence
atgaccgcctggagaagattccagagcctgctgctgctgctgggcctgctggtgctgtgcgccagactgctgaccgccgccaagggccagaactgcggcggcctggtgcagggccccaacggcaccatcgagagccccggcttcccccacggctaccccaactacgccaactgcacctggatcatcatcaccggcgagagaaacagaatccagctgagcttccacaccttcgccctggaggaggacttcgacatcctgagcgtgtacgacggccagccccagcagggcaacctgaaggtgagactgagcggcttccagctgcccagcagcatcgtgagcaccggcagcatcctgaccctgtggttcaccaccgacttcgccgtgagcgcccagggcttcaaggccctgtacgaggtgctgcccagccacacctgcggcaaccccggcgagatcctgaagggcgtgctgcacggcaccagattcaacatcggcgacaagatcagatacagctgcctgcccggctacatcctggagggccacgccatcctgacctgcatcgtgagccccggcaacggcgccagctgggacttccccgcccccttctgcagagccgagggcgcctgcggcggcaccctgagaggcaccagcagcagcatcagcagcccccacttccccagcgagtacgagaacaacgccgactgcacctggaccatcctggccgagcccggcgacaccatcgccctggtgttcaccgacttccagctggaggagggctacgacttcctggagatcagcggcaccgaggcccccagcatctggctgaccggcatgaacctgcccagccccgtgatcagcagcaagaactggctgagactgcacttcaccagcgacagcaaccacagaagaaagggcttcaacgcccagttccaggtgaagaaggccatcgagctgaagagcagaggcgtgaagatgctgcccagcaaggacggcagccacaagaacagcgtgctgagccagggcggcgtggccctggtgagcgacatgtgccccgaccccggcatccccgagaacggcagaagagccggcagcgacttcagcagagtgggcgccaacgtgcagttcagctgcgaggacaactacgtgctgcagggcagcaagagcatcacctgccagagagtgaccgagaccctggccgcctggagcgaccacagacccatctgcagagccagaacctgcggcagcaacctgagaggccccagcggcgtgatcaccagccccaactaccccgtgcagtacgaggacaacgcccactgcgtgtgggtgatcaccaccaccgaccccgacaaggtgatcaagctggccttcgaggagttcgagctggagagaggctacgacaccctgaccgtgggcgacgccggcaaggtgggcgacaccagaagcgtgctgtacgtgctgaccggcagcagcgtgcccgacctgatcgtgagcatgagcaaccagatgtggctgcacctgcagagcgacgacagcatcggcagccccggcttcaaggccgtgtaccaggagatcgagaagggcggctgcggcgaccccggcatccccgcctacggcaagagaaccggcagcagcttcctgcacggcgacaccctgaccttcgagtgccccgccgccttcgagctggtgggcgagagagtgatcacctgccagcagaacaaccagtggagcggcaacaagcccagctgcgtgttcagctgcttcttcaacttcaccgccagcagcggcatcatcctgagccccaactaccccgaggagtacggcaacaacatgaactgcgtgtggctgatcatcagcgagcccggcagcagaatccacctgatcttcaacgacttcgacgtggagccccagttcgacttcctggccgtgaaggacgacggcatcagcgacatcaccgtgctgggcaccttcagcggcaacgaggtgcccagccagctggccagcagcggccacatcgtgagactggagttccagagcgaccacagcaccaccggcagaggcttcaacatcacctacaccaccttcggccagaacgagtgccacgaccccggcatccccatcaacggcagaagattcggcgacagattcctgctgggcagcagcgtgagcttccactgcgacgacggcttcgtgaagacccagggcagcgagagcatcacctgcatcctgcaggacggcaacgtggtgtggagcagcaccgtgcccagatgcgaggccccctgcggcggccacctgaccgccagcagcggcgtgatcctgccccccggctggcccggctactacaaggacagcctgcactgcgagtggatcatcgaggccaagcccggccacagcatcaagatcaccttcgacagattccagaccgaggtgaactacgacaccctggaggtgagagacggccccgccagcagcagccccctgatcggcgagtaccacggcacccaggccccccagttcctgatcagcaccggcaacttcatgtacctgctgttcaccaccgacaacagcagaagcagcatcggcttcctgatccactacgagagcgtgaccctggagagcgacagctgcctggaccccggcatccccgtgaacggccacagacacggcggcgacttcggcatcagaagcaccgtgaccttcagctgcgaccccggctacaccctgagcgacgacgagcccctggtgtgcgagagaaaccaccagtggaaccacgccctgcccagctgcgacgccctgtgcggcggctacatccagggcaagagcggcaccgtgctgagccccggcttccccgacttctaccccaacagcctgaactgcacctggaccatcgaggtgagccacggcaagggcgtgcagatgatcttccacaccttccacctggagagcagccacgactacctgctgatcaccgaggacggcagcttcagcgagcccgtggccagactgaccggcagcgtgctgccccacaccatcaaggccggcctgttcggcaacttcaccgcccagctgagattcatcagcgacttcagcatcagctacgagggcttcaacatcaccttcagcgagtacgacctggagccctgcgacgaccccggcgtgcccgccttcagcagaagaatcggcttccacttcggcgtgggcgacagcctgaccttcagctgcttcctgggctacagactggagggcgccaccaagctgacctgcctgggcggcggcagaagagtgtggagcgcccccctgcccagatgcgtggccgagtgcggcgccagcgtgaagggcaacgagggcaccctgctgagccccaacttccccagcaactacgacaacaaccacgagtgcatctacaagatcgagaccgaggccggcaagggcatccacctgagaaccagaagcttccagctgttcgagggcgacaccctgaaggtgtacgacggcaaggacagcagcagcagacccctgggcaccttcaccaagaacgagctgctgggcctgatcctgaacagcaccagcaaccacctgtggctggagttcaacaccaacggcagcgacaccgaccagggcttccagctgacctacaccagcttcgacctggtgaagtgcgaggaccccggcatccccaactacggctacagaatcagagacgagggccacttcaccgacaccgtggtgctgtacagctgcaaccccggctacgccatgcacggcagcaacaccctgacctgcctgagcggcgacagaagagtgtgggacaagcccctgcccagctgcatcgccgagtgcggcggccagatccacgccgccaccagcggcagaatcctgagccccggctaccccgccccctacgacaacaacctgcactgcacctggatcatcgaggccgaccccggcaagaccatcagcctgcacttcatcgtgttcgacaccgagatggcccacgacatcctgaaggtgtgggacggccccgtggacagcgacatcctgctgaaggagtggagcggcagcgccctgcccgaggacatccacagcaccttcaacagcctgaccctgcagttcgacagcgacttcttcatcagcaagagcggcttcagcatccagttcagcaccagcatcgccgccacctgcaacgaccccggcatgccccagaacggcaccagatacggcgacagcagagaggccggcgacaccgtgaccttccagtgcgaccccggctaccagctgcagggccaggccaagatcacctgcgtgcagctgaacaacagattcttctggcagcccgacccccccacctgcatcgccgcctgcggcggcaacctgaccggccccgccggcgtgatcctgagccccaactacccccagccctacccccccggcaaggagtgcgactggagagtgaaggtgaaccccgacttcgtgatcgccctgatcttcaagagcttcaacatggagcccagctacgacttcctgcacatctacgagggcgaggacagcaacagccccctgatcggcagctaccagggcagccaggcccccgagagaatcgagagcagcggcaacagcctgttcctggccttcagaagcgacgccagcgtgggcctgagcggcttcgccatcgagttcaaggagaagcccagagaggcctgcttcgaccccggcaacatcatgaacggcaccagagtgggcaccgacttcaagctgggcagcaccatcacctaccagtgcgacagcggctacaagatcctggaccccagcagcatcacctgcgtgatcggcgccgacggcaagcccagctgggaccaggtgctgcccagctgcaacgccccctgcggcggccagtacaccggcagcgagggcgtggtgctgagccccaactacccccacaactacaccgccggccagatctgcctgtacagcatcaccgtgcccaaggagttcgtggtgttcggccagttcgcctacttccagaccgccctgaacgacctggccgagctgttcgacggcacccacgcccaggccagactgctgagcagcctgagcggcagccacagcggcgagaccctgcccctggccaccagcaaccagatcctgctgagattcagcgccaagagcggcgccagcgccagaggcttccacttcgtgtaccaggccgtgcccagaaccagcgacacccagtgcagcagcgtgcccgagcccagatacggcagaagaatcggcagcgagttcagcgccggcagcatcgtgagattcgagtgcaaccccggctacctgctgcagggcagcaccgccctgcactgccagagcgtgcccaacgccctggcccagtggaacgacaccatccccagctgcgtggtgccctgcagcggcaacttcacccagagaagaggcaccatcctgagccccggctaccccgagccctacggcaacaacctgaactgcatctggaagatcatcgtgaccgagggcagcggcatccagatccaggtgatcagcttcgccaccgagcagaactgggacagcctggagatccacgacggcggcgacgtgaccgcccccagactgggcagcttcagcggcaccaccgtgcccgccctgctgaacagcaccagcaaccagctgtacctgcacttccagagcgacatcagcgtggccgccgccggcttccacctggagtacaagaccgtgggcctggccgcctgccaggagcccgccctgcccagcaacagcatcaagatcggcgacagatacatggtgaacgacgtgctgagcttccagtgcgagcccggctacaccctgcagggcagaagccacatcagctgcatgcccggcaccgtgagaagatggaactaccccagccccctgtgcatcgccacctgcggcggcaccctgagcaccctgggcggcgtgatcctgagccccggcttccccggcagctaccccaacaacctggactgcacctggagaatcagcctgcccatcggctacggcgcccacatccagttcctgaacttcagcaccgaggccaaccacgacttcctggagatccagaacggcccctaccacaccagccccatgatcggccagttcagcggcaccgacctgcccgccgccctgctgagcaccacccacgagaccctgatccacttctacagcgaccacagccagaacagacagggcttcaagctggcctaccaggcctacgagctgcagaactgccccgaccccccccccttccagaacggctacatgatcaacagcgactacagcgtgggccagagcgtgagcttcgagtgctaccccggctacatcctgatcggccaccccgtgctgacctgccagcacggcatcaacagaaactggaactaccccttccccagatgcgacgccccctgcggctacaacgtgaccagccagaacggcaccatctacagccccggcttccccgacgagtaccccatcctgaaggactgcatctggctgatcaccgtgccccccggccacggcgtgtacatcaacttcaccctgctgcagaccgaggccgtgaacgactacatcgccgtgtgggacggccccgaccagaacagcccccagctgggcgtgttcagcggcaacaccgccctggagaccgcctacagcagcaccaaccaggtgctgctgaagttccacagcgacttcagcaacggcggcttcttcgtgctgaacttccacgccttccagctgaagaagtgccagcccccccccgccgtgccccaggccgagatgctgaccgaggacgacgacttcgagatcggcgacttcgtgaagtaccagtgccaccccggctacaccctggtgggcaccgacatcctgacctgcaagctgagcagccagctgcagttcgagggcagcctgcccacctgcgaggcccagtgccccgccaacgaggtgagaaccggcagcagcggcgtgatcctgagccccggctaccccggcaactacttcaacagccagacctgcagctggagcatcaaggtggagcccaactacaacatcaccatcttcgtggacaccttccagagcgagaagcagttcgacgccctggaggtgttcgacggcagcagcggccagagccccctgctggtggtgctgagcggcaaccacaccgagcagagcaacttcaccagcagaagcaaccagctgtacctgagatggagcaccgaccacgccaccagcaagaagggcttcaagatcagatacgccgccccctactgcagcctgacccaccccctgaagaacggcggcatcctgaacagaaccgccggcgccgtgggcagcaaggtgcactacttctgcaagcccggctacagaatggtgggccacagcaacgccacctgcagaagaaaccccctgggcatgtaccagtgggacagcctgacccccctgtgccaggccgtgagctgcggcatccccgagagccccggcaacggcagcttcaccggcaacgagttcaccctggacagcaaggtggtgtacgagtgccacgagggcttcaagctggagagcagccagcaggccaccgccgtgtgccaggaggacggcctgtggagcaacaagggcaagccccccacctgcaagcccgtggcctgccccagcatcgaggcccagctgagcgagcacgtgatctggagactggtgagcggcagcctgaacgagtacggcgcccaggtgctgctgagctgcagccccggctactacctggagggctggagactgctgagatgccaggccaacggcacctggaacatcggcgacgagagacccagctgcagagtgatcagctgcggcagcctgagcttcccccccaacggcaacaagatcggcaccctgaccgtgtacggcgccaccgccatcttcacctgcaacaccggctacaccctggtgggcagccacgtgagagagtgcctggccaacggcctgtggagcggcagcgagaccagatgcctggccggccactgcggcagccccgaccccatcgtgaacggccacatcagcggcgacggcttcagctacagagacaccgtggtgtaccagtgcaaccccggcttcagactggtgggcaccagcgtgagaatctgcctgcaggaccacaagtggagcggccagacccccgtgtgcgtgcccatcacctgcggccaccccggcaaccccgcccacggcttcaccaacggcagcgagttcaacctgaacgacgtggtgaacttcacctgcaacaccggctacctgctgcagggcgtgagcagagcccagtgcagaagcaacggccagtggagcagccccctgcccacctgcagagtggtgaactgcagcgaccccggcttcgtggagaacgccatcagacacggccagcagaacttccccgagagcttcgagtacggcatgagcatcctgtaccactgcaagaagggcttctacctgctgggcagcagcgccctgacctgcatggccaacggcctgtgggacagaagcctgcccaagtgcctggccatcagctgcggccaccccggcgtgcccgccaacgccgtgctgaccggcgagctgttcacctacggcgccgtggtgcactacagctgcagaggcagcgagagcctgatcggcaacgacaccagagtgtgccaggaggacagccactggagcggcgccctgccccactgcaccggcaacaaccccggcttctgcggcgaccccggcacccccgcccacggcagcagactgggcgacgacttcaagaccaagagcctgctgagattcagctgcgagatgggccaccagctgagaggcagccccgagagaacctgcctgctgaacggcagctggagcggcctgcagcccgtgtgcgaggccgtgagctgcggcaaccccggcacccccaccaacggcatgatcgtgagcagcgacggcatcctgttcagcagcagcgtgatctacgcctgctgggagggctacaagaccagcggcctgatgaccagacactgcaccgccaacggcacctggaccggcaccgcccccgactgcaccatcatcagctgcggcgaccccggcaccctggccaacggcatccagttcggcaccgacttcaccttcaacaagaccgtgagctaccagtgcaaccccggctacgtgatggaggccgtgaccagcgccaccatcagatgcaccaaggacggcagatggaaccccagcaagcccgtgtgcaaggccgtgctgtgcccccagcccccccccgtgcagaacggcaccgtggagggcagcgacttcagatggggcagcagcatcagctacagctgcatggacggctaccagctgagccacagcgccatcctgagctgcgagggcagaggcgtgtggaagggcgagatcccccagtgcctgcccgtgttctgcggcgaccccggcatccccgccgagggcagactgagcggcaagagcttcacctacaagagcgaggtgttcttccagtgcaagagccccttcatcctggtgggcagcagcagaagagtgtgccaggccgacggcacctggagcggcatccagcccacctgcatcgaccccgcccacaacacctgccccgaccccggcaccccccacttcggcatccagaacagcagcagaggctacgaggtgggcagcaccgtgttcttcagatgcagaaagggctaccacatccagggcagcaccaccagaacctgcctggccaacctgacctggagcggcatccagaccgagtgcatcccccacgcctgcagacagcccgagacccccgcccacgccgacgtgagagccatcgacctgcccaccttcggctacaccctggtgtacacctgccaccccggcttcttcctggccggcggcagcgagcacagaacctgcaaggccgacatgaagtggaccggcaagagccccgtgtgcaagagcaagggcgtgagagaggtgaacgagaccgtgaccaagacccccgtgcccagcgacgtgttcttcgtgaacagcctgtggaagggctactacgagtacctgggcaagagacagcccgccaccctgaccgtggactggttcaacgccaccagcagcaaggtgaacgccaccttcagcgaggccagccccgtggagctgaagctgaccggcatctacaagaaggaggaggcccacctgctgctgaaggccttccagatcaagggccaggccgacatcttcgtgagcaagttcgagaacgacaactggggcctggacggctacgtgagcagcggcctggagagaggcggcttcaccttccagggcgacatccacggcaaggacttcggcaagttcaagctggagagacaggaccccctgaaccccgaccaggacagcagcagccactaccacggcaccagcagcggcagcgtggccgccgccatcctggtgcccttcttcgccctgatcctgagcggcttcgccttctacctgtacaagcacagaaccagacccaaggtgcagtacaacggctacgccggccacgagaacagcaacggccaggccagcttcgagaaccccatgtacgacaccaacctgaagcccaccgaggccaaggccgtgagattcgacaccaccctgaacaccgtgtgcaccgtggtgtag

SEQ ID NO: 227792 - DNA, 10695 bp, Artificial Sequence
  derived and/or modified sequence
atgaccgcctggagaagattccagagcctgctgctgctgctgggcctgctggtgctgtgcgccagactgctgaccgccgccaagggccagaactgcggcggcctggtgcagggccccaacggcaccatcgagagccccggcttcccccacggctaccccaactacgccaactgcacctggatcatcatcaccggcgagagaaacagaatccagctgagcttccacaccttcgccctggaggaggacttcgacatcctgagcgtgtacgacggccagccccagcagggcaacctgaaggtgagactgagcggcttccagctgcccagcagcatcgtgagcaccggcagcatcctgaccctgtggttcaccaccgacttcgccgtgagcgcccagggcttcaaggccctgtacgaggtgctgcccagccacacctgcggcaaccccggcgagatcctgaagggcgtgctgcacggcaccagattcaacatcggcgacaagatcagatacagctgcctgcccggctacatcctggagggccacgccatcctgacctgcatcgtgagccccggcaacggcgccagctgggacttccccgcccccttctgcagagccgagggcgcctgcggcggcaccctgagaggcaccagcagcagcatcagcagcccccacttccccagcgagtacgagaacaacgccgactgcacctggaccatcctggccgagcccggcgacaccatcgccctggtgttcaccgacttccagctggaggagggctacgacttcctggagatcagcggcaccgaggcccccagcatctggctgaccggcatgaacctgcccagccccgtgatcagcagcaagaactggctgagactgcacttcaccagcgacagcaaccacagaagaaagggcttcaacgcccagttccaggtgaagaaggccatcgagctgaagagcagaggcgtgaagatgctgcccagcaaggacggcagccacaagaacagcgtgctgagccagggcggcgtggccctggtgagcgacatgtgccccgaccccggcatccccgagaacggcagaagagccggcagcgacttcagagtgggcgccaacgtgcagttcagctgcgaggacaactacgtgctgcagggcagcaagagcatcacctgccagagagtgaccgagaccctggccgcctggagcgaccacagacccatctgcagagccagaacctgcggcagcaacctgagaggccccagcggcgtgatcaccagccccaactaccccgtgcagtacgaggacaacgcccactgcgtgtgggtgatcaccaccaccgaccccgacaaggtgatcaagctggccttcgaggagttcgagctggagagaggctacgacaccctgaccgtgggcgacgccggcaaggtgggcgacaccagaagcgtgctgtacgtgctgaccggcagcagcgtgcccgacctgatcgtgagcatgagcaaccagatgtggctgcacctgcagagcgacgacagcatcggcagccccggcttcaaggccgtgtaccaggagatcgagaagggcggctgcggcgaccccggcatccccgcctacggcaagagaaccggcagcagcttcctgcacggcgacaccctgaccttcgagtgccccgccgccttcgagctggtgggcgagagagtgatcacctgccagcagaacaaccagtggagcggcaacaagcccagctgcgtgttcagctgcttcttcaacttcaccgccagcagcggcatcatcctgagccccaactaccccgaggagtacggcaacaacatgaactgcgtgtggctgatcatcagcgagcccggcagcagaatccacctgatcttcaacgacttcgacgtggagccccagttcgacttcctggccgtgaaggacgacggcatcagcgacatcaccgtgctgggcaccttcagcggcaacgaggtgcccagccagctggccagcagcggccacatcgtgagactggagttccagagcgaccacagcaccaccggcagaggcttcaacatcacctacaccaccttcggccagaacgagtgccacgaccccggcatccccatcaacggcagaagattcggcgacagattcctgctgggcagcagcgtgagcttccactgcgacgacggcttcgtgaagacccagggcagcgagagcatcacctgcatcctgcaggacggcaacgtggtgtggagcagcaccgtgcccagatgcgaggccccctgcggcggccacctgaccgccagcagcggcgtgatcctgccccccggctggcccggctactacaaggacagcctgcactgcgagtggatcatcgaggccaagcccggccacagcatcaagatcaccttcgacagattccagaccgaggtgaactacgacaccctggaggtgagagacggccccgccagcagcagccccctgatcggcgagtaccacggcacccaggccccccagttcctgatcagcaccggcaacttcatgtacctgctgttcaccaccgacaacagcagaagcagcatcggcttcctgatccactacgagagcgtgaccctggagagcgacagctgcctggaccccggcatccccgtgaacggccacagacacggcggcgacttcggcatcagaagcaccgtgaccttcagctgcgaccccggctacaccctgagcgacgacgagcccctggtgtgcgagagaaaccaccagtggaaccacgccctgcccagctgcgacgccctgtgcggcggctacatccagggcaagagcggcaccgtgctgagccccggcttccccgacttctaccccaacagcctgaactgcacctggaccatcgaggtgagccacggcaagggcgtgcagatgatcttccacaccttccacctggagagcagccacgactacctgctgatcaccgaggacggcagcttcagcgagcccgtggccagactgaccggcagcgtgctgccccacaccatcaaggccggcctgttcggcaacttcaccgcccagctgagattcatcagcgacttcagcatcagctacgagggcttcaacatcaccttcagcgagtacgacctggagccctgcgacgaccccggcgtgcccgccttcagcagaagaatcggcttccacttcggcgtgggcgacagcctgaccttcagctgcttcctgggctacagactggagggcgccaccaagctgacctgcctgggcggcggcagaagagtgtggagcgcccccctgcccagatgcgtggccgagtgcggcgccagcgtgaagggcaacgagggcaccctgctgagccccaacttccccagcaactacgacaacaaccacgagtgcatctacaagatcgagaccgaggccggcaagggcatccacctgagaaccagaagcttccagctgttcgagggcgacaccctgaaggtgtacgacggcaaggacagcagcagcagacccctgggcaccttcaccaagaacgagctgctgggcctgatcctgaacagcaccagcaaccacctgtggctggagttcaacaccaacggcagcgacaccgaccagggcttccagctgacctacaccagcttcgacctggtgaagtgcgaggaccccggcatccccaactacggctacagaatcagagacgagggccacttcaccgacaccgtggtgctgtacagctgcaaccccggctacgccatgcacggcagcaacaccctgacctgcctgagcggcgacagaagagtgtgggacaagcccctgcccagctgcatcgccgagtgcggcggccagatccacgccgccaccagcggcagaatcctgagccccggctaccccgccccctacgacaacaacctgcactgcacctggatcatcgaggccgaccccggcaagaccatcagcctgcacttcatcgtgttcgacaccgagatggcccacgacatcctgaaggtgtgggacggccccgtggacagcgacatcctgctgaaggagtggagcggcagcgccctgcccgaggacatccacagcaccttcaacagcctgaccctgcagttcgacagcgacttcttcatcagcaagagcggcttcagcatccagttcagcaccagcatcgccgccacctgcaacgaccccggcatgccccagaacggcaccagatacggcgacagcagagaggccggcgacaccgtgaccttccagtgcgaccccggctaccagctgcagggccaggccaagatcacctgcgtgcagctgaacaacagattcttctggcagcccgacccccccacctgcatcgccgcctgcggcggcaacctgaccggccccgccggcgtgatcctgagccccaactacccccagccctacccccccggcaaggagtgcgactggagagtgaaggtgaaccccgacttcgtgatcgccctgatcttcaagagcttcaacatggagcccagctacgacttcctgcacatctacgagggcgaggacagcaacagccccctgatcggcagctaccagggcagccaggcccccgagagaatcgagagcagcggcaacagcctgttcctggccttcagaagcgacgccagcgtgggcctgagcggcttcgccatcgagttcaaggagaagcccagagaggcctgcttcgaccccggcaacatcatgaacggcaccagagtgggcaccgacttcaagctgggcagcaccatcacctaccagtgcgacagcggctacaagatcctggaccccagcagcatcacctgcgtgatcggcgccgacggcaagcccagctgggaccaggtgctgcccagctgcaacgccccctgcggcggccagtacaccggcagcgagggcgtggtgctgagccccaactacccccacaactacaccgccggccagatctgcctgtacagcatcaccgtgcccaaggagttcgtggtgttcggccagttcgcctacttccagaccgccctgaacgacctggccgagctgttcgacggcacccacgcccaggccagactgctgagcagcctgagcggcagccacagcggcgagaccctgcccctggccaccagcaaccagatcctgctgagattcagcgccaagagcggcgccagcgccagaggcttccacttcgtgtaccaggccgtgcccagaaccagcgacacccagtgcagcagcgtgcccgagcccagatacggcagaagaatcggcagcgagttcagcgccggcagcatcgtgagattcgagtgcaaccccggctacctgctgcagggcagcaccgccctgcactgccagagcgtgcccaacgccctggcccagtggaacgacaccatccccagctgcgtggtgccctgcagcggcaacttcacccagagaagaggcaccatcctgagccccggctaccccgagccctacggcaacaacctgaactgcatctggaagatcatcgtgaccgagggcagcggcatccagatccaggtgatcagcttcgccaccgagcagaactgggacagcctggagatccacgacggcggcgacgtgaccgcccccagactgggcagcttcagcggcaccaccgtgcccgccctgctgaacagcaccagcaaccagctgtacctgcacttccagagcgacatcagcgtggccgccgccggcttccacctggagtacaagaccgtgggcctggccgcctgccaggagcccgccctgcccagcaacagcatcaagatcggcgacagatacatggtgaacgacgtgctgagcttccagtgcgagcccggctacaccctgcagggcagaagccacatcagctgcatgcccggcaccgtgagaagatggaactaccccagccccctgtgcatcgccacctgcggcggcaccctgagcaccctgggcggcgtgatcctgagccccggcttccccggcagctaccccaacaacctggactgcacctggagaatcagcctgcccatcggctacggcgcccacatccagttcctgaacttcagcaccgaggccaaccacgacttcctggagatccagaacggcccctaccacaccagccccatgatcggccagttcagcggcaccgacctgcccgccgccctgctgagcaccacccacgagaccctgatccacttctacagcgaccacagccagaacagacagggcttcaagctggcctaccaggcctacgagctgcagaactgccccgaccccccccccttccagaacggctacatgatcaacagcgactacagcgtgggccagagcgtgagcttcgagtgctaccccggctacatcctgatcggccaccccgtgctgacctgccagcacggcatcaacagaaactggaactaccccttccccagatgcgacgccccctgcggctacaacgtgaccagccagaacggcaccatctacagccccggcttccccgacgagtaccccatcctgaaggactgcatctggctgatcaccgtgccccccggccacggcgtgtacatcaacttcaccctgctgcagaccgaggccgtgaacgactacatcgccgtgtgggacggccccgaccagaacagcccccagctgggcgtgttcagcggcaacaccgccctggagaccgcctacagcagcaccaaccaggtgctgctgaagttccacagcgacttcagcaacggcggcttcttcgtgctgaacttccacgccttccagctgaagaagtgccagcccccccccgccgtgccccaggccgagatgctgaccgaggacgacgacttcgagatcggcgacttcgtgaagtaccagtgccaccccggctacaccctggtgggcaccgacatcctgacctgcaagctgagcagccagctgcagttcgagggcagcctgcccacctgcgaggcccagtgccccgccaacgaggtgagaaccggcagcagcggcgtgatcctgagccccggctaccccggcaactacttcaacagccagacctgcagctggagcatcaaggtggagcccaactacaacatcaccatcttcgtggacaccttccagagcgagaagcagttcgacgccctggaggtgttcgacggcagcagcggccagagccccctgctggtggtgctgagcggcaaccacaccgagcagagcaacttcaccagcagaagcaaccagctgtacctgagatggagcaccgaccacgccaccagcaagaagggcttcaagatcagatacgccgccccctactgcagcctgacccaccccctgaagaacggcggcatcctgaacagaaccgccggcgccgtgggcagcaaggtgcactacttctgcaagcccggctacagaatggtgggccacagcaacgccacctgcagaagaaaccccctgggcatgtaccagtgggacagcctgacccccctgtgccaggccgtgagctgcggcatccccgagagccccggcaacggcagcttcaccggcaacgagttcaccctggacagcaaggtggtgtacgagtgccacgagggcttcaagctggagagcagccagcaggccaccgccgtgtgccaggaggacggcctgtggagcaacaagggcaagccccccacctgcaagcccgtggcctgccccagcatcgaggcccagctgagcgagcacgtgatctggagactggtgagcggcagcctgaacgagtacggcgcccaggtgctgctgagctgcagccccggctactacctggagggctggagactgctgagatgccaggccaacggcacctggaacatcggcgacgagagacccagctgcagagtgatcagctgcggcagcctgagcttcccccccaacggcaacaagatcggcaccctgaccgtgtacggcgccaccgccatcttcacctgcaacaccggctacaccctggtgggcagccacgtgagagagtgcctggccaacggcctgtggagcggcagcgagaccagatgcctggccggccactgcggcagccccgaccccatcgtgaacggccacatcagcggcgacggcttcagctacagagacaccgtggtgtaccagtgcaaccccggcttcagactggtgggcaccagcgtgagaatctgcctgcaggaccacaagtggagcggccagacccccgtgtgcgtgcccatcacctgcggccaccccggcaaccccgcccacggcttcaccaacggcagcgagttcaacctgaacgacgtggtgaacttcacctgcaacaccggctacctgctgcagggcgtgagcagagcccagtgcagaagcaacggccagtggagcagccccctgcccacctgcagagtggtgaactgcagcgaccccggcttcgtggagaacgccatcagacacggccagcagaacttccccgagagcttcgagtacggcatgagcatcctgtaccactgcaagaagggcttctacctgctgggcagcagcgccctgacctgcatggccaacggcctgtgggacagaagcctgcccaagtgcctggccatcagctgcggccaccccggcgtgcccgccaacgccgtgctgaccggcgagctgttcacctacggcgccgtggtgcactacagctgcagaggcagcgagagcctgatcggcaacgacaccagagtgtgccaggaggacagccactggagcggcgccctgccccactgcaccggcaacaaccccggcttctgcggcgaccccggcacccccgcccacggcagcagactgggcgacgacttcaagaccaagagcctgctgagattcagctgcgagatgggccaccagctgagaggcagccccgagagaacctgcctgctgaacggcagctggagcggcctgcagcccgtgtgcgaggccgtgagctgcggcaaccccggcacccccaccaacggcatgatcgtgagcagcgacggcatcctgttcagcagcagcgtgatctacgcctgctgggagggctacaagaccagcggcctgatgaccagacactgcaccgccaacggcacctggaccggcaccgcccccgactgcaccatcatcagctgcggcgaccccggcaccctggccaacggcatccagttcggcaccgacttcaccttcaacaagaccgtgagctaccagtgcaaccccggctacgtgatggaggccgtgaccagcgccaccatcagatgcaccaaggacggcagatggaaccccagcaagcccgtgtgcaaggccgtgctgtgcccccagcccccccccgtgcagaacggcaccgtggagggcagcgacttcagatggggcagcagcatcagctacagctgcatggacggctaccagctgagccacagcgccatcctgagctgcgagggcagaggcgtgtggaagggcgagatcccccagtgcctgcccgtgttctgcggcgaccccggcatccccgccgagggcagactgagcggcaagagcttcacctacaagagcgaggtgttcttccagtgcaagagccccttcatcctggtgggcagcagcagaagagtgtgccaggccgacggcacctggagcggcatccagcccacctgcatcgaccccgcccacaacacctgccccgaccccggcaccccccacttcggcatccagaacagcagcagaggctacgaggtgggcagcaccgtgttcttcagatgcagaaagggctaccacatccagggcagcaccaccagaacctgcctggccaacctgacctggagcggcatccagaccgagtgcatcccccacgcctgcagacagcccgagacccccgcccacgccgacgtgagagccatcgacctgcccaccttcggctacaccctggtgtacacctgccaccccggcttcttcctggccggcggcagcgagcacagaacctgcaaggccgacatgaagtggaccggcaagagccccgtgtgcaagagcaagggcgtgagagaggtgaacgagaccgtgaccaagacccccgtgcccagcgacgtgttcttcgtgaacagcctgtggaagggctactacgagtacctgggcaagagacagcccgccaccctgaccgtggactggttcaacgccaccagcagcaaggtgaacgccaccttcagcgaggccagccccgtggagctgaagctgaccggcatctacaagaaggaggaggcccacctgctgctgaaggccttccagatcaagggccaggccgacatcttcgtgagcaagttcgagaacgacaactggggcctggacggctacgtgagcagcggcctggagagaggcggcttcaccttccagggcgacatccacggcaaggacttcggcaagttcaagctggagagacaggaccccctgaaccccgaccaggacagcagcagccactaccacggcaccagcagcggcagcgtggccgccgccatcctggtgcccttcttcgccctgatcctgagcggcttcgccttctacctgtacaagcacagaaccagacccaaggtgcagtacaacggctacgccggccacgagaacagcaacggccaggccagcttcgagaaccccatgtacgacaccaacctgaagcccaccgaggccaaggccgtgagattcgacaccaccctgaacaccgtgtgcaccgtggtgtag

SEQ ID NO: 227793 - DNA, 6330 bp, Artificial Sequence
  derived and/or modified sequence
atgaccgcctggagaagattccagagcctgctgctgctgctgggcctgctggtgctgtgcgccagactgctgaccgccgccaagggccagaactgcggcggcctggtgcagggccccaacggcaccatcgagagccccggcttcccccacggctaccccaactacgccaactgcacctggatcatcatcaccggcgagagaaacagaatccagctgagcttccacaccttcgccctggaggaggacttcgacatcctgagcgtgtacgacggccagccccagcagggcaacctgaaggtgagactgagcggcttccagctgcccagcagcatcgtgagcaccggcagcatcctgaccctgtggttcaccaccgacttcgccgtgagcgcccagggcttcaaggccctgtacgaggtgctgcccagccacacctgcggcaaccccggcgagatcctgaagggcgtgctgcacggcaccagattcaacatcggcgacaagatcagatacagctgcctgcccggctacatcctggagggccacgccatcctgacctgcatcgtgagccccggcaacggcgccagctgggacttccccgcccccttctgcagagccgagggcgcctgcggcggcaccctgagaggcaccagcagcagcatcagcagcccccacttccccagcgagtacgagaacaacgccgactgcacctggaccatcctggccgagcccggcgacaccatcgccctggtgttcaccgacttccagctggaggagggctacgacttcctggagatcagcggcaccgaggcccccagcatctggctgaccggcatgaacctgcccagccccgtgatcagcagcaagaactggctgagactgcacttcaccagcgacagcaaccacagaagaaagggcttcaacgcccagttccaggtgaagaaggccatcgagctgaagagcagaggcgtgaagatgctgcccagcaaggacggcagccacaagaacagcgtgctgagccagggcggcgtggccctggtgagcgacatgtgccccgaccccggcatccccgagaacggcagaagagccggcagcgacttcagagtgggcgccaacgtgcagttcagctgcgaggacaactacgtgctgcagggcagcaagagcatcacctgccagagagtgaccgagaccctggccgcctggagcgaccacagacccatctgcagagccagaacctgcggcagcaacctgagaggccccagcggcgtgatcaccagccccaactaccccgtgcagtacgaggacaacgcccactgcgtgtgggtgatcaccaccaccgaccccgacaaggtgatcaagctggccttcgaggagttcgagctggagagaggctacgacaccctgaccgtgggcgacgccggcaaggtgggcgacaccagaagcgtgctgtacgtgctgaccggcagcagcgtgcccgacctgatcgtgagcatgagcaaccagatgtggctgcacctgcagagcgacgacagcatcggcagccccggcttcaaggccgtgtaccaggagatcgagaagggcggctgcggcgaccccggcatccccgcctacggcaagagaaccggcagcagcttcctgcacggcgacaccctgaccttcgagtgccccgccgccttcgagctggtgggcgagagagtgatcacctgccagcagaacaaccagtggagcggcaacaagcccagctgcgtgttcagctgcttcttcaacttcaccgccagcagcggcatcatcctgagccccaactaccccgaggagtacggcaacaacatgaactgcgtgtggctgatcatcagcgagcccggcagcagaatccacctgatcttcaacgacttcgacgtggagccccagttcgacttcctggccgtgaaggacgacggcatcagcgacatcaccgtgctgggcaccttcagcggcaacgaggtgcccagccagctggccagcagcggccacatcgtgagactggagttccagagcgaccacagcaccaccggcagaggcttcaacatcacctacaccaccttcggccagaacgagtgccacgaccccggcatccccatcaacggcagaagattcggcgacagattcctgctgggcagcagcgtgagcttccactgcgacgacggcttcgtgaagacccagggcagcgagagcatcacctgcatcctgcaggacggcaacgtggtgtggagcagcaccgtgcccagatgcgaggccccctgcggcggccacctgaccgccagcagcggcgtgatcctgccccccggctggcccggctactacaaggacagcctgcactgcgagtggatcatcgaggccaagcccggccacagcatcaagatcaccttcgacagattccagaccgaggtgaactacgacaccctggaggtgagagacggccccgccagcagcagccccctgatcggcgagtaccacggcacccaggccccccagttcctgatcagcaccggcaacttcatgtacctgctgttcaccaccgacaacagcagaagcagcatcggcttcctgatccactacgagagcgtgaccctggagagcgacagctgcctggaccccggcatccccgtgaacggccacagacacggcggcgacttcggcatcagaagcaccgtgaccttcagctgcgaccccggctacaccctgagcgacgacgagcccctggtgtgcgagagaaaccaccagtggaaccacgccctgcccagctgcgacgccctgtgcggcggctacatccagggcaagagcggcaccgtgctgagccccggcttccccgacttctaccccaacagcctgaactgcacctggaccatcgaggtgagccacggcaagggcgtgcagatgatcttccacaccttccacctggagagcagccacgactacctgctgatcaccgaggacggcagcttcagcgagcccgtggccagactgaccggcagcgtgctgccccacaccatcaaggccggcctgttcggcaacttcaccgcccagctgagattcatcagcgacttcagcatcagctacgagggcttcaacatcaccttcagcgagtacgacctggagccctgcgacgaccccggcgtgcccgccttcagcagaagaatcggcttccacttcggcgtgggcgacagcctgaccttcagctgcttcctgggctacagactggagggcgccaccaagctgacctgcctgggcggcggcagaagagtgtggagcgcccccctgcccagatgcgtggccgagtgcggcgccagcgtgaagggcaacgagggcaccctgctgagccccaacttccccagcaactacgacaacaaccacgagtgcatctacaagatcgagaccgaggccggcaagggcatccacctgagaaccagaagcttccagctgttcgagggcgacaccctgaaggtgtacgacggcaaggacagcagcagcagacccctgggcaccttcaccaagaacgagctgctgggcctgatcctgaacagcaccagcaaccacctgtggctggagttcaacaccaacggcagcgacaccgaccagggcttccagctgacctacaccagcttcgacctggtgaagtgcgaggaccccggcatccccaactacggctacagaatcagagacgagggccacttcaccgacaccgtggtgctgtacagctgcaaccccggctacgccatgcacggcagcaacaccctgacctgcctgagcggcgacagaagagtgtgggacaagcccctgcccagctgcatcgccgagtgcggcggccagatccacgccgccaccagcggcagaatcctgagccccggctaccccgccccctacgacaacaacctgcactgcacctggatcatcgaggccgaccccggcaagaccatcagcctgcacttcatcgtgttcgacaccgagatggcccacgacatcctgaaggtgtgggacggccccgtggacagcgacatcctgctgaaggagtggagcggcagcgccctgcccgaggacatccacagcaccttcaacagcctgaccctgcagttcgacagcgacttcttcatcagcaagagcggcttcagcatccagttcagcaccagcatcgccgccacctgcaacgaccccggcatgccccagaacggcaccagatacggcgacagcagagaggccggcgacaccgtgaccttccagtgcgaccccggctaccagctgcagggccaggccaagatcacctgcgtgcagctgaacaacagattcttctggcagcccgacccccccacctgcatcgccgcctgcggcggcaacctgaccggccccgccggcgtgatcctgagccccaactacccccagccctacccccccggcaaggagtgcgactggagagtgaaggtgaaccccgacttcgtgatcgccctgatcttcaagagcttcaacatggagcccagctacgacttcctgcacatctacgagggcgaggacagcaacagccccctgatcggcagctaccagggcagccaggcccccgagagaatcgagagcagcggcaacagcctgttcctggccttcagaagcgacgccagcgtgggcctgagcggcttcgccatcgagttcaaggagaagcccagagaggcctgcttcgaccccggcaacatcatgaacggcaccagagtgggcaccgacttcaagctgggcagcaccatcacctaccagtgcgacagcggctacaagatcctggaccccagcagcatcacctgcgtgatcggcgccgacggcaagcccagctgggaccaggtgctgcccagctgcaacgccccctgcggcggccagtacaccggcagcgagggcgtggtgctgagccccaactacccccacaactacaccgccggccagatctgcctgtacagcatcaccgtgcccaaggagttcgtggtgttcggccagttcgcctacttccagaccgccctgaacgacctggccgagctgttcgacggcacccacgcccaggccagactgctgagcagcctgagcggcagccacagcggcgagaccctgcccctggccaccagcaaccagatcctgctgagattcagcgccaagagcggcgccagcgccagaggcttccacttcgtgtaccaggccgtgcccagaaccagcgacacccagtgcagcagcgtgcccgagcccagatacggcagaagaatcggcagcgagttcagcgccggcagcatcgtgagattcgagtgcaaccccggctacctgctgcagggcagcaccgccctgcactgccagagcgtgcccaacgccctggcccagtggaacgacaccatccccagctgcgtggtgccctgcagcggcaacttcacccagagaagaggcaccatcctgagccccggctaccccgagccctacggcaacaacctgaactgcatctggaagatcatcgtgaccgagggcagcggcatccagatccaggtgatcagcttcgccaccgagcagaactgggacagcctggagatccacgacggcggcgacgtgaccgcccccagactgggcagcttcagcggcaccaccgtgcccgccctgctgaacagcaccagcaaccagctgtacctgcacttccagagcgacatcagcgtggccgccgccggcttccacctggagtacaagaccgtgggcctggccgcctgccaggagcccgccctgcccagcaacagcatcaagatcggcgacagatacatggtgaacgacgtgctgagcttccagtgcgagcccggctacaccctgcagggcagaagccacatcagctgcatgcccggcaccgtgagaagatggaactaccccagccccctgtgcatcgccacctgcggcggcaccctgagcaccctgggcggcgtgatcctgagccccggcttccccggcagctaccccaacaacctggactgcacctggagaatcagcctgcccatcggctacggcgcccacatccagttcctgaacttcagcaccgaggccaaccacgacttcctggagatccagaacggcccctaccacaccagccccatgatcggccagttcagcggcaccgacctgcccgccgccctgctgagcaccacccacgagaccctgatccacttctacagcgaccacagccagaacagacagggcttcaagctggcctaccagggcggcagcggcaacatcggccccgccttcccctgcctggacacccccttccaggccagatgccagggcgaggagagaaccttcaactag

SEQ ID NO: 227794 - DNA, 10164 bp, Artificial Sequence
  derived and/or modified sequence
atgaccgcctggagaagattccagagcctgctgctgctgctgggcctgctggtgctgtgcgccagactgctgaccgccgccaagggccagaactgcggcggcctggtgcagggccccaacggcaccatcgagagccccggcttcccccacggctaccccaactacgccaactgcacctggatcatcatcaccggcgagagaaacagaatccagctgagcttccacaccttcgccctggaggaggacttcgacatcctgagcgtgtacgacggccagccccagcagggcaacctgaaggtgagactgagcggcttccagctgcccagcagcatcgtgagcaccggcagcatcctgaccctgtggttcaccaccgacttcgccgtgagcgcccagggcttcaaggccctgtacgaggtgctgcccagccacacctgcggcaaccccggcgagatcctgaagggcgtgctgcacggcaccagattcaacatcggcgacaagatcagatacagctgcctgcccggctacatcctggagggccacgccatcctgacctgcatcgtgagccccggcaacggcgccagctgggacttccccgcccccttctgcagagccgagggcgcctgcggcggcaccctgagaggcaccagcagcagcatcagcagcccccacttccccagcgagtacgagaacaacgccgactgcacctggaccatcctggccgagcccggcgacaccatcgccctggtgttcaccgacttccagctggaggagggctacgacttcctggagatcagcggcaccgaggcccccagcatctggctgaccggcatgaacctgcccagccccgtgatcagcagcaagaactggctgagactgcacttcaccagcgacagcaaccacagaagaaagggcttcaacgcccagttccaggtgaagaaggccatcgagctgaagagcagaggcgtgaagatgctgcccagcaaggacggcagccacaagaacagcgtgctgagccagggcggcgtggccctggtgagcgacatgtgccccgaccccggcatccccgagaacggcagaagagccggcagcgacttcagagtgggcgccaacgtgcagttcagctgcgaggacaactacgtgctgcagggcagcaagagcatcacctgccagagagtgaccgagaccctggccgcctggagcgaccacagacccatctgcagagccagaacctgcggcagcaacctgagaggccccagcggcgtgatcaccagccccaactaccccgtgcagtacgaggacaacgcccactgcgtgtgggtgatcaccaccaccgaccccgacaaggtgatcaagctggccttcgaggagttcgagctggagagaggctacgacaccctgaccgtgggcgacgccggcaaggtgggcgacaccagaagcgtgctgtacgtgctgaccggcagcagcgtgcccgacctgatcgtgagcatgagcaaccagatgtggctgcacctgcagagcgacgacagcatcggcagccccggcttcaaggccgtgtaccaggagatcgagaagggcggctgcggcgaccccggcatccccgcctacggcaagagaaccggcagcagcttcctgcacggcgacaccctgaccttcgagtgccccgccgccttcgagctggtgggcgagagagtgatcacctgccagcagaacaaccagtggagcggcaacaagcccagctgcgtgttcagctgcttcttcaacttcaccgccagcagcggcatcatcctgagccccaactaccccgaggagtacggcaacaacatgaactgcgtgtggctgatcatcagcgagcccggcagcagaatccacctgatcttcaacgacttcgacgtggagccccagttcgacttcctggccgtgaaggacgacggcatcagcgacatcaccgtgctgggcaccttcagcggcaacgaggtgcccagccagctggccagcagcggccacatcgtgagactggagttccagagcgaccacagcaccaccggcagaggcttcaacatcacctacaccaccttcggccagaacgagtgccacgaccccggcatccccatcaacggcagaagattcggcgacagattcctgctgggcagcagcgtgagcttccactgcgacgacggcttcgtgaagacccagggcagcgagagcatcacctgcatcctgcaggacggcaacgtggtgtggagcagcaccgtgcccagatgcgaggccccctgcggcggccacctgaccgccagcagcggcgtgatcctgccccccggctggcccggctactacaaggacagcctgcactgcgagtggatcatcgaggccaagcccggccacagcatcaagatcaccttcgacagattccagaccgaggtgaactacgacaccctggaggtgagagacggccccgccagcagcagccccctgatcggcgagtaccacggcacccaggccccccagttcctgatcagcaccggcaacttcatgtacctgctgttcaccaccgacaacagcagaagcagcatcggcttcctgatccactacgagagcgtgaccctggagagcgacagctgcctggaccccggcatccccgtgaacggccacagacacggcggcgacttcggcatcagaagcaccgtgaccttcagctgcgaccccggctacaccctgagcgacgacgagcccctggtgtgcgagagaaaccaccagtggaaccacgccctgcccagctgcgacgccctgtgcggcggctacatccagggcaagagcggcaccgtgctgagccccggcttccccgacttctaccccaacagcctgaactgcacctggaccatcgaggtgagccacggcaagggcgtgcagatgatcttccacaccttccacctggagagcagccacgactacctgctgatcaccgaggacggcagcttcagcgagcccgtggccagactgaccggcagcgtgctgccccacaccatcaaggccggcctgttcggcaacttcaccgcccagctgagattcatcagcgacttcagcatcagctacgagggcttcaacatcaccttcagcgagtacgacctggagccctgcgacgaccccggcgtgcccgccttcagcagaagaatcggcttccacttcggcgtgggcgacagcctgaccttcagctgcttcctgggctacagactggagggcgccaccaagctgacctgcctgggcggcggcagaagagtgtggagcgcccccctgcccagatgcgtggccgagtgcggcgccagcgtgaagggcaacgagggcaccctgctgagccccaacttccccagcaactacgacaacaaccacgagtgcatctacaagatcgagaccgaggccggcaagggcatccacctgagaaccagaagcttccagctgttcgagggcgacaccctgaaggtgtacgacggcaaggacagcagcagcagacccctgggcaccttcaccaagaacgagctgctgggcctgatcctgaacagcaccagcaaccacctgtggctggagttcaacaccaacggcagcgacaccgaccagggcttccagctgacctacaccagcttcgacctggtgaagtgcgaggaccccggcatccccaactacggctacagaatcagagacgagggccacttcaccgacaccgtggtgctgtacagctgcaaccccggctacgccatgcacggcagcaacaccctgacctgcctgagcggcgacagaagagtgtgggacaagcccctgcccagctgcatcgccgagtgcggcggccagatccacgccgccaccagcggcagaatcctgagccccggctaccccgccccctacgacaacaacctgcactgcacctggatcatcgaggccgaccccggcaagaccatcagcctgcacttcatcgtgttcgacaccgagatggcccacgacatcctgaaggtgtgggacggccccgtggacagcgacatcctgctgaaggagtggagcggcagcgccctgcccgaggacatccacagcaccttcaacagcctgaccctgcagttcgacagcgacttcttcatcagcaagagcggcttcagcatccagttcagcaccagcatcgccgccacctgcaacgaccccggcatgccccagaacggcaccagatacggcgacagcagagaggccggcgacaccgtgaccttccagtgcgaccccggctaccagctgcagggccaggccaagatcacctgcgtgcagctgaacaacagattcttctggcagcccgacccccccacctgcatcgccgcctgcggcggcaacctgaccggccccgccggcgtgatcctgagccccaactacccccagccctacccccccggcaaggagtgcgactggagagtgaaggtgaaccccgacttcgtgatcgccctgatcttcaagagcttcaacatggagcccagctacgacttcctgcacatctacgagggcgaggacagcaacagccccctgatcggcagctaccagggcagccaggcccccgagagaatcgagagcagcggcaacagcctgttcctggccttcagaagcgacgccagcgtgggcctgagcggcttcgccatcgagttcaaggagaagcccagagaggcctgcttcgaccccggcaacatcatgaacggcaccagagtgggcaccgacttcaagctgggcagcaccatcacctaccagtgcgacagcggctacaagatcctggaccccagcagcatcacctgcgtgatcggcgccgacggcaagcccagctgggaccaggtgctgcccagctgcaacgccccctgcggcggccagtacaccggcagcgagggcgtggtgctgagccccaactacccccacaactacaccgccggccagatctgcctgtacagcatcaccgtgcccaaggagttcgtggtgttcggccagttcgcctacttccagaccgccctgaacgacctggccgagctgttcgacggcacccacgcccaggccagactgctgagcagcctgagcggcagccacagcggcgagaccctgcccctggccaccagcaaccagatcctgctgagattcagcgccaagagcggcgccagcgccagaggcttccacttcgtgtaccaggccgtgcccagaaccagcgacacccagtgcagcagcgtgcccgagcccagatacggcagaagaatcggcagcgagttcagcgccggcagcatcgtgagattcgagtgcaaccccggctacctgctgcagggcagcaccgccctgcactgccagagcgtgcccaacgccctggcccagtggaacgacaccatccccagctgcgtggtgccctgcagcggcaacttcacccagagaagaggcaccatcctgagccccggctaccccgagccctacggcaacaacctgaactgcatctggaagatcatcgtgaccgagggcagcggcatccagatccaggtgatcagcttcgccaccgagcagaactgggacagcctggagatccacgacggcggcgacgtgaccgcccccagactgggcagcttcagcggcaccaccgtgcccgccctgctgaacagcaccagcaaccagctgtacctgcacttccagagcgacatcagcgtggccgccgccggcttccacctggagtacaagaccgtgggcctggccgcctgccaggagcccgccctgcccagcaacagcatcaagatcggcgacagatacatggtgaacgacgtgctgagcttccagtgcgagcccggctacaccctgcagggcagaagccacatcagctgcatgcccggcaccgtgagaagatggaactaccccagccccctgtgcatcgccacctgcggcggcaccctgagcaccctgggcggcgtgatcctgagccccggcttccccggcagctaccccaacaacctggactgcacctggagaatcagcctgcccatcggctacggcgcccacatccagttcctgaacttcagcaccgaggccaaccacgacttcctggagatccagaacggcccctaccacaccagccccatgatcggccagttcagcggcaccgacctgcccgccgccctgctgagcaccacccacgagaccctgatccacttctacagcgaccacagccagaacagacagggcttcaagctggcctaccaggcctacgagctgcagaactgccccgaccccccccccttccagaacggctacatgatcaacagcgactacagcgtgggccagagcgtgagcttcgagtgctaccccggctacatcctgatcggccaccccgtgctgacctgccagcacggcatcaacagaaactggaactaccccttccccagatgcgacgccccctgcggctacaacgtgaccagccagaacggcaccatctacagccccggcttccccgacgagtaccccatcctgaaggactgcatctggctgatcaccgtgccccccggccacggcgtgtacatcaacttcaccctgctgcagaccgaggccgtgaacgactacatcgccgtgtgggacggccccgaccagaacagcccccagctgggcgtgttcagcggcaacaccgccctggagaccgcctacagcagcaccaaccaggtgctgctgaagttccacagcgacttcagcaacggcggcttcttcgtgctgaacttccacgccttccagctgaagaagtgccagcccccccccgccgtgccccaggccgagatgctgaccgaggacgacgacttcgagatcggcgacttcgtgaagtaccagtgccaccccggctacaccctggtgggcaccgacatcctgacctgcaagctgagcagccagctgcagttcgagggcagcctgcccacctgcgaggcccagtgccccgccaacgaggtgagaaccggcagcagcggcgtgatcctgagccccggctaccccggcaactacttcaacagccagacctgcagctggagcatcaaggtggagcccaactacaacatcaccatcttcgtggacaccttccagagcgagaagcagttcgacgccctggaggtgttcgacggcagcagcggccagagccccctgctggtggtgctgagcggcaaccacaccgagcagagcaacttcaccagcagaagcaaccagctgtacctgagatggagcaccgaccacgccaccagcaagaagggcttcaagatcagatacgccgccccctactgcagcctgacccaccccctgaagaacggcggcatcctgaacagaaccgccggcgccgtgggcagcaaggtgcactacttctgcaagcccggctacagaatggtgggccacagcaacgccacctgcagaagaaaccccctgggcatgtaccagtgggacagcctgacccccctgtgccaggccgtgagctgcggcatccccgagagccccggcaacggcagcttcaccggcaacgagttcaccctggacagcaaggtggtgtacgagtgccacgagggcttcaagctggagagcagccagcaggccaccgccgtgtgccaggaggacggcctgtggagcaacaagggcaagccccccacctgcaagcccgtggcctgccccagcatcgaggcccagctgagcgagcacgtgatctggagactggtgagcggcagcctgaacgagtacggcgcccaggtgctgctgagctgcagccccggctactacctggagggctggagactgctgagatgccaggccaacggcacctggaacatcggcgacgagagacccagctgcagagccggccactgcggcagccccgaccccatcgtgaacggccacatcagcggcgacggcttcagctacagagacaccgtggtgtaccagtgcaaccccggcttcagactggtgggcaccagcgtgagaatctgcctgcaggaccacaagtggagcggccagacccccgtgtgcgtgcccatcacctgcggccaccccggcaaccccgcccacggcttcaccaacggcagcgagttcaacctgaacgacgtggtgaacttcacctgcaacaccggctacctgctgcagggcgtgagcagagcccagtgcagaagcaacggccagtggagcagccccctgcccacctgcagagtggtgaactgcagcgaccccggcttcgtggagaacgccatcagacacggccagcagaacttccccgagagcttcgagtacggcatgagcatcctgtaccactgcaagaagggcttctacctgctgggcagcagcgccctgacctgcatggccaacggcctgtgggacagaagcctgcccaagtgcctggccatcagctgcggccaccccggcgtgcccgccaacgccgtgctgaccggcgagctgttcacctacggcgccgtggtgcactacagctgcagaggcagcgagagcctgatcggcaacgacaccagagtgtgccaggaggacagccactggagcggcgccctgccccactgcaccggcaacaaccccggcttctgcggcgaccccggcacccccgcccacggcagcagactgggcgacgacttcaagaccaagagcctgctgagattcagctgcgagatgggccaccagctgagaggcagccccgagagaacctgcctgctgaacggcagctggagcggcctgcagcccgtgtgcgaggccgtgctgtgcccccagcccccccccgtgcagaacggcaccgtggagggcagcgacttcagatggggcagcagcatcagctacagctgcatggacggctaccagctgagccacagcgccatcctgagctgcgagggcagaggcgtgtggaagggcgagatcccccagtgcctgcccgtgttctgcggcgaccccggcatccccgccgagggcagactgagcggcaagagcttcacctacaagagcgaggtgttcttccagtgcaagagccccttcatcctggtgggcagcagcagaagagtgtgccaggccgacggcacctggagcggcatccagcccacctgcatcgaccccgcccacaacacctgccccgaccccggcaccccccacttcggcatccagaacagcagcagaggctacgaggtgggcagcaccgtgttcttcagatgcagaaagggctaccacatccagggcagcaccaccagaacctgcctggccaacctgacctggagcggcatccagaccgagtgcatcccccacgcctgcagacagcccgagacccccgcccacgccgacgtgagagccatcgacctgcccaccttcggctacaccctggtgtacacctgccaccccggcttcttcctggccggcggcagcgagcacagaacctgcaaggccgacatgaagtggaccggcaagagccccgtgtgcaagagcaagggcgtgagagaggtgaacgagaccgtgaccaagacccccgtgcccagcgacgtgttcttcgtgaacagcctgtggaagggctactacgagtacctgggcaagagacagcccgccaccctgaccgtggactggttcaacgccaccagcagcaaggtgaacgccaccttcagcgaggccagccccgtggagctgaagctgaccggcatctacaagaaggaggaggcccacctgctgctgaaggccttccagatcaagggccaggccgacatcttcgtgagcaagttcgagaacgacaactggggcctggacggctacgtgagcagcggcctggagagaggcggcttcaccttccagggcgacatccacggcaaggacttcggcaagttcaagctggagagacaggaccccctgaaccccgaccaggacagcagcagccactaccacggcaccagcagcggcagcgtggccgccgccatcctggtgcccttcttcgccctgatcctgagcggcttcgccttctacctgtacaagcacagaaccagacccaaggtgcagtacaacggctacgccggccacgagaacagcaacggccaggccagcttcgagaaccccatgtacgacaccaacctgaagcccaccgaggccaaggccgtgagattcgacaccaccctgaacaccgtgtgcaccgtggtgtag

SEQ ID NO: 227795 - protein, 1359 aa, Artificial Sequence
  derived and/or modified sequence
MVGEGPYLISDLDQRGRRRSFAERYDPSLKTMIPVRPCARLAPNPVDDAGLLSFATFSWLTPVMVKGYRQRLTVDTLPPLSTYDSSDTNAKRFRVLWDEEVARVGPEKASLSHVVWKFQRTRVLMDIVANILCIIMAAIGPVILIHQILQQTERTSGKVWVGIGLCIALFATEFTKVFFWALAWAINYRTAIRLKVALSTLVFENLVSFKTLTHISVGEVLNILSSDSYSLFEAALFCPLPATIPILMVFCAAYAFFILGPTALIGISVYVIFIPVQMFMAKLNSAFRRSAILVTDKRVQTMNEFLTCIRLIKMYAWEKSFTNTIQDIRRRERKLLEKAGFVQSGNSALAPIVSTIAIVLTLSCHILLRRKLTAPVAFSVIAMFNVMKFSIAILPFSIKAMAEANVSLRRMKKILIDKSPPSYITQPEDPDTVLLLANATLTWEHEASRKSTPKKLQNQKRHLCKKQRSEAYSERSPPAKGATGPEEQSDSLKSVLHSISFVVRKGKILGICGNVGSGKSSLLAALLGQMQLQKGVVAVNGTLAYVSQQAWIFHGNVRENILFGEKYDHQRYQHTVRVCGLQKDLSNLPYGDLTEIGERGLNLSGGQRQRISLARAVYSDRQLYLLDDPLSAVDAHVGKHVFEECIKKTLRGKTVVLVTHQLQFLESCDEVILLEDGEICEKGTHKELMEERGRYAKLIHNLRGLQFKDPEHLYNAAMVEAFKESPAEREEDAGIIVLAPGNEKDEGKESETGSEFVDTKVPEHQLIQTESPQEGTVTWKTYHTYIKASGGYLLSLFTVFLFLLMIGSAAFSNWWLGLWLDKGSRMTCGPQGNRTMCEVGAVLADIGQHVYQWVYTASMVFMLVFGVTKGFVFTKTTLMASSSLHDTVFDKILKSPMSFFDTTPTGRLMNRFSKDMDELDVRLPFHAENFLQQFFMVVFILVILAAVFPAVLLVVASLAVGFFILLRIFHRGVQELKKVENVSRSPWFTHITSSMQGLGIIHAYGKKESCITYHLLYFNCALRWFALRMDVLMNILTFTVALLVTLSFSSISTSSKGLSLSYIIQLSGLLQVCVRTGTETQAKFTSVELLREYISTCVPECTHPLKVGTCPKDWPSRGEITFRDYQMRYRDNTPLVLDSLNLNIQSGQTVGIVGRTGSGKSSLGMALFRLVEPASGTIFIDEVDICILSLEDLRTKLTVIPQDPVLFVGTVRYNLDPFESHTDEMLWQVLERTFMRDTIMKLPEKLQAEVTENGENFSVGERQLLCVARALLRNSKIILLDEATASMDSKTDTLVQNTIKDAFKGCTVLTIAHRLNTVLNCDHVLVMENGKVIEFDKPEVLAEKPDSAFAMLLAAEVRL

SEQ ID NO: 227796 - protein, 633 aa, Artificial Sequence
  derived and/or modified sequence
MVGEGPYLISDLDQRGRRRSFAERYDPSLKTMIPVRPCARLAPNPVDDAGLLSFATFSWLTPVMVKGYRQRLTVDTLPPLSTYDSSDTNAKRFRVLWDEEVARVGPEKASLSHVVWKFQRTRVLMDIVANILCIIMAAIGPTVLIHQILQQTERTSGKVWVGIGLCIALFATEFTKVFFWALAWAINYRTAIRLKVALSTLVFENLVSFKTLTHISVGEVLNILSSDSYSLFEAALFCPLPATIPILMVFCAAYAFFILGPTALIGISVYVIFIPVQMFMAKLNSAFRRSAILVTDKRVQTMNEFLTCIRLIKMYAWEKSFTNTIQDIRRRERKLLEKAGFVQSGNSALAPIVSTIAIVLTLSCHILLRRKLTAPVAFSVIAMFNVMKFSIAILPFSIKAMAEANVSLRRMKKILIDKSPPSYITQPEDPDTVLLLANATLTWEHEASRKSTPKKLQNQKRHLCKKQRSEAYSERSPPAKGATGPEEQSDSLKSVLHSISFVVRKGKILGICGNVGSGKSSLLAALLGQMQLQKGVVAVNGTLAYVSQQAWIFHGNVRENILFGEKYDHQRLGSGASTSLGGRGRGLAWPALSTPTVSSTCWTTPCRPWTPTWGSTSLRSALRRRSGERQSSW

SEQ ID NO: 227797 - protein, 935 aa, Artificial Sequence
  derived and/or modified sequence
MVGEGPYLISDLDQRGRRRSFAERYDPSLKTMIPVRPCARLAPNPVDDAGLLSFATFSWLTPVMVKGYRQRLTVDTLPPLSTYDSSDTNAKRFRVLWDEEVARVGPEKASLSHVVWKFQRTRVLMDIVANILCIIMAAIGPTVLIHQILQQTERTSGKVWVGIGLCIALFATEFTKVFFWALAWAINYRTAIRLKVALSTLVFENLVSFKTLTHISVGEVLNILSSDSYSLFEAALFCPLPATIPILMVFCAAYAFFILGPTALIGISVYVIFIPVQMFMAKLNSAFRRSAILVTDKRVQTMNEFLTCIRLIKMYAWEKSFTNTIQDIRRRERKLLEKAGFVQSGNSALAPIVSTIAIVLTLSCHILLRRKLTAPVAFSVIAMFNVMKFSIAILPFSIKAMAEANVSLRRMKKILIDKSPPSYITQPEDPDTVLLLANATLTWEHEASRKSTPKKLQNQKRHLCKKQRSEAYSERSPPAKGATGPEEQSDSLKSVLHSISFVVRKGKILGICGNVGSGKSSLLAALLGQMQLQKGVVAVNGTLAYVSQQAWIFHGNVRENILFGEKYDHQRYQHTVRVCGLQKDLSNLPYGDLTEIGERGLNLSGGQRQRISLARAVYSDRQLYLLDDPLSAVDAHVGKHVFEECIKKTLRGKTVVLVTHQLQFLESCDEVILLEDGEICEKGTHKELMEERGRYAKLIHNLRGLQFKDPEHLYNAAMVEAFKESPAEREEDAVLAPGNEKDEGKESETGSEFVDTKVPEHQLIQTESPQEGTVTWKTYHTYIKASGGYLLSLFTVFLFLLMIGSAAFSNWWLGLWLDKGSRMTCGPQGNRTMCEVGAVLADIGQHVYQWVYTASMVFMLVFGVTKGFVFTKTTLMASSSLHDTVFDKHFPQRSPGAQEGGECQPVTLVHPHHLLHAGPGHHSRLWQEGELHHLV

SEQ ID NO: 227798 - protein, 930 aa, Artificial Sequence
  derived and/or modified sequence
MVGEGPYLISDLDQRGRRRSFAERYDPSLKTMIPVRPCARLAPNPVDDAGLLSFATFSWLTPVMVKGYRQRLTVDTLPPLSTYDSSDTNAKRFRVLWDEEVARVGPEKASLSHVVWKFQRTRVLMDIVANILCIIMAAIGPTVLIHQILQQTERTSGKVWVGIGLCIALFATEFTKVFFWALAWAINYRTAIRLKVALSTLVFENLVSFKTLTHISVGEMFMAKLNSAFRRSAILVTDKRVQTMNEFLTCIRLIKMYAWEKSFTNTIQDIRRRERKLLEKAGFVQSGNSALAPIVSTIAIVLTLSCHILLRRKLTAPVAFSVIAMFNVMKFSIAILPFSIKAMAEANVSLRRMKKILIDKSPPSYITQPEDPDTVLLLANATLTWEHEASRKSTPKKLQNQKRHLCKKQRSEAYSERSPPAKGATGPEEQSDSLKSVLHSISFVVRKGKILGICGNVGSGKSSLLAALLGQMQLQKGVVAVNGTLAYVSQQAWIFHGNVRENILFGEKYDHQRYQHTVRVCGLQKDLSNLPYGDLTEIGERGLNLSGGQRQRISLARAVYSDRQLYLLDDPLSAVDAHVGKHVFEECIKKTLRGKTVVLVTHQLQFLESCDEVILLEDGEICEKGTHKELMEERGRYAKLIHNLRGLQFKDPEHLYNAAMVEAFKESPAEREEDAGIIVPEHQLIQTESPQEGTVTWKTYHTYIKASGGYLLSLFTVFLFLLMIGSAAFSNWWLGLWLDKGSRMTCGPQGNRTMCEVGAVLADIGQHVYQWVYTASMVFMLVFGVTKGFVFTKTTLMASSSLHDTVFDKILKSPMSFFDTTPTGRLMNRFSKDMDELDVRLPFHAENFLQQFFMVVFILVILAAVFPAVLLVVASLAVGFFILLRIFHRGVQELKKVENVSRSPWFTHITSSMQGLGIIHAYGKKESCIT

SEQ ID NO: 227799 - protein, 106 aa, Artificial Sequence
  derived and/or modified sequence
MVGEGPYLISDLDQRGRRRSFAERYDPSLKTMIPVRPCARLAPNPVDDAGLLSFATFSWLTPVMVKGYRQRLTVDTLPPLSTYDSSDTNAKRFRVLWDEEVARVGP

SEQ ID NO: 227800 - protein, 285 aa, Artificial Sequence
  derived and/or modified sequence
MVGEGPYLISDLDQRGRRRSFAERYDPSLKTMIPVRPCARLAPNPVDDAGLLSFATFSWLTPVMVKGYRQRLTVDTLPPLSTYDSSDTNAKRFRVLWDEEVARVGPEKASLSHVVWKFQRTRVLMDIVANILCIIMAAIGPTVLIHQILQQTERTSGKVWVGIGLCIALFATEFTKVFFWALAWAINYRTAIRLKVALSTLVFENLVSFKTLTHISVGEVLNILSSDSYSLFEAALFCPLPATIPILMVFCAAYAFFILGPTALIGISVCLWPSSIQLSEGQQFW

SEQ ID NO: 227801 - DNA, 4080 bp, Artificial Sequence
  derived and/or modified sequence
atggtcggggaaggcccctacctcatctctgacctggaccagagagggaggcgacgcagcttcgccgagagatacgatcctagtctgaaaactatgatccccgtccgaccatgtgcacgccttgccccgaatcctgtggacgacgccggactcctgtcctttgccacattctcttggctgactcccgtgatggtaaaaggctaccgccagcggcttaccgtggacacgctgccaccattgtctacctatgacagtagtgatactaatgccaaaaggtttcgggtgctgtgggacgaggaggtggcccgggttggccccgagaaagccagtctgtctcacgtggtctggaaatttcagagaacccgggtattgatggatattgtagctaacatcctgtgtattatcatggccgccattggccctgtgatcctcatccatcagattctacagcagacagagagaacatcgggcaaggtctgggttggcattggcctctgtattgccctctttgcgaccgaattcacaaaagtgtttttctgggccctggcctgggctataaattaccgcacggccattcgtttgaaggttgcgttgtccacactcgtatttgaaaacctggtttcctttaagaccttgacccacatttcagtgggtgaagtgttgaatattttgagcagcgattcctattccctcttcgaggcagctttgttctgccctctgcctgccacaatccccatacttatggtattctgtgctgcatacgccttttttatcctcgggcccacagccctgattggaatcagcgtctatgtgattttcatcccagtacagatgtttatggctaagctcaactccgctttccgcagaagcgcaattctcgtcactgataaaagagtccagacaatgaatgagttcctgacatgtatccgcctcatcaaaatgtatgcttgggagaaaagcttcaccaataccattcaggacatcagacggcgcgaaagaaagttgttagagaaggccgggtttgttcagtccggaaactccgcattagccccaatcgtatccacaatcgctatcgtcttaaccttgtcgtgccacattctgctgaggcgcaagctcaccgctcccgtggccttctccgtgattgcaatgttcaatgtgatgaaattttctattgcgattttaccattctctatcaaggccatggctgaagctaacgtaagcctgcggcggatgaagaagatactcattgacaaatctcccccatcctacattacacagcctgaggatccggataccgtgttattgcttgctaatgccactctcacctgggaacacgaagccagtaggaagagtacgccgaagaagctacagaaccagaagagacatctttgcaaaaaacagagatctgaggcatactccgagaggtcgcctcctgctaagggggcaaccggtcccgaagagcaatccgattccctgaagagcgtgttgcactctataagtttcgtggttcgaaaggggaaaatcctaggcatatgcggcaacgttggaagtgggaaaagctcacttctggcagcactcctcggtcagatgcaactgcagaaaggcgtcgtggccgttaatggaactctggcctacgtcagtcagcaggcgtggatatttcacggcaatgtccgcgagaatatcctgtttggggagaaatatgaccatcagaggtaccaacatactgtcagagtctgcggactgcaaaaagacctgagtaatcttccctatggcgacttaactgagattggggaaagggggctgaacctatctggcggccaacgtcagagaattagcctggcccgcgctgtgtattccgacagacagctctacctactggatgaccccctttctgccgtggatgcccacgtgggtaaacatgtattcgaagaatgcattaagaagacattaagagggaaaaccgtcgtcctcgtcacccatcagctgcagttcctggaaagctgcgatgaggttattctgttagaggacggagaaatttgtgaaaaaggcacacacaaagaactgatggaggagagaggaaggtatgctaagctcattcacaatctaagggggctgcagttcaaagatcctgaacacctctataacgccgcgatggtggaggcttttaaagaaagccccgcggaaagggaggaggatgctggaataatagtgctggcgcccgggaacgagaaggacgaaggaaaagagagcgaaacaggtagtgagtttgtggatactaaggttccagaacaccagctgattcaaactgagagccctcaggagggcacagtgacatggaagacttatcacacttatattaaggctagtggtgggtacctcctttctctttttactgtgttcctctttctgttgatgattggaagtgcagcgttctccaactggtggttgggtctctggttggataaaggcagccggatgacttgtggtccgcaggggaatcgtacaatgtgtgaagtgggggccgtacttgcagacattggccagcacgtctaccaatgggtttatacggcgagcatggtgtttatgctcgtgttcggggttacaaaagggttcgtgtttactaaaaccaccttgatggcctctagcagcctgcacgataccgtgttcgacaaaatcctaaagtcaccaatgagtttcttcgataccacaccaaccggacggctaatgaaccggttcagcaaggatatggacgaactggatgtccggctgccatttcatgccgagaatttcctgcagcagttcttcatggtggtcttcatcctggtgattcttgccgcagtgtttccagctgtgctgctagtggtagcatccctagctgtgggcttttttatccttctgcgcatatttcatcgcggagttcaggaactcaagaaggtcgagaatgtgtcacggtccccctggtttactcatatcacaagctccatgcagggcttaggtattatccatgcttatggaaagaaagagagctgtatcacataccaccttttgtattttaactgcgctctgcgatggttcgcactcaggatggatgttctgatgaacattctgacattcactgtggcccttttggtgacactgagtttcagttctatctcaacatcttcgaagggtctctctttatcatatattattcagttaagcggccttctccaagtctgcgttagaaccggaactgaaactcaggccaaatttacaagcgtcgaactactccgagagtacatttcaacttgtgtgccagaatgtacacacccactgaaggtcggtacttgccccaaagattggcccagccgcggagagatcacctttagggattatcaaatgcgctatcgggataacacgcccctcgtgctggattctctgaatctgaacatccagtctgggcagactgtcggcatcgttggaaggaccggatctggtaagagcagcctgggcatggcgctgttccggcttgtcgagcctgcctctggcaccattttcattgacgaagtcgacatctgtatcctcagcctcgaagatctaaggaccaagctgactgtcatacctcaggatccagtgctctttgtgggtaccgtgagatacaaccttgatccgttcgagtcacatactgatgagatgctctggcaggttctcgaacggacctttatgcgagacacgatcatgaaactgccggagaaacttcaggctgaggtgactgaaaacggtgagaacttctccgtcggcgaaagacaattactgtgcgtcgctagggctttgctgagaaattccaaaataattcttctggatgaggccacagcgtctatggactccaagaccgacaccctggttcaaaacaccatcaaagacgcttttaaagggtgcaccgtgttgaccattgctcacagattgaatacagtgttgaactgtgaccacgtactagttatggaaaacggcaaggtgatcgagtttgataaacctgaggttctggccgagaaaccggatagcgcctttgccatgctcttagcagcagaagtgagactgtag

SEQ ID NO: 227802 - DNA, 1902 bp, Artificial Sequence
  derived and/or modified sequence
atggtcggtgagggaccctacttgataagtgatctcgaccaacgtgggcgacggcgaagcttcgccgagagatatgaccccagtttgaaaacaatgattcctgtgcggccttgtgcgagactggcccccaatccggttgacgacgctgggttgttatcttttgccactttctcttggctgacgccagttatggttaaggggtaccgacagagattgactgtggacacactgcccccactctctacctatgacagctcagacaccaacgccaagagattccgagtgctttgggatgaggaggttgcccgggttggccccgagaaggcttctctgtcccatgtggtatggaaattccagcggacaagggtgctgatggacatcgtggctaatatcctttgcattattatggcagctattggaccgacagtcctgattcaccagatactccagcagacagaaaggacctccggtaaagtgtgggttggtattgggttgtgtatcgcgctgtttgctaccgaatttaccaaggtgtttttctgggctctggcctgggccataaattaccgtaccgcaatccgcctcaaggtggcactcagcaccctagtgtttgagaaccttgtctccttcaagacgctaactcatatctcagtgggggaggtactcaatatcctcagtagcgactcttacagcctcttcgaggcagccttgttctgcccactacccgcaacgatcccaatcctgatggttttctgtgcggcttatgcatttttcatacttggccccacagccctgatcgggattagcgtgtacgtgatctttatccccgtccaaatgttcatggccaaactgaacagtgcctttcgaaggtcagctattctggttactgataaaagagtgcagactatgaatgagtttttgacatgtattaggctcataaaaatgtatgcctgggagaagtccttcaccaacaccatccaagacatccggcgacgtgaaaggaaattgctggagaaagctggatttgttcagagtggaaattcagccctcgctcccatcgtaagcaccattgccattgtcctaacactctcctgccacatactactccggcgaaaactaacagcgccagtggcattttccgtaatcgccatgttcaatgttatgaaattttcgattgccatactgcccttctcaattaaggcaatggcagaggccaacgtgagccttcgcagaatgaagaagatcctaatagataaatctccacctagctatatcacccagcccgaagatcctgataccgtgcttctgttggccaatgccacgctgacatgggaacatgaggcctcgaggaagtcaacccccaaaaagcttcagaaccaaaaaagacacctctgcaagaaacagcgcagcgaagcctattcagagaggtctcccccagctaagggagccactggacccgaggagcaatccgactcgcttaagtctgttctgcatagcatatcttttgtcgtgcgcaagggcaaaattcttgggatctgcggcaatgtgggaagtgggaagtcttccttactagcagctttgcttggacagatgcagttgcagaagggagtcgtcgcagtgaatggtactcttgcatatgtgagccagcaggcgtggatatttcatggcaatgtaagagaaaatatcctttttggcgaaaaatatgatcaccagcggctgggttcaggtgcaagcacatccctcggtggccgcgggcgcgggctggcttggcccgccctaagtacacccacagtgtcttcaacttgttggacaacaccatgtagaccttggacccctacttggggatccacatccctaaggtcagccttacgccgacgaagtggcgaacggcagtcaagttggtag

SEQ ID NO: 227803 - DNA, 2808 bp, Artificial Sequence
  derived and/or modified sequence
atggttggagaaggcccctatctgatcagcgacctggaccaaaggggacgcagacgttcctttgcagagaggtatgacccttcgttgaaaacaatgatccctgtccggccgtgcgcacgccttgcccctaatcctgtggatgatgccgggctcctcagcttcgccacattctcatggctaacccccgtaatggtcaagggatacaggcagcggctgaccgttgacaccctgccccccctttcaacatatgacagctctgacactaacgccaaacgcttcagggttctgtgggatgaggaagtcgcgcgcgtcgggcctgaaaaagcttccttatctcatgtagtatggaagttccagaggacccgcgtgctgatggatattgtagctaatatattgtgtattatcatggccgcaattggacctaccgttctaattcaccagatcctgcagcagaccgagcggacatccggaaaggtatgggtgggaattgggttatgtattgccctattcgcaacagagttcacaaaagtgtttttctgggcattggcctgggcgatcaactataggactgctattcgactcaaagtggctctgagcacactagtgttcgagaacctcgtcagcttcaagactctcacccatatctccgtaggagaggtgttgaatatcctgtcctcagattcctattctttattcgaggccgctctcttttgccctcttcctgctacaatcccaattctgatggtgttttgcgccgcctacgcttttttcatcctgggtcccaccgccctcatcggcatctctgtttatgtgatcttcattccagtgcagatgttcatggctaagctgaactcggccttcagaagatccgctattctggtaaccgataagcgcgttcagacgatgaacgaattcctaacgtgcatccgtctgattaagatgtatgcgtgggagaagtccttcaccaataccatacaagatataaggcggcgcgaaagaaagcttctggaaaaagctggattcgtgcagtccggaaacagcgcgctcgcaccaattgtttcaaccatcgctatcgtgctgaccttgtcatgtcacatcttgctgcggcgcaagttgaccgcccccgtagccttctccgtgatcgctatgttcaacgtgatgaagttcagtatcgcaattctgcccttttcaattaaggccatggcggaagctaacgtgagtctgcgcagaatgaaaaaaatattaatagacaagagccctccttcatacatcacacagcccgaggaccccgataccgttctgctgctcgccaacgccacactgacctgggaacacgaagcctcccggaagtccaccccaaaaaaacttcagaatcagaaaaggcacctgtgtaaaaagcagcgcagcgaggcgtactctgagaggtcaccccctgctaagggagctacaggccctgaagaacagtcagacagcctgaaaagcgttctgcacagcattagtttcgttgtgaggaaaggcaaaatcctgggcatttgtggaaatgtcgggtcagggaaatctagcctacttgcagcactcctgggccagatgcagctgcaaaaaggagtggtagcagtgaatgggaccctggcatacgtgagccagcaggcatggatttttcacggcaacgtaagggagaacatcttgttcggtgaaaagtacgaccaccagcggtatcagcatacagtgcgcgtgtgtggcttgcagaaagacttgagtaacttaccttacggcgatttgacagagatcggcgaacgcgggctgaacctgtcggggggtcagagacagaggatatcacttgctagggctgtgtactccgacagacagctgtacctgctggatgacccactatctgcagtagatgcacatgtgggaaaacatgtgtttgaagagtgtattaagaaaacacttaggggaaaaactgtggttctggttacccaccaacttcagtttctagaaagctgcgatgaggtgattttgttagaggatggggagatatgtgagaaaggtacccacaaggaacttatggaggagcgaggtagatatgcaaaacttatacataatcttcgggggctccagttcaaggaccccgaacatctttacaatgccgccatggtcgaagctttcaaggagagcccagccgagcgcgaagaagatgccgtattagctcccggaaatgagaaagatgagggcaaggagtctgaaaccgggtcggagtttgtggacacaaaggttccggaacatcagttgatccaaacggagtcacctcaggaaggaacggttacctggaagacgtaccacacatacattaaggccagcggcggatatctgctgtccttgtttactgttttcctcttcctgttgatgattggtagcgccgcattcagcaattggtggctgggtctgtggctggacaaaggtagtagaatgacatgtggtccacagggcaatcggaccatgtgcgaagtgggcgctgtactagcggatataggacagcacgtctatcaatgggtgtatacggcaagtatggtcttcatgctggtcttcggagtgacaaagggatttgtattcacaaaaaccacactgatggcatcctcatcgctgcacgatacggtcttcgataaacactttccacagagatctcctggcgctcaggagggaggggagtgccagcctgtaaccctcgtgcaccctcatcacctacttcacgcaggaccaggacatcactcccggctgtggcaggagggagagttacatcacctggtgtag

SEQ ID NO: 227804 - DNA, 2793 bp, Artificial Sequence
  derived and/or modified sequence
atggttggtgagggtccatatcttatctcagatctggatcagagaggtcgaaggagatccttcgccgagagatacgatccttccctgaagaccatgatccctgtcaggccctgcgcgagactggcccccaaccctgttgatgacgctggcctgctttctttcgcgactttctcctggttgactcccgtaatggtgaagggatacaggcagagacttactgtcgacacactacctcccttgagcacatatgattcttccgataccaatgccaagaggtttcgggtcttgtgggatgaagaggtggccagagtcgggcctgagaaagctagtctctcccacgtcgtctggaagttccagcgcacccgagtcctcatggatattgtcgccaacatcctgtgcattattatggctgcaataggtcctacagtgctaatacatcagatcctgcagcagaccgaaagaacctccggaaaagtgtgggttgggattggcctctgcattgcgttatttgcaacagaatttacaaaggtgttcttctgggctttagcttgggccattaattacagaacagcaattagactgaaagtggctttatccactctggtgtttgaaaacctcgtttcctttaagaccctgacccacatctctgtgggggagatgttcatggccaagttgaattctgccttcagacgatccgccatcctggtgactgataaaagggtacagactatgaacgaatttcttacctgcattaggctgataaagatgtatgcctgggagaaatctttcactaatactatacaagatatcaggaggagggaaaggaaactgctcgaaaaggcagggttcgtgcaaagcggaaactccgctctcgccccgatcgtaagtacaattgctatagtgcttacacttagttgtcacattcttctgcggcgtaaactcacggcccctgtggcgttctctgtgattgcaatgtttaatgtcatgaagttctctattgctatactgccttttagtattaaagccatggccgaggcaaacgttagcctgagaagaatgaagaaaatacttatcgataagagtcctccgagctacattacacaacccgaagatcctgatacagtactcttgctcgccaacgctacactcacttgggaacatgaggcctctcggaagagtacgcctaagaaattacaaaatcaaaagcgacatttgtgtaagaaacagcgatcagaagcgtactcagagaggagcccacccgccaagggggcaaccggccccgaagagcagagcgactctcttaagtctgtgcttcatagtatttcctttgtggtccgaaaagggaagattctgggcatttgcgggaacgtgggctcgggcaaatcctctctgctcgccgctctgctgggtcagatgcagctccagaagggagtagttgctgtcaatgggacgctcgcttatgtcagccagcaagcctggatttttcacggcaacgtccgcgaaaacatcttgtttggggaaaagtatgaccatcagcgctaccagcatacagttcgggtgtgcggactccagaaggacttgagcaacctgccatacggagatctgacagagattggagaaaggggcctgaatctgtccggcggccagagacagcgaatttctctagccagagccgtgtactccgacaggcagctatatttgcttgacgatcctttgtccgctgtagatgcacacgtagggaaacatgtgtttgaggaatgtattaagaagactctgcgcggaaaaaccgtcgttctcgtgacgcaccaactgcagttccttgagtcttgtgacgaggtgatcttgctggaggacggagaaatctgtgaaaagggtacacacaaggagctgatggaagagcgcggacgctatgcgaagctcatacacaacctgaggggcctccagtttaaagacccagagcatctctataacgctgccatggtggaggctttcaaagagagtcctgccgagcgggaagaagacgccgggattattgtgccagagcaccaattgatccaaaccgaaagcccgcaggaaggcaccgtcacttggaaaacttaccatacatatatcaaagccagcggtggataccttcttagcctctttaccgtctttctgtttctcctgatgataggctcagctgccttttcaaactggtggttggggttgtggctagataagggctcgagaatgacctgcggcccccagggaaacaggactatgtgcgaagtgggagccgtgctggctgacataggccagcatgtgtaccagtgggtgtatacagcctccatggtgtttatgcttgtctttggggttactaagggttttgtctttactaagaccactctcatggctagtagttcccttcacgataccgtgttcgacaagatcttaaaaagtcccatgtccttcttcgataccacgccgacggggaggcttatgaacagattttcaaaggatatggatgagctggatgtgcgactgccttttcacgccgagaactttctccagcaatttttcatggttgtgttcattttggttattttggctgccgttttcccagccgtgttgctggttgtagcctcgttggcggtaggtttcttcatcctgctaaggatatttcaccgaggagtccaggagctcaaaaaggttgagaatgtctcccggagcccctggtttactcacatcaccagcagcatgcagggcttagggataatacacgcttatggcaaaaaggagtcttgtatcacgtag

SEQ ID NO: 227805 - DNA, 321 bp, Artificial Sequence
  derived and/or modified sequence
atggtgggagaaggaccttatttgatttcggacctagaccagcgaggtaggcgcagatcttttgctgagcgatacgatccctccttaaagacgatgattcctgtccgaccatgtgcccgtctggctcctaatcccgtggacgacgcaggcctcttgagctttgctaccttcagctggcttactcccgtaatggtcaaaggttaccgccaaaggctcacagtcgatacgctaccacctctgtccacctatgacagctccgataccaatgccaagaggtttagagtgctgtgggacgaggaggtcgctcgggtgggaccttag

SEQ ID NO: 227806 - DNA, 858 bp, Artificial Sequence
  derived and/or modified sequence
atggtgggcgaggggccatatttgatctctgatctcgaccaaagaggacgcagacggtcgtttgccgagcggtacgatccatcactgaaaaccatgattccagtacggccttgtgcaaggctggcccctaacccagtggatgacgccggtctcctgagctttgctactttctcctggctgactccagttatggttaagggctatcggcagcgcctgactgtggacacactgccacccctaagcacttatgattcctcagataccaacgcgaaaagattcagagtcctgtgggacgaagaagttgcacgggtgggaccagaaaaagcttctctgtcccacgtggtgtggaagtttcaaagaacacgggttttgatggacatagtcgcgaacatattatgcatcattatggccgcaattggacctacggtgcttattcaccagatcttgcagcagaccgagagaacctctggcaaagtctgggtggggattggcctgtgcattgcattgtttgctacagagttcactaaagtcttcttctgggcactggcctgggccataaattaccggactgctataagactaaaggtggctttgagtacgttggtttttgaaaacctagtttctttcaagactttgacccatatctcagtaggagaggttctcaatatcttaagttcagactcttattcactcttcgaagcagcattattctgtcccctgcctgctacaatacctatcctcatggtgttttgcgcggcttacgcatttttcatactcggcccgaccgccttaatcggcatctccgtatgcctgtggcctagcagtatccagctatcagagggacaacagttttggtag

SEQ ID NO: 227807 - DNA, 4080 bp, Artificial Sequence
  derived and/or modified sequence
atggtgggggagggcccctacctgatcagtgacctggaccagagaggaagaagaagaagctttgctgagagatatgaccccagcctgaagaccatgatccctgtgcggccctgtgcccggctggcccccaaccctgtggatgatgctggcctgctgagctttgccaccttctcctggctgacccctgtgatggtgaagggctaccggcagaggctgactgtggacaccctgccccccctgagcacctatgacagcagtgacaccaatgccaagcgcttccgggtgctgtgggatgaggaggtggcccgggtgggccctgagaaggccagcctgagccacgtggtgtggaagttccagaggaccagggtgctgatggacatcgtggccaacatcctgtgcatcatcatggccgccatcggccctgtgatcctgatccaccagatcctgcagcagacagagaggaccagcggcaaggtgtgggtgggcatcggcctgtgcatcgccctgtttgccacagagttcaccaaggtgttcttctgggccctggcctgggccatcaactacagaacagccatccggctgaaggtggccctgagcaccctggtgtttgagaacctggtgtccttcaagaccctgacccacatctctgtgggggaggtgctgaacatcctgagcagtgacagctacagcctgtttgaggccgccctcttctgccccctgcctgccaccatccccatcctgatggtgttctgtgccgcctatgccttcttcatcctgggccccacagccctgattggcatctctgtgtatgtgatcttcatccctgtgcagatgttcatggccaagctgaacagcgccttccgccgcagcgccatcctggtgacagacaagagggtgcagaccatgaatgagttcctgacctgcatccgcctcatcaagatgtatgcctgggagaagagcttcaccaacaccatccaggacatcagaagaagagagaggaagctgctggagaaggccggctttgtgcagagcggcaacagcgccctggcccccatcgtgtccaccatcgccatcgtgctgaccctgagctgccacatcctgctgcggaggaagctgacagcccctgtggccttctctgtgattgccatgtttaatgtgatgaagttcagcatcgccatcctgcccttcagcatcaaggccatggccgaggccaacgtgtccctgcggaggatgaagaagatcctgattgacaagagcccccccagctacatcacccagcctgaggaccctgacacagtgctgctgctggccaatgccaccctgacctgggagcacgaggccagcaggaagagcacccccaagaagctgcagaaccagaagaggcacctgtgcaagaagcagaggtctgaggcctacagcgagaggagccccccagccaagggggccactggacctgaggagcagagcgacagcctgaagtctgtgctgcacagcatcagctttgtggtgaggaagggcaagatcctgggcatctgtggaaatgtgggcagcggcaagagcagcctgctggccgccctgctgggccagatgcagctgcagaagggcgtggtggccgtgaatggcaccctggcctacgtgtcccagcaggcctggatcttccacggcaatgtgcgggagaacatcctgtttggagagaagtatgaccaccagcgctaccagcacacagtgcgggtgtgtggcctgcagaaggacctgagcaacctgccctacggggacctgacagagatcggggagcggggcctgaacctgagcggcggccagaggcagaggatcagcctggcccgggctgtgtacagcgaccggcagctgtacctgctggatgaccccctgtctgctgtggatgcccacgtgggcaagcacgtgtttgaggagtgcatcaagaagaccctgcggggcaagacagtggtgctggtgacccaccagctgcagttcctggagagctgtgatgaagtcatcctgctggaggatggagagatctgtgagaagggcacccacaaggagctgatggaggagcggggccgctatgccaagctgatccacaacctgcggggcctgcagttcaaggaccctgagcacctgtacaatgctgccatggtggaggccttcaaggagagccctgctgagcgggaggaggatgctggcatcatcgtgctggcccctggaaatgagaaggatgagggcaaggagagcgagaccggcagcgagtttgtggacaccaaggtgcctgagcaccagctgatccagacagagagcccccaggagggcaccgtgacctggaagacctaccacacctacatcaaggccagcggcggctacctgctgagcctcttcaccgtcttcctgttcctgctgatgattggcagcgctgccttcagcaactggtggctgggcctgtggctggacaagggcagcaggatgacctgtggcccccagggcaacagaaccatgtgtgaggtgggcgctgtgctggccgacatcggccagcacgtgtaccagtgggtgtacacagcctccatggtgttcatgctggtgtttggagtgaccaagggctttgtgttcaccaagaccaccctgatggccagcagcagcctgcatgacacagtgtttgacaagatcctgaagagccccatgtccttctttgacaccacccccaccggccgcctgatgaaccgcttcagcaaggacatggatgagctggatgtgcggctgcccttccacgccgagaacttcctgcagcagttcttcatggtggtgttcatcctggtgatcctggccgctgtgtttcctgctgtgctgctggtggtggccagcctggccgtgggcttcttcatcctgctgcgcatcttccaccggggcgtgcaggagctgaagaaggtggagaatgtgagccgcagcccctggttcacccacatcaccagctccatgcagggcctgggcatcatccacgcctacggcaagaaggagagctgcatcacctaccacctgctgtacttcaactgtgccctgcgctggtttgccctgaggatggatgtgctgatgaacatcctgaccttcaccgtggccctgctggtgaccctgtccttcagcagcatcagcaccagcagcaagggcctgagcctgagctacatcatccagctgagcggcctgctgcaggtgtgtgtgaggactggaacagagacccaggccaagttcacctctgtggagctgctgcgggagtacatcagcacctgtgtgcctgagtgcacccaccccctgaaggtgggcacctgccccaaggactggcccagcagaggagagatcaccttccgggactaccagatgagatacagagacaacacccccctggtgctggacagcctgaacctgaacatccagagcggccagacagtgggcatcgtgggccgcacaggcagcggcaagagcagcctgggcatggccctcttccggctggtggagcccgccagcggcaccatcttcattgatgaggtggacatctgcatcctgagcctggaggacctgcggaccaagctgaccgtcatcccccaggaccctgtgctgtttgtgggcaccgtgcgctacaacctggacccctttgagagccacacagatgagatgctgtggcaggtgctggagaggaccttcatgagggacaccatcatgaagctgcctgagaagctgcaggccgaggtgacagaaaatggagagaacttctctgtgggggagcggcagctgctgtgtgtggcccgggccctgctgaggaacagcaagatcatcctgctggatgaggccacagcctccatggacagcaagacagacaccctggtgcagaacaccatcaaggatgccttcaagggctgcaccgtgctgaccatcgcccaccggctgaacacagtgctgaactgtgaccacgtgctggtgatggagaatggcaaggtgattgaatttgacaagccagaggtgctggccgagaagccagattctgcctttgccatgctgctggccgctgaggtgcggctgtag

SEQ ID NO: 227808 - DNA, 1902 bp, Artificial Sequence
  derived and/or modified sequence
atggtgggggagggcccctacctgatcagtgacctggaccagagaggaagaagaagaagctttgctgagagatatgaccccagcctgaagaccatgatccctgtgcggccctgtgcccggctggcccccaaccctgtggatgatgctggcctgctgagctttgccaccttctcctggctgacccctgtgatggtgaagggctaccggcagaggctgactgtggacaccctgccccccctgagcacctatgacagcagtgacaccaatgccaagcgcttccgggtgctgtgggatgaggaggtggcccgggtgggccctgagaaggccagcctgagccacgtggtgtggaagttccagaggaccagggtgctgatggacatcgtggccaacatcctgtgcatcatcatggccgccatcggccccaccgtgctgatccaccagatcctgcagcagacagagaggaccagcggcaaggtgtgggtgggcatcggcctgtgcatcgccctgtttgccacagagttcaccaaggtgttcttctgggccctggcctgggccatcaactacagaacagccatccggctgaaggtggccctgagcaccctggtgtttgagaacctggtgtccttcaagaccctgacccacatctctgtgggggaggtgctgaacatcctgagcagtgacagctacagcctgtttgaggccgccctcttctgccccctgcctgccaccatccccatcctgatggtgttctgtgccgcctatgccttcttcatcctgggccccacagccctgattggcatctctgtgtatgtgatcttcatccctgtgcagatgttcatggccaagctgaacagcgccttccgccgcagcgccatcctggtgacagacaagagggtgcagaccatgaatgagttcctgacctgcatccgcctcatcaagatgtatgcctgggagaagagcttcaccaacaccatccaggacatcagaagaagagagaggaagctgctggagaaggccggctttgtgcagagcggcaacagcgccctggcccccatcgtgtccaccatcgccatcgtgctgaccctgagctgccacatcctgctgcggaggaagctgacagcccctgtggccttctctgtgattgccatgtttaatgtgatgaagttcagcatcgccatcctgcccttcagcatcaaggccatggccgaggccaacgtgtccctgcggaggatgaagaagatcctgattgacaagagcccccccagctacatcacccagcctgaggaccctgacacagtgctgctgctggccaatgccaccctgacctgggagcacgaggccagcaggaagagcacccccaagaagctgcagaaccagaagaggcacctgtgcaagaagcagaggtctgaggcctacagcgagaggagccccccagccaagggggccactggacctgaggagcagagcgacagcctgaagtctgtgctgcacagcatcagctttgtggtgaggaagggcaagatcctgggcatctgtggaaatgtgggcagcggcaagagcagcctgctggccgccctgctgggccagatgcagctgcagaagggcgtggtggccgtgaatggcaccctggcctacgtgtcccagcaggcctggatcttccacggcaatgtgcgggagaacatcctgtttggagagaagtatgaccaccagaggctgggcagcggggccagcaccagcctgggcggccggggccggggcctggcctggccagccctgagcacccccaccgtgagcagcacctgctggaccaccccctgccggccctggacccccacctggggcagcaccagcctgcggagcgccctgcggcggcgcagcggggagcggcagagctcctggtag

SEQ ID NO: 227809 - DNA, 2808 bp, Artificial Sequence
  derived and/or modified sequence
atggtgggggagggcccctacctgatcagtgacctggaccagagaggaagaagaagaagctttgctgagagatatgaccccagcctgaagaccatgatccctgtgcggccctgtgcccggctggcccccaaccctgtggatgatgctggcctgctgagctttgccaccttctcctggctgacccctgtgatggtgaagggctaccggcagaggctgactgtggacaccctgccccccctgagcacctatgacagcagtgacaccaatgccaagcgcttccgggtgctgtgggatgaggaggtggcccgggtgggccctgagaaggccagcctgagccacgtggtgtggaagttccagaggaccagggtgctgatggacatcgtggccaacatcctgtgcatcatcatggccgccatcggccccaccgtgctgatccaccagatcctgcagcagacagagaggaccagcggcaaggtgtgggtgggcatcggcctgtgcatcgccctgtttgccacagagttcaccaaggtgttcttctgggccctggcctgggccatcaactacagaacagccatccggctgaaggtggccctgagcaccctggtgtttgagaacctggtgtccttcaagaccctgacccacatctctgtgggggaggtgctgaacatcctgagcagtgacagctacagcctgtttgaggccgccctcttctgccccctgcctgccaccatccccatcctgatggtgttctgtgccgcctatgccttcttcatcctgggccccacagccctgattggcatctctgtgtatgtgatcttcatccctgtgcagatgttcatggccaagctgaacagcgccttccgccgcagcgccatcctggtgacagacaagagggtgcagaccatgaatgagttcctgacctgcatccgcctcatcaagatgtatgcctgggagaagagcttcaccaacaccatccaggacatcagaagaagagagaggaagctgctggagaaggccggctttgtgcagagcggcaacagcgccctggcccccatcgtgtccaccatcgccatcgtgctgaccctgagctgccacatcctgctgcggaggaagctgacagcccctgtggccttctctgtgattgccatgtttaatgtgatgaagttcagcatcgccatcctgcccttcagcatcaaggccatggccgaggccaacgtgtccctgcggaggatgaagaagatcctgattgacaagagcccccccagctacatcacccagcctgaggaccctgacacagtgctgctgctggccaatgccaccctgacctgggagcacgaggccagcaggaagagcacccccaagaagctgcagaaccagaagaggcacctgtgcaagaagcagaggtctgaggcctacagcgagaggagccccccagccaagggggccactggacctgaggagcagagcgacagcctgaagtctgtgctgcacagcatcagctttgtggtgaggaagggcaagatcctgggcatctgtggaaatgtgggcagcggcaagagcagcctgctggccgccctgctgggccagatgcagctgcagaagggcgtggtggccgtgaatggcaccctggcctacgtgtcccagcaggcctggatcttccacggcaatgtgcgggagaacatcctgtttggagagaagtatgaccaccagcgctaccagcacacagtgcgggtgtgtggcctgcagaaggacctgagcaacctgccctacggggacctgacagagatcggggagcggggcctgaacctgagcggcggccagaggcagaggatcagcctggcccgggctgtgtacagcgaccggcagctgtacctgctggatgaccccctgtctgctgtggatgcccacgtgggcaagcacgtgtttgaggagtgcatcaagaagaccctgcggggcaagacagtggtgctggtgacccaccagctgcagttcctggagagctgtgatgaagtcatcctgctggaggatggagagatctgtgagaagggcacccacaaggagctgatggaggagcggggccgctatgccaagctgatccacaacctgcggggcctgcagttcaaggaccctgagcacctgtacaatgctgccatggtggaggccttcaaggagagccctgctgagcgggaggaggatgctgtgctggcccctggaaatgagaaggatgagggcaaggagagcgagactggaagtgaatttgtggacaccaaggtgcctgagcaccagctgatccagacagagagcccccaggagggcaccgtgacctggaagacctaccacacctacatcaaggccagcggcggctacctgctgagcctcttcaccgtcttcctgttcctgctgatgattggcagcgctgccttcagcaactggtggctgggcctgtggctggacaagggcagcaggatgacctgtggcccccagggcaacagaaccatgtgtgaggtgggcgctgtgctggccgacatcggccagcacgtgtaccagtgggtgtacacagcctccatggtgttcatgctggtgtttggagtgaccaagggctttgtgttcaccaagaccaccctgatggccagcagcagcctgcatgacacagtgtttgacaagcacttcccccagaggagccctggggcccaggagggcggggagtgccagcctgtgaccctggtgcacccccaccacctgctgcatgctggccctggccaccacagccggctgtggcaggagggggagctgcaccacctggtgtag

SEQ ID NO: 227810 - DNA, 2793 bp, Artificial Sequence
  derived and/or modified sequence
atggtgggggagggcccctacctgatcagtgacctggaccagagaggaagaagaagaagctttgctgagagatatgaccccagcctgaagaccatgatccctgtgcggccctgtgcccggctggcccccaaccctgtggatgatgctggcctgctgagctttgccaccttctcctggctgacccctgtgatggtgaagggctaccggcagaggctgactgtggacaccctgccccccctgagcacctatgacagcagtgacaccaatgccaagcgcttccgggtgctgtgggatgaggaggtggcccgggtgggccctgagaaggccagcctgagccacgtggtgtggaagttccagaggaccagggtgctgatggacatcgtggccaacatcctgtgcatcatcatggccgccatcggccccaccgtgctgatccaccagatcctgcagcagacagagaggaccagcggcaaggtgtgggtgggcatcggcctgtgcatcgccctgtttgccacagagttcaccaaggtgttcttctgggccctggcctgggccatcaactacagaacagccatccggctgaaggtggccctgagcaccctggtgtttgagaacctggtgtccttcaagaccctgacccacatctctgtgggggagatgttcatggccaagctgaacagcgccttccgccgcagcgccatcctggtgacagacaagagggtgcagaccatgaatgagttcctgacctgcatccgcctcatcaagatgtatgcctgggagaagagcttcaccaacaccatccaggacatcagaagaagagagaggaagctgctggagaaggccggctttgtgcagagcggcaacagcgccctggcccccatcgtgtccaccatcgccatcgtgctgaccctgagctgccacatcctgctgcggaggaagctgacagcccctgtggccttctctgtgattgccatgtttaatgtgatgaagttcagcatcgccatcctgcccttcagcatcaaggccatggccgaggccaacgtgtccctgcggaggatgaagaagatcctgattgacaagagcccccccagctacatcacccagcctgaggaccctgacacagtgctgctgctggccaatgccaccctgacctgggagcacgaggccagcaggaagagcacccccaagaagctgcagaaccagaagaggcacctgtgcaagaagcagaggtctgaggcctacagcgagaggagccccccagccaagggggccactggacctgaggagcagagcgacagcctgaagtctgtgctgcacagcatcagctttgtggtgaggaagggcaagatcctgggcatctgtggaaatgtgggcagcggcaagagcagcctgctggccgccctgctgggccagatgcagctgcagaagggcgtggtggccgtgaatggcaccctggcctacgtgtcccagcaggcctggatcttccacggcaatgtgcgggagaacatcctgtttggagagaagtatgaccaccagcgctaccagcacacagtgcgggtgtgtggcctgcagaaggacctgagcaacctgccctacggggacctgacagagatcggggagcggggcctgaacctgagcggcggccagaggcagaggatcagcctggcccgggctgtgtacagcgaccggcagctgtacctgctggatgaccccctgtctgctgtggatgcccacgtgggcaagcacgtgtttgaggagtgcatcaagaagaccctgcggggcaagacagtggtgctggtgacccaccagctgcagttcctggagagctgtgatgaagtcatcctgctggaggatggagagatctgtgagaagggcacccacaaggagctgatggaggagcggggccgctatgccaagctgatccacaacctgcggggcctgcagttcaaggaccctgagcacctgtacaatgctgccatggtggaggccttcaaggagagccctgctgagcgggaggaggatgctggcatcatcgtgcctgagcaccagctgatccagacagagagcccccaggagggcaccgtgacctggaagacctaccacacctacatcaaggccagcggcggctacctgctgagcctcttcaccgtcttcctgttcctgctgatgattggcagcgctgccttcagcaactggtggctgggcctgtggctggacaagggcagcaggatgacctgtggcccccagggcaacagaaccatgtgtgaggtgggcgctgtgctggccgacatcggccagcacgtgtaccagtgggtgtacacagcctccatggtgttcatgctggtgtttggagtgaccaagggctttgtgttcaccaagaccaccctgatggccagcagcagcctgcatgacacagtgtttgacaagatcctgaagagccccatgtccttctttgacaccacccccaccggccgcctgatgaaccgcttcagcaaggacatggatgagctggatgtgcggctgcccttccacgccgagaacttcctgcagcagttcttcatggtggtgttcatcctggtgatcctggccgctgtgtttcctgctgtgctgctggtggtggccagcctggccgtgggcttcttcatcctgctgcgcatcttccaccggggcgtgcaggagctgaagaaggtggagaatgtgagccgcagcccctggttcacccacatcaccagctccatgcagggcctgggcatcatccacgcctacggcaagaaggagagctgcatcacctag

SEQ ID NO: 227811 - DNA, 321 bp, Artificial Sequence
  derived and/or modified sequence
atggtgggggagggcccctacctgatcagtgacctggaccagagaggaagaagaagaagctttgctgagagatatgaccccagcctgaagaccatgatccctgtgcggccctgtgcccggctggcccccaaccctgtggatgatgctggcctgctgagctttgccaccttctcctggctgacccctgtgatggtgaagggctaccggcagaggctgactgtggacaccctgccccccctgagcacctatgacagcagtgacaccaatgccaagcgcttccgggtgctgtgggatgaggaggtggcccgggtgggcccctag

SEQ ID NO: 227812 - DNA, 858 bp, Artificial Sequence
  derived and/or modified sequence
atggtgggggagggcccctacctgatcagtgacctggaccagagaggaagaagaagaagctttgctgagagatatgaccccagcctgaagaccatgatccctgtgcggccctgtgcccggctggcccccaaccctgtggatgatgctggcctgctgagctttgccaccttctcctggctgacccctgtgatggtgaagggctaccggcagaggctgactgtggacaccctgccccccctgagcacctatgacagcagtgacaccaatgccaagcgcttccgggtgctgtgggatgaggaggtggcccgggtgggccctgagaaggccagcctgagccacgtggtgtggaagttccagaggaccagggtgctgatggacatcgtggccaacatcctgtgcatcatcatggccgccatcggccccaccgtgctgatccaccagatcctgcagcagacagagaggaccagcggcaaggtgtgggtgggcatcggcctgtgcatcgccctgtttgccacagagttcaccaaggtgttcttctgggccctggcctgggccatcaactacagaacagccatccggctgaaggtggccctgagcaccctggtgtttgagaacctggtgtccttcaagaccctgacccacatctctgtgggggaggtgctgaacatcctgagcagtgacagctacagcctgtttgaggccgccctcttctgccccctgcctgccaccatccccatcctgatggtgttctgtgccgcctatgccttcttcatcctgggccccacagccctgattggcatctctgtgtgcctgtggcccagcagcatccagctgtctgagggccagcagttctggtag

SEQ ID NO: 227813 - DNA, 4080 bp, Artificial Sequence
  derived and/or modified sequence
atggtgggcgagggcccctacctgatcagcgacctggaccagcgggggaggcgaagatccttcgcggaacgttatgacccttccttaaagacgatgattcccgttcgtccatgtgctaggcttgctccaaatccagtcgacgatgccgggctactgtcgtttgctaccttctcttggttaaccccagtgatggtgaagggctacaggcagaggcttaccgtcgatacacttcccccgctgtctacatatgatagctcagacaccaatgcaaaaagattcagggttttatgggatgaagaagtcgccagggttggaccagaaaaggcatctctctcccacgttgtgtggaagtttcaaagaaccagggtgctgatggatatcgtcgccaacattctttgtataataatggctgccatcggcccagtgattctgatccatcagatcttacagcagaccgagagaacttcagggaaggtctgggtggggatcggcctgtgcattgccctctttgccaccgagtttacaaaggtctttttttgggccttggcttgggccatcaattacagaacggccatccgattgaaggtggctcttagcacactggttttcgaaaaccttgtttcttttaaaactctgacccacatctccgtcggagaagtgctgaacatactgtcctccgactcatactcactgttcgaagctgcattattctgcccactgcctgccacaatcccaattctgatggtattctgtgcagcctatgctttcttcatcttaggacccaccgccctcatcgggatcagtgtatatgtgatattcattcctgtacagatgtttatggctaaactcaattctgcatttaggaggtcagctatcctggtgacggataagagagtgcagactatgaatgagttcttaacctgcattcggttaattaagatgtatgcctgggaaaagtccttcacaaatacaattcaagatattagaagaagagaacggaaactgctagagaaggccgggtttgttcagtctggtaacagcgcactcgcaccaattgtgagtaccatcgctatcgtactgacactgtcgtgtcacatcctgctgagacgcaagctgacggcccccgtggccttctcagtaatcgccatgttcaacgtcatgaagttctctattgctattctgcctttctcaataaaggcaatggccgaagccaacgtaagcttacgacggatgaaaaagatcctcatcgataagagtccgccctcatacattactcagcccgaggatcctgataccgtgctgcttctggctaatgccacacttacttgggaacacgaggcctccagaaagtcgacgcccaagaagctgcagaatcagaaacgacacttgtgcaagaaacagcggtctgaagcctatagcgagagaagccctccggcaaagggagccaccggacctgaagagcagagcgacagtctcaaatccgtactgcactcaatcagtttcgtggtgcggaagggaaaaatcctcggtatctgcggaaacgtgggatctggcaagtcctctttgctcgcagctctcctcggccagatgcaactgcagaaaggcgtggtcgccgtcaatggcactttggcctatgttagtcagcaggcttggatcttccacggaaatgtgagagaaaacattctgtttggggaaaaatacgaccatcagcggtaccagcatacggtccgcgtgtgtggcctccagaaagacctgtccaacctgccgtatggcgatctgaccgaaatcggcgaacggggattgaatctgtctgggggacagagacagaggatctcgctcgctcgcgccgtctactccgacagacaattatacctactggatgatcccttgtcagccgtcgacgcccacgtgggcaagcacgtatttgaggagtgcattaagaaaactctgcgcggcaagactgtggtgctggtgacacaccagctccagttcctcgaaagctgtgacgaggtcatactgctggaggacggtgagatctgtgagaaaggtacacacaaagagctgatggaggaaaggggaaggtacgcaaaacttatccataatctacgtggtctgcagttcaaagaccccgagcatctctacaacgccgctatggtcgaggcattcaaagagagcccagctgaaagagaggaagatgccggcattatcgtcctggccccaggaaacgaaaaggatgagggaaaggagtcggaaactggcagcgaatttgtggacactaaggtcccggagcatcagctgatccagacagagtctcctcaagaaggcacagtgacctggaagacctaccacacctatatcaaagccagcggcggatatcttcttagccttttcacagttttcctgtttctactgatgatagggtccgcagcattctcgaattggtggctggggctctggctggataaagggagcaggatgacatgcggcccacaaggtaatcgcaccatgtgtgaggtgggtgcagtgcttgccgacattggccaacatgtgtaccaatgggtatataccgcttcaatggtgtttatgcttgtattcggcgtgaccaagggcttcgtattcaccaaaacaacactgatggcaagttcctccctacatgacacggttttcgacaagatcttgaagtcccccatgtcatttttcgataccaccccaacaggacggcttatgaaccgatttagcaaggatatggatgagctcgacgttcgcttgccttttcacgccgagaacttcctccagcaattctttatggtggtgtttatcttggttatcctagctgccgtgtttccagcagtactgctggtagtcgccagcctggccgtggggtttttcattttgctgagaatcttccataggggcgtacaggaactgaagaaagttgagaacgtctcccgatccccatggttcacgcacatcacatccagcatgcagggcctaggtattatccacgcatacgggaagaaggaatcttgcatcacttatcacctgctgtacttcaactgcgcgctgcggtggtttgccctgcgcatggacgtcctgatgaacatccttaccttcacagtagcgctcctcgtgaccctgtcattcagtagcatttcaacttcaagtaagggtctctccctcagctacattatacaattgagtggtctgttgcaggtgtgtgtccgaacaggtaccgagacacaagccaagtttacctccgtcgaactgctaagagaatatatcagtacatgcgtgcctgagtgtacccaccccctgaaagttggcacatgtcctaaggactggccaagtaggggcgagatcaccttcagggattaccagatgagatacagagataatacccctttggtgctagattccctcaacctgaatatccaatcaggtcagaccgtcggtatcgttggtcgaacaggtagcggcaagtccagtcttgggatggccctgtttagattggttgagcccgcttcgggcacaattttcatcgatgaagtcgatatctgcatcctctccctcgaagacctgagaacgaagctaacggtgattccgcaggatccagtcctctttgtgggcacagtgaggtataatctggatccattcgagagccacaccgatgaaatgctctggcaggtgctggagaggactttcatgcgggacactattatgaagctcccggagaaattgcaagcagaagtcaccgaaaacggagagaactttagcgtcggggagcgccaacttctgtgtgtggcccgggctctgcttcgcaatagcaagattatcctgttagacgaggcaacagcctccatggacagtaagacggatacgctggtgcaaaacaccataaaggatgcttttaaaggttgcaccgtgcttacaatcgcccatcgcctgaacaccgtgctgaattgcgatcatgtactggtgatggagaacggcaaagtgattgagttcgacaagccagaagtcttggctgagaagcctgattctgcatttgccatgctgctcgccgccgaagttcgcctttag

SEQ ID NO: 227814 - DNA, 1902 bp, Artificial Sequence
  derived and/or modified sequence
atggtgggcgagggcccctacctgatcagcgacctggaccagcggggcaggcggcgtagttttgctgaacggtacgatccctccctcaagacgatgatccccgtgagaccctgtgcacgtctcgcccctaatcctgtcgatgatgctgggctcttgtctttcgccaccttttcttggttaacacccgttatggtgaagggttatagacaaaggttgacggttgatacattgccaccattgtctacatatgatagctcagatactaacgccaaacgctttcgcgtcctctgggacgaagaggtggcgagagtggggcccgaaaaagcgagtttaagccacgtggtttggaaatttcagcgtactcgcgtattgatggatattgtggcgaatatcttgtgtatcataatggcagctattggtcccaccgttctgattcaccaaatcctccaacagactgagcgtacaagtggcaaagtgtgggtcggtattggcctatgtattgccctcttcgctactgaattcacaaaggtgttcttctgggcccttgcctgggccattaactatcgcacagcgattaggctgaaggtggctctgtctacgctggtattcgagaatctggtgtccttcaagaccctgacacacatcagtgttggggaggttctgaacatcctctccagcgactcctactccctgtttgaggctgctctgttttgtcctctccctgccacgatacctatcttgatggtgttctgtgctgcctacgctttctttatcctgggaccaaccgctctaatagggatctctgtctatgtaatattcattcccgtccagatgttcatggcaaaactgaatagtgccttcagacggtctgccatcctggtcaccgacaagagggttcagacgatgaacgaattcctgacctgtatccgcctcattaaaatgtatgcatgggagaaatcctttaccaacacaattcaggacattaggcgccgggagcgtaaactgctggagaaagccgggttcgtacagtctggtaattcggcgctggcgccgatagtgtccacaatagctattgtgctaaccctatcctgtcatattttgctccggcggaaacttaccgcaccagtggccttctcagtgatagcaatgtttaacgttatgaaatttagtattgccatcctgccttttagcatcaaggccatggccgaggctaatgtgtcactccgcaggatgaaaaaaatcctgatagacaagtcaccaccctcttacataacacagccagaggaccccgatacagtactgctgcttgctaatgctacactgacttgggagcacgaagcttccagaaaatctacacctaaaaaactccagaatcagaagagacatttgtgcaaaaagcagcggagcgaagcttattcggaacggtcacctcctgcaaaaggcgcaaccgggccagaggaacaaagcgacagtctgaagagtgtcttacacagcatctctttcgttgtgcgcaaaggcaaaatcctgggaatctgcggtaacgtgggttctggcaaatcctcgttactcgctgctttgcttgggcagatgcaacttcagaagggggttgtcgcggtgaacgggaccctggcctacgtgtcacagcaggcttggatcttccacggaaatgtgcgtgagaatattctgttcggagagaagtacgatcatcaacgtctagggtctggggcttcgacttccctaggcggcaggggaagggggctggcttggccagctctttctaccccgaccgttagtagcacctgctggaccactccatgtagaccttggacgccaacttgggggtcaacttccctccggtccgccctacggaggcggtccggcgaacggcagagctcttggtag

SEQ ID NO: 227815 - DNA, 2808 bp, Artificial Sequence
  derived and/or modified sequence
atggtgggcgagggcccctacctgatcagcgacctggaccagcggggcagaagacgatcgttcgccgaaagatacgacccatcccttaaaaccatgattcccgtacgcccatgtgctagactcgccccaaaccctgttgacgatgccggtcttctgtcctttgccaccttttcatggttgacccccgttatggtgaagggataccggcagcggctgaccgtcgatacattgcctccactttctacttatgactccagcgatactaacgcaaaacgtttccgggtgctgtgggatgaggaagtggctcgggttgggccagagaaggcgtccctgtcccacgtcgtctggaagttccagcgtactcgcgtgcttatggacattgtagccaacatcttatgcattatcatggcggctatcgggccaaccgttctcatccaccagatcttgcaacaaaccgagaggacgtccgggaaggtctgggtaggcattgggctttgtatcgcattatttgctactgagtttacgaaggttttcttttgggccctagcctgggccatcaattatagaacagccattcggctgaaggttgcattgtccactctggtttttgaaaatctggtgagctttaaaactctgactcatatttccgtgggcgaggtgctgaacatactctcttccgattcgtactccctgttcgaggccgctcttttttgccccttgcccgccacaatcccaattctgatggtgttctgcgcagcctacgcctttttcatcttaggtccgactgccctgataggcatttctgtatacgtgatctttattcctgtgcagatgttcatggctaagctaaattcagcgttcagacgatcggccattctcgtgacagacaagcgcgtccagaccatgaatgagttcctgacctgcatcagactcatcaagatgtatgcctgggaaaaatcattcacaaacacaatccaagatattcggcgccgggagcgcaaactgttggagaaggccggatttgttcagagtggcaattccgcgctggcgcccattgtgagcacaatcgctatagtactgacgctgagctgtcatatactcctgaggaggaagctcactgctcctgttgcctttagcgtgatcgcaatgttcaatgtgatgaagttttccatcgccatactaccattctccattaaggctatggccgaggccaacgttagtctacgcagaatgaaaaagatattgatagacaagtcgcctccctcctatataacccaaccagaagaccccgacaccgtcttgctgcttgccaatgctaccctgacctgggagcacgaggctagccgcaagtcaactcccaagaaactgcagaatcagaagcggcatctgtgcaagaagcagcggtccgaggcgtatagcgaaagatcaccacctgctaaaggtgccacgggacctgaggaacagtccgacagtttgaagagtgtccttcactccataagtttcgtcgttaggaaggggaagatcctcgggatctgcggaaacgtgggctccggaaaaagttcattgctggcagccttactggggcagatgcaactgcagaagggcgtggtagctgtcaatggcacactagcttacgtctcccagcaggcttggatcttccacggcaatgtgcgagagaacatcctgtttggcgagaagtacgaccatcagcgttaccagcataccgtcagggtctgtggacttcaaaaggacctgtcaaacttgccctatggggaccttactgaaattggagagagagggctcaacctgtccggcggccaacgccagcgcatttcattggccagggccgtttactcggatagacagctatatctacttgacgatcctctgtcagccgtggatgcccacgttgggaaacacgtgtttgaagagtgtattaaaaagacccttcgcggtaagactgtggtgctggtcacacaccagctgcagttcctagagtcttgtgacgaggtgattctgctggaggatggggagatctgcgaaaagggaactcataaagagctgatggaggagagggggcggtacgcaaagctcattcacaacttgagagggcttcaatttaaagatcccgaacatttgtataatgcagcaatggttgaggcattcaaggaatctccagcagaaagagaagaagacgccgtcctcgcccctggaaacgaaaaagacgaaggaaaggagtccgaaactggatccgaattcgtggacaccaaagtgcctgagcaccaactgatccagaccgaaagtccacaggaagggacagtgacgtggaaaacttaccatacctatataaaggctagcggtggatatctcttatccctgtttaccgtgtttctgtttctcctgatgattggatcggccgcttttagtaattggtggctgggcctgtggctcgataaggggtcccgcatgacgtgtggccctcagggtaatcggactatgtgcgaggtgggcgctgtcctcgctgatatcgggcaacacgtctatcagtgggtatatacggcgtccatggtctttatgctggtgttcggcgttaccaagggattcgtgttcacgaagacgactctgatggcctcctcatcactgcacgacaccgttttcgacaaacacttccctcagcggtctccaggggcccaggagggaggcgaatgccagcctgtgaccctagtgcaccctcatcatctgttacacgctgggcccggccaccattctaggctttggcaagagggtgagctccaccacctcgtttag

SEQ ID NO: 227816 - DNA, 2793 bp, Artificial Sequence
  derived and/or modified sequence
atggtgggcgagggcccctacctgatcagcgacctggaccagcggggcaggcgacgtagtttcgctgagagatatgacccttccctgaagacgatgattcccgtgcgtccctgcgcacgtctggcccctaacccggtcgatgatgccgggcttctttcctttgccaccttcagttggctcaccccagtgatggtcaagggatataggcagcgccttaccgtcgacacacttccgccactgtcaacgtatgacagcagcgacacaaacgctaaaagattccgggtcctttgggatgaggaagtggcccgggtaggccccgaaaaagccagtctgagccacgtcgtgtggaagttccagcgcacccgggtgctgatggacattgtagctaatatactgtgtattatcatggctgccattggccctaccgtcctcattcatcagatcctgcagcagacagaacgtacatctggcaaggtttgggtaggcattggattatgcatcgcgctgttcgcgaccgagttcactaaggtgtttttctgggccctagcatgggcgattaactaccgcacagctatcaggttaaaagtcgctctgtcgaccctggtgttcgaaaacctcgttagctttaaaacactcactcacatctcagtgggcgaaatgtttatggccaaactaaattcagcgtttagacggtccgccattttagtgaccgataagcgggtccagacaatgaacgagttcctgacctgtataagactgattaaaatgtatgcatgggagaaatcatttactaatacaatccaggatatacgacggcgggagcggaagctgctggaaaaggctggctttgttcagagcggtaattccgcacttgcccccatcgtttcaacaatcgccatcgtactgactctcagctgccacattttgctgcgccgcaagctcaccgcccccgtagcgttctcggttatcgccatgttcaacgtgatgaagttttccatcgctattctgcctttcagtatcaaggcaatggctgaagccaacgtaagtttaaggagaatgaaaaagatcttaattgacaaaagtcccccctcctatatcacccagccggaggaccctgacactgtcctgctgctggctaatgccacgctgacatgggagcacgaagctagcaggaagtccaccccaaagaagttgcagaaccagaaaagacatctctgcaaaaagcagagatcagaggcatactctgaaaggtcgccacccgcaaaaggcgccaccggacctgaggagcaaagcgactccttgaagtctgtgttacatagcatatctttcgtggtgcggaagggaaagattctggggatctgcggtaacgtaggatctggaaaatcatccctcctagctgccctcctgggtcagatgcaattacaaaaaggggttgttgcagtcaacggtacccttgcctatgtgtcacagcaagcctggatttttcacggtaacgttcgcgaaaatatcctgttcggggagaagtatgatcatcagaggtaccaacacaccgtgagagtgtgcggtctccagaaggatttgagtaacctgccttatggcgatctcactgagataggggagcggggcctaaacctcagcggcggtcagcgtcaacgcatcagcctggcacgcgcagtatacagcgacaggcagctatatttgttagacgatccactctctgccgtcgatgcccacgtaggaaagcatgtttttgaagaatgcattaagaaaacccttcggggaaagaccgtggtgcttgttactcaccagctacagtttttagaatcttgcgatgaggttattctcctcgaggacggggaaatttgcgagaaaggaactcacaaagagttgatggaagagcgcggtcgatatgccaaactgattcacaacctccgaggcctccagttcaaagatcccgaacatctatacaatgcggccatggtggaagccttcaaagaatcccccgcggaacgtgaggaagacgccgggattattgtgcctgaacatcaactgattcaaactgagtcaccgcaggaaggaacagtgacctggaagacctaccatacctatatcaaggctagtggagggtacctgctttcacttttcacagtctttttattcctgctgatgattggctctgctgcgttctcgaactggtggcttggtctctggctggacaagggcagtagaatgacttgcggtccacagggcaataggacaatgtgcgaagtcggagctgtgctcgccgacattggccagcacgtttaccagtgggtctataccgcctctatggtcttcatgctcgtgtttggggtaacaaagggatttgtgtttacaaaaaccaccctgatggcttcatcttccctacacgacaccgtgttcgataaaatcctgaaaagcccgatgtcttttttcgacactacccctactggccgactgatgaaccgtttcagtaaggatatggacgagttagatgttagattgccattccatgccgaaaatttcttacaacagttcttcatggtggtcttcatcctcgtgatcctcgccgctgtgttccctgcggttctgctggtggtcgcgtccctggcagtgggcttctttattcttctgcggatattccacaggggcgtgcaagagcttaagaaggtcgagaacgtgagtagatccccctggttcacccatataacaagctcaatgcagggtttgggtataatccatgcttacgggaaaaaagagagctgtattacttag

SEQ ID NO: 227817 - DNA, 321 bp, Artificial Sequence
  derived and/or modified sequence
atggtgggcgagggcccctacctgatcagcgacctggaccagcggggtcgacgacgaagcttcgctgaacggtatgatccaagtctgaaaacaatgatccctgttcgaccatgcgctaggctcgcacctaatccggtggatgatgcgggcctacttagcttcgccacttttagttggctcactcccgtgatggtgaagggttatcgccagcggctcaccgttgatactcttcctcctcttagcacgtacgactccagcgataccaacgctaaacgcttccgggtgttgtgggacgaagaggttgccagagtgggtccatag

SEQ ID NO: 227818 - DNA, 858 bp, Artificial Sequence
  derived and/or modified sequence
atggtgggcgagggcccctacctgatcagcgacctggaccagcggggccgaaggcgctcttttgcagaaaggtatgatccatccctcaagactatgatccccgtgagaccttgcgctcgactcgctcctaatccagttgacgacgcaggcctgctgagtttcgctacatttagttggctgaccccagtcatggtgaagggctaccgccaaagactgacagttgatacactgcctccgttaagtacatacgactcttccgacaccaatgcgaagcgattcagagttctttgggatgaggaagttgcccgggtgggccctgaaaaggccagtctgtcgcacgtggtgtggaagtttcaacgcacgcgtgttctgatggatatagtggcaaatattctgtgcattatcatggcagcgatcggccctaccgtgctcattcatcaaattctccagcagaccgagcgcacgagcggcaaagtctgggtggggattgggctgtgtattgctctctttgcaacggagttcactaaagtcttcttttgggcactagcgtgggcgatcaactaccgtacagcaatcaggcttaaagtcgcccttagcaccttggtgttcgagaacttggtctctttcaaaactctcacgcacattagtgtcggcgaagtgctgaacatcctttcttccgattcctactcgctgtttgaagccgctctgttttgcccattgcctgccaccatccctatcctaatggttttctgtgccgcttatgccttctttattctgggccctaccgctctgattggcatctccgtgtgtctgtggccaagttccattcagttatccgaaggacagcaattctggtag

SEQ ID NO: 227819 - DNA, 4080 bp, Artificial Sequence
  derived and/or modified sequence
atggttggtgaaggaccctaccttatttcagatctcgatcagagagggcgaagaaggagcttcgcagaacgttatgatccgtcgttaaagaccatgatccccgtgaggccatgtgctaggctagcccctaaccccgtcgacgacgccggattgctctcttttgccacattttcctggctaacacctgttatggtcaagggttacagacagcgcttaaccgtagatacactgccaccactgagcacttatgactcctcagacactaatgccaagaggtttcgggtgctctgggacgaggaagtggcgagagtgggtccagagaaggcatccctgtctcatgtagtgtggaaatttcaaaggactcgcgtgcttatggatatagtggccaacatactgtgcattataatggccgctatcggcccagttatattaatccatcagattttacaacagacagaaaggacatctggaaaggtgtgggtaggaatcggcctttgtattgctctgtttgcgactgagtttaccaaggtctttttctgggccctggcctgggcaattaactacagaaccgcaatccgactgaaggtggcattgtctacacttgtgttcgagaacctggtcagtttcaagacactcacccacattagcgtgggggaggtgctgaacatcttaagcagtgactcatattcgctatttgaggcagccctcttctgccctctgccagctacaattcccatacttatggtattttgcgccgcatatgcctttttcattctcggacctactgccttgattggcatcagcgtatacgttatttttataccagtgcaaatgtttatggcgaagctaaacagcgccttcagacggagcgcaatcctggtgacagacaagcgggtacagacaatgaatgaattcctcacctgcatccgactgattaaaatgtatgcctgggaaaaaagcttcaccaacacaatccaggacattagaagaagagagagaaagctccttgagaaggccggattcgttcagtctggtaactccgcactggctccgatcgtttcaacaatagctatagtccttactttgtcatgccatatcctccttcgcaggaagcttacagcaccagtggccttttctgtcattgccatgtttaacgtaatgaagttttccatagcgatcctgccattctctattaaagcgatggcggaggccaacgtgagcctgcggaggatgaaaaagatcttgattgataaatcaccaccttcgtacattacccaaccggaggatccggataccgttctgctgctcgccaatgcaaccttgacgtgggagcacgaggcatcccggaaaagtacacccaaaaaactccaaaaccaaaagcggcacctctgcaaaaaacagagaagtgaagcttattcagagcgaagccctccagccaagggagccactggcccagaggagcaatccgattcactgaagagtgtgcttcacagcatctctttcgtggttaggaaaggaaagatcctgggaatttgtgggaatgttggctctggaaagagctccttgctggccgctcttttaggccagatgcagcttcagaagggagtggtggctgtgaacggcacactggcatatgttagtcagcaggcttggatattccacgggaatgtgagggaaaacattctgtttggcgagaaatatgatcaccagcggtaccagcacacggtccgggtatgcggtcttcagaaagaccttagcaacctcccatacggtgatctgacggagatcggtgaacgcggactaaacctgagtgggggtcagaggcagaggattagcctagcaagagctgtttacagcgatagacagttgtacctgctggatgatcccctgagtgccgtagacgcacacgtgggcaagcatgtctttgaagagtgcataaagaagaccttgagggggaagaccgtggtactggtaactcatcagttgcagttcttagaatcatgtgacgaggtgatactcctggaggacggtgagatatgtgagaaaggcactcataaggaactgatggaggagcgaggacggtacgcgaagttgatccataacctgcggggactgcagtttaaggatcccgaacacctgtataatgccgcaatggtcgaagcattcaaagagagccctgctgagcgcgaggaagacgctggaatcattgtgttggctcccggaaacgaaaaagacgagggtaaggaatctgaaactgggagtgagtttgtcgacacgaaagtccctgagcaccagctgatacagaccgaaagcccccaggagggcacagtcacctggaaaacttaccatacgtacatcaaagctagtggaggctatctgctctcattgttcaccgtgttcttgtttttactcatgatcggaagcgctgcattctcaaattggtggctgggcctgtggctggacaaaggaagccggatgacatgcggacctcaaggcaatcgtaccatgtgtgaagtgggtgccgtgttggcagacattggccagcatgtctaccagtgggtctacactgcatctatggtgttcatgctcgtctttggggtcacaaaagggtttgtatttacaaaaaccaccctgatggctagcagcagccttcatgatacggtcttcgataaaatactgaagagtccgatgtcattcttcgacactacccctaccggtcgactcatgaaccggttcagtaaagatatggatgagctcgatgtaagattgccctttcatgcggagaacttcctgcagcagttttttatggtggtgttcattctggtaatccttgctgctgtgttcccggctgttctgttagtggtggcatcgcttgctgtaggcttcttcatcctgttgcgaatctttcataggggtgttcaggagttaaagaaggtggaaaacgtgtccagatccccgtggttcacgcatattacttccagtatgcaggggctgggaattattcacgcctacggtaaaaaggagtcctgtattacatatcacctgctctattttaactgcgccctgcgctggttcgcactgcgaatggacgttctcatgaatatcctgaccttcaccgtggctttactggttacactgtcattcagcagcatttccacaagctccaagggattatcactgagttatatcattcagctgtccggcctcctgcaggtatgtgtcagaaccggcacagaaactcaagctaagtttacgagtgtggaactgttgagagagtacatttctacatgtgtaccagagtgtactcaccccctcaaagttggaacatgccccaaagattggccgagtcgtggtgaaataacatttcgggactaccaaatgagatacagggataatacccccctcgttctggattctctgaacctgaacattcaatccgggcagacagttgggattgtaggtaggactgggagcggcaagagcagcctcggcatggcactgtttcgactcgttgaaccagctagcggcaccatctttattgacgaggtcgatatctgcatactcagtctagaggatctgcgcaccaaactgacagtgattccgcaggaccccgtgttgtttgtgggcacggtccgttataacttggacccattcgagtcccacacggatgaaatgctctggcaagtcttagaacgcacattcatgcgcgacacgatcatgaagctcccagaaaaattgcaggcggaggttacggagaacggtgagaattttagcgtgggtgagagacagttgctctgtgtggctagggcactgctgcgcaactccaagataatactactggacgaggctacagcgtccatggacagcaagacggatacactcgtgcaaaacacaatcaaggacgcattcaaagggtgcaccgtgctgactattgcccatagactaaacacagtgcttaattgcgatcatgtcctggttatggaaaatgggaaagttatcgagtttgataagccagaagttttggctgagaaaccagacagcgctttcgccatgctcctcgccgctgaagtgcggctttag

SEQ ID NO: 227820 - DNA, 1902 bp, Artificial Sequence
  derived and/or modified sequence
atggtgggtgaggggccttatctgatttccgatctcgaccagaggggtcgcaggaggtcctttgccgaacggtacgaccccagcctgaagactatgatccctgttagaccctgcgccaggctggccccaaatccggtggatgacgccggactgctatcctttgccaccttctcatggctgaccccggtcatggtcaaaggataccggcagagattgacggtggacaccctgccgcctcttagtacctacgacagctccgacacgaacgctaagcgatttagagtactttgggatgaagaggttgccagagtgggacccgaaaaagcctcactgtcacacgtggtctggaagttccagagaacccgcgtactgatggatattgtggccaatattctgtgtatcatcatggccgctataggccctaccgtgctgatccatcagattctacagcagacagaacggacgtctggaaaggtgtgggtgggtattgggctctgtatagctctatttgcaacagagttcaccaaggttttcttttgggccctcgcatgggcgattaactaccgaacagcaattcgattaaaggttgccctatctacactcgtgtttgagaaccttgtatctttcaagactctgacacacatcagtgtcggagaagtcttaaatattttaagctcagattcctattcactttttgaggctgcactgttctgcccattgccagcgacaattccaatactgatggtgttttgcgcagcctacgctttctttatcctgggtccgactgccctaatcgggatctccgtgtacgtcatctttatcccagtgcagatgtttatggccaaactgaatagcgcgtttcggcgatcagctatactggtgactgataaaagggtccagactatgaacgagttcctgacttgtattcggctgatcaaaatgtatgcatgggagaaaagctttactaacaccatccaagatataagacggagagaaaggaagctgctggagaaggccggattcgttcagagtggaaacagcgctctcgcccctatcgttagcactatagccatcgtgctgaccctgtcctgccacattctactcagacgcaaactgacagcccctgtggctttcagcgtgatagcaatgttcaacgtgatgaaattttctatcgcaattctaccattcagcattaaagccatggcagaggccaacgttagtctccgtcgcatgaagaaaatcctgatcgacaaaagccctccatcttacatcactcagccggaagacccagatactgtcctgctcctagctaacgcaaccttgacctgggaacacgaagcatcacggaaatcaacaccgaaaaaactgcagaatcaaaagaggcacctctgcaagaagcagcggagcgaggcatatagcgagcgatcccctccggctaagggagcaacaggcccagaagaacagtctgatagcctgaagagcgtgctgcactctatctcttttgtggtgagaaaaggaaaaatcttggggatatgtggaaatgtaggaagtgggaagtcatctcttctagccgctctgctcggccagatgcagctccaaaaaggcgtggtcgctgtcaacggcacactggcctatgtgagccaacaggcatggatcttccatggcaacgtgcgagaaaatatcctctttggagaaaaatacgatcaccagcggctgggctcaggcgcttctacgtccctcggcggaaggggtcggggactggcgtggcccgcactatctacccccactgtttcgtcaacgtgttggactaccccatgtagaccttggactccaacttggggctccacaagcctccgctccgcgttaaggaggagaagtggagagcggcagagcagctggtag

SEQ ID NO: 227821 - DNA, 2808 bp, Artificial Sequence
  derived and/or modified sequence
atggtcggcgaggggccttatcttatctctgatttagaccaacggggtcggagacgcagctttgccgaacgctatgaccccagcctgaaaaccatgataccagtgaggccttgcgctcgcttggccccaaaccctgtagatgatgccggtttgctgtcatttgctacattctcctggttaacgccggtgatggtaaagggctaccgtcagaggctgaccgttgacacgctgccccctctatccacatacgactcttcagatacaaatgctaaaagattccgagttttgtgggatgaagaggtggcaagagtcgggccagagaaagcctccctgtcccacgtcgtttggaagtttcagcggacaagggttcttatggacatagtcgccaatatcctctgcatcatcatggctgcaattggaccaaccgtattgatccaccaaatactccaacaaaccgagagaaccagcggaaaggtgtgggtaggaatcggcctgtgcatagccctatttgccaccgagttcaccaaggtgtttttttgggcactggcctgggcaattaattacaggaccgcaattcggcttaaggtggccttatctacactcgtcttcgagaacctggtcagcttcaagaccctgactcatatctccgtgggcgaggtgctgaacatcctgagttccgactcttacagtctcttcgaagccgctctgttttgccctttgccggctacaataccaattctcatggtgttctgcgccgcttatgcgtttttcatccttggacctacggcacttatcggtatttctgtctacgtgattttcatccccgttcagatgttcatggctaagctcaacagcgctttcaggcggtcagccattcttgtgactgacaaaagagttcagactatgaacgagttcttgacctgtattcgactcatcaaaatgtacgcgtgggagaagagcttcacgaatactatccaggacatccggagacgtgagcgcaagctgcttgaaaaagctggatttgtgcagtccggtaactcagcgctcgcccctattgtgtctaccatcgccatcgtccttaccctctcatgtcatatactacttcgaaggaagttgaccgccccagttgcattctccgtcatagcaatgtttaatgtaatgaaattctccattgccattctacccttctctattaaagccatggccgaggctaacgtgtctctgcgtcgaatgaagaagatcctgattgacaaaagcccccctagctacatcactcagccagaggatcctgatacagtcctgttgctggccaatgcaaccctgacatgggagcacgaggccagccggaagtctacccccaagaagcttcagaatcagaagcgacatctgtgtaagaagcagcgatccgaggcctactctgaacggagccctcctgctaagggagcgactggcccagaagaacaatccgattctcttaagagcgtcctgcatagcatctcgtttgtggtcagaaaaggcaaaatcctgggcatctgtggcaacgttggcagtggcaaaagctcgttgctcgccgctctcctggggcagatgcagttgcaaaagggcgtcgtagctgtgaatggtaccctggcatatgtgtcccagcaagcttggatattccatggaaatgtacgagaaaacattctgttcggggaaaagtatgatcaccagcgctatcagcacacagtgagagtttgcggtctgcagaaggacctgagcaatcttccatacggcgatctcactgagattggcgaacgcggactcaatctgagtggaggacaacgccaacgcatcagtctggccagggctgtgtattccgatcgtcagctatatcttttagatgacccacttagcgcagttgatgcacatgtcggaaaacacgtgtttgaagagtgcattaagaaaaccctgcgaggaaaaaccgtggtgctggtgacacatcaattgcaattcttggaaagttgtgatgaagtgatactactcgaagatggtgaaatctgtgaaaagggaacccacaaggagttaatggaggaaagagggagatatgccaagctcattcataatctgcggggacttcagttcaaggatcccgagcacttgtacaacgcagctatggttgaggcttttaaagaatcaccggctgaaagggaggaggacgctgtactggcccctggaaacgagaaggatgaagggaaggaatctgaaacaggctccgaattcgttgacactaaggtccctgaacaccagttaatccagacggagagtcctcaagagggaaccgtcacctggaaaacttaccacacatacattaaagccagcggtggatacctcctgtccttgttcacagtgttcctatttctcctgatgataggtagcgcagccttctccaattggtggctgggactctggctggataaagggtcacgcatgacctgcggtcctcaggggaatcggactatgtgcgaagtgggcgcagtgcttgccgatattggacagcacgtgtaccagtgggtgtatactgcatccatggtattcatgcttgtgttcggcgtgacaaaggggttcgtgtttacaaagaccaccctgatggcatcctcctcgttgcatgatactgtctttgacaaacactttccacagaggagtcctggcgcacaggaaggaggagagtgtcagcctgtaactctggtgcatcctcaccacctgctgcacgccggaccgggacatcactccaggctatggcaggagggggaactgcatcacctcgtatag

SEQ ID NO: 227822 - DNA, 2793 bp, Artificial Sequence
  derived and/or modified sequence
atggtgggcgaaggcccatatctgatcagcgacctggaccagcgcggacggagacgctcctttgctgagcgctatgatcccagcctgaagacgatgattcccgtcaggccatgtgccaggttggcaccaaaccctgtggatgacgctggactgctctcctttgccaccttctcctggctgacccctgtaatggtcaagggatacagacagcgcctcactgtggataccctgccaccactcagcacatatgattcgagcgataccaacgccaagaggttccgagtcctatgggatgaagaggtcgctagggtgggacctgagaaggcttccctgagccatgtggtgtggaagtttcagcgtacacgagtcctgatggacatcgtggccaatatactgtgcataatcatggcggctatcggacccaccgttctgattcaccaaatcctgcagcagacagagaggactagcggcaaggtatgggtcgggattgggctatgcatcgccctgttcgcaaccgagtttactaaagtcttcttctgggcccttgcgtgggctattaactatcgaactgcaattagattgaaagttgcactcagtacactggtttttgagaacttggtgtcattcaagacactcactcacatttctgtgggagaaatgttcatggccaaactcaacagcgcttttcgaagatccgcgatcctcgtgacagataagcgcgttcaaacaatgaatgagtttctcacttgcatcaggctgattaaaatgtacgcctgggaaaagagctttacaaacaccatccaggatattcgcaggagagaaagaaagttgttagagaaggccggatttgttcagagtggcaattctgcactggctcctattgtgtccactatcgctatcgtgctgacactcagttgccacattctactgcggcgtaaactgaccgctccagtcgctttcagcgtcatcgcaatgtttaacgtcatgaaattttccatcgctattctccccttctcaatcaaggccatggctgaggccaatgtctctctccgcaggatgaagaagatactgatagataaaagcccaccttcgtacatcactcagccagaggatcctgacaccgttctgctgctggccaacgccacacttacatgggagcatgaagcaagtaggaaaagcaccccgaaaaagctgcagaaccagaagaggcacctctgtaaaaaacagcgttcagaagcatacagcgaaaggtcccccccagcaaaaggagctactgggcctgaggaacagagcgactcactgaagagcgtcctgcacagcatctcattcgtggtaaggaagggtaaaatactggggatttgcggaaatgtcggaagcggcaagagcagcctgctggccgctcttttgggccagatgcaactacaaaaaggagtcgtagcagttaacggtacactcgcttatgtctcacagcaggcctggatctttcacggcaacgttcgcgaaaatatcctctttggcgaaaagtacgatcaccagagataccagcacacagttcgagtgtgtgggttgcagaaggacctttccaacctgccctatggcgaccttacggaaatcggagaaaggggcctgaacttgtcaggtgggcaaagacagcgaatatcgctggctcgcgctgtctactcagatagacagctttatctgctggacgatccattaagcgcagtagatgctcacgttggcaaacacgtatttgaggaatgtatcaagaagaccctgcggggaaagacggtagtactggttacacaccagttacagtttctcgagtcatgcgacgaggtgatcttattggaagatggcgaaatctgcgaaaagggaacccacaaggagctaatggaggagcgaggcaggtacgctaagctgattcataacctcagggggctacagttcaaagatcccgaacacctgtacaatgctgccatggttgaagctttcaaagaatcaccggctgagcgcgaagaagacgctgggatcattgtgccagagcatcagctcattcagacggagtccccccaagaggggaccgtgacttggaaaacctaccacacctatatcaaagcgagtggcggatatctgctgtccctgtttacggtgttcctgttccttctgatgattgggtccgccgcattttctaactggtggttggggctctggctcgacaaggggtccaggatgacctgcggcccacaaggcaatcgaactatgtgtgaagtgggagctgtacttgccgatattggacaacatgtttaccaatgggtgtacacggcttcgatggtgttcatgttagtctttggagtgactaaaggcttcgtttttaccaaaaccacgttaatggcgtcctcttcactgcatgacaccgttttcgacaagatcctgaagtccccaatgagcttctttgataccaccccaacgggcagactgatgaatagattctctaaagacatggacgagttggatgtgcgcttaccattccacgccgaaaactttctgcagcagttcttcatggtggtttttatcctggtgattctggcagcggtcttccctgctgtgttactggtggtcgccagtctcgctgtggggttctttatacttctgaggatttttcaccgtggagtgcaggagcttaaaaaagtcgaaaatgtcagccgatctccctggtttacccacatcacttcaagcatgcagggccttggtattatacacgcctatggtaaaaaggagtcttgcatcacctag

SEQ ID NO: 227823 - DNA, 321 bp, Artificial Sequence
  derived and/or modified sequence
atggtgggggaggggccttacctcatcagcgacttagaccagaggggcagaagacgatcgtttgccgagagatatgatccgagcctgaagactatgatcccagtgaggccatgcgcacgcttggcccctaatcccgtggacgatgcagggttacttagctttgccaccttttcttggctgactcccgtcatggtcaaaggatataggcaaaggctcaccgtggataccttaccgccactctctacatatgactcttccgatacgaacgccaagaggttcagagtgctttgggatgaggaggtggcacgggtgggtccctag

SEQ ID NO: 227824 - DNA, 858 bp, Artificial Sequence
  derived and/or modified sequence
atggtgggggagggaccttacctcatttcagacctggatcagagaggaagaaggagaagttttgcagagcgctacgatccatcattgaaaaccatgattcccgttcgcccatgtgctcgtctggcccctaatcccgtcgacgatgctggtctgctgagtttcgccacatttagctggcttaccccagtgatggtcaaggggtaccgacagagactgaccgtggataccttaccacccctttcgacatatgattcctcagacacaaatgccaaaagatttcgggttctctgggatgaagaggtcgcccgagtcgggcctgagaaggcttcactttctcacgtggtctggaaattccagaggactagagtgttgatggatatcgtggccaacattctttgtatcattatggctgcgatcgggcctactgttttaatccaccagatcctacaacaaaccgaaagaacatcaggcaaggtttgggtgggaatcggcctctgcatagctttatttgcaaccgagttcacaaaggtcttcttctgggctttggcctgggctatcaactacagaaccgccatccgcctcaaggtagctctgtctaccttagtgttcgagaatctcgtctccttcaaaactctcacccatatctctgtgggtgaagtgttgaatatactgtcgtcagattcttattctctcttcgaggcagccctgttctgcccgctgccggctacgatccccatactgatggtcttctgtgccgcatacgccttcttcattcttggacctaccgctctgattgggatcagtgtgtgtttgtggccaagcagcatacagttaagtgaggggcagcagttttggtag

SEQ ID NO: 227825 - DNA, 5168 bp, Artificial Sequence
  derived and/or modified sequence
gccttggtcattggaccggctcccaaccaaaaccacaccatagggttttctgctcttggccaacccaacatgagaaaagaggaattaaatggtcctactaataagaaagcctcagcgtagcattaagggacgtagcaggtcttctggccacactcccctacaaatgtggaaagctcattggtgaaaacagttctcaggggtcaaagcaaaggaactgatctgggtaaagtagaggctgcctgatcccaatcagacatcctcacctctcaataacctttgccatttctctgccatagagtgaaagtgtccccaggccaaaagcccagggctccaggctgccatcaggatggtgggtgaaggaccctaccttatctcagatctggaccagcgaggccggcggagatcctttgcagaaagatatgaccccagcctgaagaccatgatcccagtgcgaccctgtgcaaggttagcacccaacccggtggatgatgccgggctactctccttcgccacattttcctggctcacgccggtgatggtgaaaggctaccggcaaaggctgaccgtagacaccctgcccccattgtcgacatatgactcatctgacaccaatgccaaaagatttcgagtcctttgggatgaagaggtagcaagggtgggtcctgagaaggcctctctgagccacgtggtgtggaaattccagaggacacgcgtgttgatggacatcgtggccaacatcctgtgcatcatcatggcagccatagggccggtgattctcattcaccaaatcctccagcagactgagaggacctctgggaaagtctgggttggcattggactgtgcatagccctttttgccaccgagtttaccaaagtcttcttttgggcccttgcctgggccatcaactaccgcacggccatccggttgaaggtggcgctctccaccttggtttttgaaaacctagtgtccttcaagacattgacccacatctctgttggcgaggtgctcaatatactgtcaagtgatagctattctttgtttgaagctgccttgttttgtcctttgccagccaccatcccgatcctaatggtcttttgtgcggcgtacgcctttttcattctggggcccacagctctcatcgggatatcagtgtatgtcatattcatacccgtccagatgtttatggccaagctcaattcagctttccgaaggtcagcaattttggtgacagacaagcgagttcagacaatgaatgagtttctgacctgcatcaggctgatcaaaatgtatgcctgggagaaatcttttaccaacactatccaagatataagaaggagggaaagaaaattactggaaaaagctggatttgtccaaagtggaaactctgccctggcccccatcgtgtccaccatagccatcgtgctgacattatcctgccacatcctcctgagacgcaaactcaccgcacccgtggcatttagtgtgattgccatgtttaatgtaatgaagttttccattgcaatcttgcccttctccatcaaagcaatggctgaagcgaatgtctctctaaggagaatgaagaaaattctcatagataaaagccccccatcttacatcacccaaccagaagacccagatactgtcttgcttttagcaaatgccaccttgacatgggagcatgaagccagcaggaaaagtaccccaaagaaattgcagaaccagaaaaggcatttatgcaagaaacagaggtcagaggcatacagtgagaggagtccaccagccaagggagccactggcccagaggagcaaagtgacagcctcaaatcggttctgcacagcataagctttgtggtgagaaaggggaagatcttgggaatatgtgggaatgtgggaagtggaaagagctccctccttgcagctctcctaggacagatgcagctgcagaaaggggtggtggcagtcaatggaactttggcctacgtttcacagcaggcatggatctttcatggaaatgtgagagaaaacatactctttggagaaaagtatgatcaccaaaggtatcagcacacagtccgcgtctgtggcctccagaaggacctgagcaacctcccctatggagacctgactgagattggggagcggggcctcaacctctctggggggcagaggcagaggattagcctggcccgcgctgtctactccgaccgtcagctctacctgctggacgaccccctgtcggccgtggacgcccacgtggggaagcacgtctttgaggagtgcattaagaagacgctcaggggaaagacagtcgtcctggtgacccaccagctacagttcttagagtcttgtgatgaagttattttattagaagatggagagatttgtgaaaagggaacccacaaggagttaatggaggagagagggcgctatgcaaaactgattcacaacctgcgaggattgcagttcaaggatcctgaacacctttacaatgcagcaatggtggaagccttcaaggagagccctgctgagagagaggaagatgctggtataatcgttttggctccaggaaatgagaaagatgaaggaaaagaatctgaaacaggctcagaatttgtagacacaaaagttcctgagcaccagctcatccagactgaatccccccaggaaggaaccgtgacctggaaaacatatcacacgtacattaaggcttctggagggtacctcctttctctcttcactgtgttcctcttcctcctgatgattggcagcgctgccttcagcaactggtggctgggtctctggttggacaagggctcacggatgacctgtgggccccagggcaacaggaccatgtgtgaggtcggcgcggtgctggcagacatcggtcagcatgtgtaccagtgggtgtacactgcaagcatggtgttcatgctggtgtttggcgtcaccaaaggcttcgtcttcaccaagaccacactgatggcatcctcctctctgcatgacacggtgtttgataagatcttaaagagcccaatgagtttctttgacacgactcccactggcaggctaatgaaccgtttttccaaggatatggacgagctggatgtgaggctgccgtttcacgcagagaactttctgcagcagttttttatggtggtgtttattctcgtgatcttggctgctgtgtttcctgctgtccttttagtcgtggccagccttgctgtaggcttcttcattctgttacgcattttccacagaggagtccaggagctcaagaaggtggagaatgtcagccggtcaccctggttcacccacatcacctcctccatgcagggcctgggcatcattcacgcctatggcaagaaggagagctgcatcacctatcacctcctctactttaactgtgctctcaggtggtttgcgctgagaatggatgtcctcatgaacatccttaccttcactgtggccttgttggtgaccctgagtttctcctccatcagtacttcatccaaaggcctgtcattgtcatacatcatccagctgagcggactgctccaagtgtgtgtgcgaacgggaacagagacgcaagccaaattcacctccgtggagctgctcagggaatacatttcgacctgtgttcctgaatgcactcatcccctcaaagtggggacctgtcccaaggactggcccagccgtggggagatcaccttcagagactatcagatgagatacagagacaacaccccccttgttctcgacagcctgaacttgaacatacaaagtgggcagacagtcgggattgttggaagaacaggttccggaaagtcatcgttaggaatggctttgtttcgtctggtggagccagccagtggcacaatctttattgatgaggtggatatctgcattctcagcttggaagacctcagaaccaagctgactgtgatcccacaggatcctgtcctgtttgtaggtacagtaaggtacaacttggatccctttgagagtcacaccgatgagatgctctggcaggttctggagagaacattcatgagagacacaataatgaaactcccagaaaaattacaggcagaagtcacagaaaatggagaaaacttctcagtaggggaacgtcagctgctttgtgtggcccgagctcttctccgtaattcaaagatcattctccttgatgaagccaccgcctctatggactccaagactgacaccctggttcagaacaccatcaaagatgccttcaagggctgcactgtgctgaccatcgcccaccgcctcaacacagttctcaactgcgatcacgtcctggttatggaaaatgggaaggtgattgagtttgacaagcctgaagtccttgcagagaagccagattctgcatttgcgatgttactagcagcagaagtcagattgtagaggtcctggcggctgattctagaggaggaagaggctctgtgagatgaataggaggagtcttcaggaggaggggctgtcctctccgcaggcagccctggtcttcagcccctcccatccacggagtgagctggggctgaagttgtccccactgccatactcagtccatgtcaccccacttggtgggcttggggttggttctgggtggtgaaccggggcagacccagctaatggattaaaaaactgcccttcacctcccaaatccccaagggttcctcatgtgttttcaccaaaaccaccccagtgcctgagattgaaaatattgtaactttcagttagaaatcagccacaataaacaacatgggaaaatgccttaggatggagtttgcaaggtttccttgcccattatcagaaggaaaaagagcagaattttcttctcgtttaaccccactcacttccatcttgactgggtgacaagtggtaatgacacagatttgtagcgtgaaagactgaatacagtgtttggccaaaaatttttttaaaaatcatattatatgtttcaattgatctgttagaataaccaagaaaacaaaatgctggagtttctctataaatgacacttttatatcttctttattcgtcgttaaaacgcggtaggaaattaccctgaaatgtcgccttgcaattatttcactgaagatattccaatttccatactatttcctccaatagacccttgttgcct

SEQ ID NO: 227826 - DNA, 4053 bp, Artificial Sequence
  derived and/or modified sequence
atcaggatggtgggtgaaggaccctaccttatctcagatctggaccagcgaggccggcggagatcctttgcagaaagatatgaccccagcctgaagaccatgatcccagtgcgaccctgtgcaaggttagcacccaacccggtggatgatgccgggctactctccttcgccacattttcctggctcacgccggtgatggtgaaaggctaccggcaaaggctgaccgtagacaccctgcccccattgtcgacatatgactcatctgacaccaatgccaaaagatttcgagtcctttgggatgaagaggtagcaagggtgggtcctgagaaggcctctctgagccacgtggtgtggaaattccagaggacacgcgtgttgatggacatcgtggccaacatcctgtgcatcatcatggcagccatagggccgacagttctcattcaccaaatcctccagcagactgagaggacctctgggaaagtctgggttggcattggactgtgcatagccctttttgccaccgagtttaccaaagtcttcttttgggcccttgcctgggccatcaactaccgcacggccatccggttgaaggtggcgctctccaccttggtttttgaaaacctagtgtccttcaagacattgacccacatctctgttggcgaggtgctcaatatactgtcaagtgatagctattctttgtttgaagctgccttgttttgtcctttgccagccaccatcccgatcctaatggtcttttgtgcggcgtacgcctttttcattctggggcccacagctctcatcgggatatcagtgtatgtcatattcatacccgtccagatgtttatggccaagctcaattcagctttccgaaggtcagcaattttggtgacagacaagcgagttcagacaatgaatgagtttctgacctgcatcaggctgatcaaaatgtatgcctgggagaaatcttttaccaacactatccaagatataagaaggagggaaagaaaattactggaaaaagctggatttgtccaaagtggaaactctgccctggcccccatcgtgtccaccatagccatcgtgctgacattatcctgccacatcctcctgagacgcaaactcaccgcacccgtggcatttagtgtgattgccatgtttaatgtaatgaagttttccattgcaatcttgcccttctccatcaaagcaatggctgaagcgaatgtctctctaaggagaatgaagaaaattctcatagataaaagccccccatcttacatcacccaaccagaagacccagatactgtcttgcttttagcaaatgccaccttgacatgggagcatgaagccagcaggaaaagtaccccaaagaaattgcagaaccagaaaaggcatttatgcaagaaacagaggtcagaggcatacagtgagaggagtccaccagccaagggagccactggcccagaggagcaaagtgacagcctcaaatcggttctgcacagcataagctttgtggtgagaaaggggaagatcttgggaatatgtgggaatgtgggaagtggaaagagctccctccttgcagctctcctaggacagatgcagctgcagaaaggggtggtggcagtcaatggaactttggcctacgtttcacagcaggcatggatctttcatggaaatgtgagagaaaacatactctttggagaaaagtatgatcaccaaagattggggagcggggcctcaacctctctggggggcagaggcagaggattagcctggcccgcgctgtctactccgaccgtcagctctacctgctggacgaccccctgtcggccgtggacgcccacgtggggaagcacgtctttgaggagtgcattaagaagacgctcaggggaaagacagtcgtcctggtgacccaccagctacagttcttagagtcttgtgatgaagttattttattagaagatggagagatttgtgaaaagggaacccacaaggagttaatggaggagagagggcgctatgcaaaactgattcacaacctgcgaggattgcagttcaaggatcctgaacacctttacaatgcagcaatggtggaagccttcaaggagagccctgctgagagagaggaagatgctgttttggctccaggaaatgagaaagatgaaggaaaagaatctgaaacaggctcagaatttgtagacacaaaagttcctgagcaccagctcatccagactgaatccccccaggaaggaaccgtgacctggaaaacatatcacacgtacattaaggcttctggagggtacctcctttctctcttcactgtgttcctcttcctcctgatgattggcagcgctgccttcagcaactggtggctgggtctctggttggacaagggctcacggatgacctgtgggccccagggcaacaggaccatgtgtgaggtcggcgcggtgctggcagacatcggtcagcatgtgtaccagtgggtgtacactgcaagcatggtgttcatgctggtgtttggcgtcaccaaaggcttcgtcttcaccaagaccacactgatggcatcctcctctctgcatgacacggtgtttgataagatcttaaagagcccaatgagtttctttgacacgactcccactggcaggctaatgaaccgtttttccaaggatatggacgagctggatgtgaggctgccgtttcacgcagagaactttctgcagcagttttttatggtggtgtttattctcgtgatcttggctgctgtgtttcctgctgtccttttagtcgtggccagccttgctgtaggcttcttcattctgttacgcattttccacagaggagtccaggagctcaagaaggtggagaatgtcagccggtcaccctggttcacccacatcacctcctccatgcagggcctgggcatcattcacgcctatggcaagaaggagagctgcatcacctagtttaagacgctaaacgacgaaaactccagtcacctcctctactttaactgtgctctcaggtggtttgcgctgagaatggatgtcctcatgaacatccttaccttcactgtggccttgttggtgaccctgagtttctcctccatcagtacttcatccaaaggcctgtcattgtcatacatcatccagctgagcggactgctccaagtgtgtgtgcgaacgggaacagagacgcaagccaaattcacctccgtggagctgctcagggaatacatttcgacctgtgttcctgaatgcactcatcccctcaaagtggggacctgtcccaaggactggcccagccgtggggagatcaccttcagagactatcagatgagatacagagacaacaccccccttgttctcgacagcctgaacttgaacatacaaagtgggcagacagtcgggattgttggaagaacaggttccggaaagtcatcgttaggaatggctttgtttcgtctggtggagccagccagtggcacaatctttattgatgaggtggatatctgcattctcagcttggaagacctcagaaccaagctgactgtgatcccacaggatcctgtcctgtttgtaggtacagtaaggtacaacttggatccctttgagagtcacaccgatgagatgctctggcaggttctggagagaacattcatgagagacacaataatgaaactcccagaaaaattacaggcagaagtcacagaaaatggagaaaacttctcagtaggggaacgtcagctgctttgtgtggcccgagctcttctccgtaattcaaagatcattctccttgatgaagccaccgcctctatggactccaagactgacaccctggttcagaacaccatcaaagatgccttcaagggctgcactgtgctgaccatcgcccaccgcctcaacacagttctcaactgcgatcacgtcctggttatggaaaatgggaaggtgattgagtttgacaagcctgaagtccttgcagagaagccagattctgcatttgcgatgttactagcagcagaagtcagattgtagaggtcctggcggctgattc

SEQ ID NO: 227827 - DNA, 3899 bp, Artificial Sequence
  derived and/or modified sequence
atcaggatggtgggtgaaggaccctaccttatctcagatctggaccagcgaggccggcggagatcctttgcagaaagatatgaccccagcctgaagaccatgatcccagtgcgaccctgtgcaaggttagcacccaacccggtggatgatgccgggctactctccttcgccacattttcctggctcacgccggtgatggtgaaaggctaccggcaaaggctgaccgtagacaccctgcccccattgtcgacatatgactcatctgacaccaatgccaaaagatttcgagtcctttgggatgaagaggtagcaagggtgggtcctgagaaggcctctctgagccacgtggtgtggaaattccagaggacacgcgtgttgatggacatcgtggccaacatcctgtgcatcatcatggcagccatagggccgacagttctcattcaccaaatcctccagcagactgagaggacctctgggaaagtctgggttggcattggactgtgcatagccctttttgccaccgagtttaccaaagtcttcttttgggcccttgcctgggccatcaactaccgcacggccatccggttgaaggtggcgctctccaccttggtttttgaaaacctagtgtccttcaagacattgacccacatctctgttggcgaggtgctcaatatactgtcaagtgatagctattctttgtttgaagctgccttgttttgtcctttgccagccaccatcccgatcctaatggtcttttgtgcggcgtacgcctttttcattctggggcccacagctctcatcgggatatcagtgtatgtcatattcatacccgtccagatgtttatggccaagctcaattcagctttccgaaggtcagcaattttggtgacagacaagcgagttcagacaatgaatgagtttctgacctgcatcaggctgatcaaaatgtatgcctgggagaaatcttttaccaacactatccaagatataagaaggagggaaagaaaattactggaaaaagctggatttgtccaaagtggaaactctgccctggcccccatcgtgtccaccatagccatcgtgctgacattatcctgccacatcctcctgagacgcaaactcaccgcacccgtggcatttagtgtgattgccatgtttaatgtaatgaagttttccattgcaatcttgcccttctccatcaaagcaatggctgaagcgaatgtctctctaaggagaatgaagaaaattctcatagataaaagccccccatcttacatcacccaaccagaagacccagatactgtcttgcttttagcaaatgccaccttgacatgggagcatgaagccagcaggaaaagtaccccaaagaaattgcagaaccagaaaaggcatttatgcaagaaacagaggtcagaggcatacagtgagaggagtccaccagccaagggagccactggcccagaggagcaaagtgacagcctcaaatcggttctgcacagcataagctttgtggtgagaaaggggaagatcttgggaatatgtgggaatgtgggaagtggaaagagctccctccttgcagctctcctaggacagatgcagctgcagaaaggggtggtggcagtcaatggaactttggcctacgtttcacagcaggcatggatctttcatggaaatgtgagagaaaacatactctttggagaaaagtatgatcaccaaaggtatcagcacacagtccgcgtctgtggcctccagaaggacctgagcaacctcccctatggagacctgactgagattggggagcggggcctcaacctctctggggggcagaggcagaggattagcctggcccgcgctgtctactccgaccgtcagctctacctgctggacgaccccctgtcggccgtggacgcccacgtggggaagcacgtctttgaggagtgcattaagaagacgctcaggggaaagacagtcgtcctggtgacccaccagctacagttcttagagtcttgtgatgaagttattttattagaagatggagagatttgtgaaaagggaacccacaaggagttaatggaggagagagggcgctatgcaaaactgattcacaacctgcgaggattgcagttcaaggatcctgaacacctttacaatgcagcaatggtggaagccttcaaggagagccctgctgagagagaggaagatgctgttttggctccaggaaatgagaaagatgaaggaaaagaatctgaaacaggctcagaatttgtagacacaaaagttcctgagcaccagctcatccagactgaatccccccaggaaggaaccgtgacctggaaaacatatcacacgtacattaaggcttctggagggtacctcctttctctcttcactgtgttcctcttcctcctgatgattggcagcgctgccttcagcaactggtggctgggtctctggttggacaagggctcacggatgacctgtgggccccagggcaacaggaccatgtgtgaggtcggcgcggtgctggcagacatcggtcagcatgtgtaccagtgggtgtacactgcaagcatggtgttcatgctggtgtttggcgtcaccaaaggcttcgtcttcaccaagaccacactgatggcatcctcctctctgcatgacacggtgtttgataagcattttccacagaggagtccaggagctcaagaaggtggagaatgtcagccggtcaccctggttcacccacatcacctcctccatgcagggcctgggcatcattcacgcctatggcaagaaggagagctgcatcacctagtttaagacgctaaacgacgaaaactccagtcacctcctctactttaactgtgctctcaggtggtttgcgctgagaatggatgtcctcatgaacatccttaccttcactgtggccttgttggtgaccctgagtttctcctccatcagtacttcatccaaaggcctgtcattgtcatacatcatccagctgagcggactgctccaagtgtgtgtgcgaacgggaacagagacgcaagccaaattcacctccgtggagctgctcagggaatacatttcgacctgtgttcctgaatgcactcatcccctcaaagtggggacctgtcccaaggactggcccagccgtggggagatcaccttcagagactatcagatgagatacagagacaacaccccccttgttctcgacagcctgaacttgaacatacaaagtgggcagacagtcgggattgttggaagaacaggttccggaaagtcatcgttaggaatggctttgtttcgtctggtggagccagccagtggcacaatctttattgatgaggtggatatctgcattctcagcttggaagacctcagaaccaagctgactgtgatcccacaggatcctgtcctgtttgtaggtacagtaaggtacaacttggatccctttgagagtcacaccgatgagatgctctggcaggttctggagagaacattcatgagagacacaataatgaaactcccagaaaaattacaggcagaagtcacagaaaatggagaaaacttctcagtaggggaacgtcagctgctttgtgtggcccgagctcttctccgtaattcaaagatcattctccttgatgaagccaccgcctctatggactccaagactgacaccctggttcagaacaccatcaaagatgccttcaagggctgcactgtgctgaccatcgcccaccgcctcaacacagttctcaactgcgatcacgtcctggttatggaaaatgggaaggtgattgagtttgacaagcctgaagtccttgcagagaagccagattctgcatttgcgatgttactagcagcagaagtcagattgtagaggtcctggcggctgattc

SEQ ID NO: 227828 - DNA, 3889 bp, Artificial Sequence
  derived and/or modified sequence
atcaggatggtgggtgaaggaccctaccttatctcagatctggaccagcgaggccggcggagatcctttgcagaaagatatgaccccagcctgaagaccatgatcccagtgcgaccctgtgcaaggttagcacccaacccggtggatgatgccgggctactctccttcgccacattttcctggctcacgccggtgatggtgaaaggctaccggcaaaggctgaccgtagacaccctgcccccattgtcgacatatgactcatctgacaccaatgccaaaagatttcgagtcctttgggatgaagaggtagcaagggtgggtcctgagaaggcctctctgagccacgtggtgtggaaattccagaggacacgcgtgttgatggacatcgtggccaacatcctgtgcatcatcatggcagccatagggccgacagttctcattcaccaaatcctccagcagactgagaggacctctgggaaagtctgggttggcattggactgtgcatagccctttttgccaccgagtttaccaaagtcttcttttgggcccttgcctgggccatcaactaccgcacggccatccggttgaaggtggcgctctccaccttggtttttgaaaacctagtgtccttcaagacattgacccacatctctgttggcgagatgtttatggccaagctcaattcagctttccgaaggtcagcaattttggtgacagacaagcgagttcagacaatgaatgagtttctgacctgcatcaggctgatcaaaatgtatgcctgggagaaatcttttaccaacactatccaagatataagaaggagggaaagaaaattactggaaaaagctggatttgtccaaagtggaaactctgccctggcccccatcgtgtccaccatagccatcgtgctgacattatcctgccacatcctcctgagacgcaaactcaccgcacccgtggcatttagtgtgattgccatgtttaatgtaatgaagttttccattgcaatcttgcccttctccatcaaagcaatggctgaagcgaatgtctctctaaggagaatgaagaaaattctcatagataaaagccccccatcttacatcacccaaccagaagacccagatactgtcttgcttttagcaaatgccaccttgacatgggagcatgaagccagcaggaaaagtaccccaaagaaattgcagaaccagaaaaggcatttatgcaagaaacagaggtcagaggcatacagtgagaggagtccaccagccaagggagccactggcccagaggagcaaagtgacagcctcaaatcggttctgcacagcataagctttgtggtgagaaaggggaagatcttgggaatatgtgggaatgtgggaagtggaaagagctccctccttgcagctctcctaggacagatgcagctgcagaaaggggtggtggcagtcaatggaactttggcctacgtttcacagcaggcatggatctttcatggaaatgtgagagaaaacatactctttggagaaaagtatgatcaccaaaggtatcagcacacagtccgcgtctgtggcctccagaaggacctgagcaacctcccctatggagacctgactgagattggggagcggggcctcaacctctctggggggcagaggcagaggattagcctggcccgcgctgtctactccgaccgtcagctctacctgctggacgaccccctgtcggccgtggacgcccacgtggggaagcacgtctttgaggagtgcattaagaagacgctcaggggaaagacagtcgtcctggtgacccaccagctacagttcttagagtcttgtgatgaagttattttattagaagatggagagatttgtgaaaagggaacccacaaggagttaatggaggagagagggcgctatgcaaaactgattcacaacctgcgaggattgcagttcaaggatcctgaacacctttacaatgcagcaatggtggaagccttcaaggagagccctgctgagagagaggaagatgctggtataatcgttcctgagcaccagctcatccagactgaatccccccaggaaggaaccgtgacctggaaaacatatcacacgtacattaaggcttctggagggtacctcctttctctcttcactgtgttcctcttcctcctgatgattggcagcgctgccttcagcaactggtggctgggtctctggttggacaagggctcacggatgacctgtgggccccagggcaacaggaccatgtgtgaggtcggcgcggtgctggcagacatcggtcagcatgtgtaccagtgggtgtacactgcaagcatggtgttcatgctggtgtttggcgtcaccaaaggcttcgtcttcaccaagaccacactgatggcatcctcctctctgcatgacacggtgtttgataagatcttaaagagcccaatgagtttctttgacacgactcccactggcaggctaatgaaccgtttttccaaggatatggacgagctggatgtgaggctgccgtttcacgcagagaactttctgcagcagttttttatggtggtgtttattctcgtgatcttggctgctgtgtttcctgctgtccttttagtcgtggccagccttgctgtaggcttcttcattctgttacgcattttccacagaggagtccaggagctcaagaaggtggagaatgtcagccggtcaccctggttcacccacatcacctcctccatgcagggcctgggcatcattcacgcctatggcaagaaggagagctgcatcacctagtttaagacgctaaacgacgaaaactccagtcacctcctctactttaactgtgctctcaggtggtttgcgctgagaatggatgtcctcatgaacatccttaccttcactgtggccttgttggtgaccctgagtttctcctccatcagtacttcatccaaaggcctgtcattgtcatacatcatccagctgagcggactgctccaagtgtgtgtgcgaacgggaacagagacgcaagccaaattcacctccgtggagctgctcagggaatacatttcgacctgtgttcctgaatgcactcatcccctcaaagtggggacctgtcccaaggactggcccagccgtggggagatcaccttcagagactatcagatgagatacagagacaacaccccccttgttctcgacagcctgaacttgaacatacaaagtgggcagacagtcgggattgttggaagaacaggttccggaaagtcatcgttaggaatggctttgtttcgtctggtggagccagccagtggcacaatctttattgatgaggtggatatctgcattctcagcttggaagacctcagaaccaagctgactgtgatcccacaggatcctgtcctgtttgtaggtacagtaaggtacaacttggatccctttgagagtcacaccgatgagatgctctggcaggttctggagagaacattcatgagagacacaataatgaaactcccagaaaaattacaggcagaagtcacagaaaatggagaaaacttctcagtaggggaacgtcagctgctttgtgtggcccgagctcttctccgtaattcaaagatcattctccttgatgaagccaccgcctctatggactccaagactgacaccctggttcagaacaccatcaaagatgccttcaagggctgcactgtgctgaccatcgcccaccgcctcaacacagttctcaactgcgatcacgtcctggttatggaaaatgggaaggtgattgagtttgacaagcctgaagtccttgcagagaagccagattctgcatttgcgatgttactagcagcagaagtcagattgtagaggtcctggcggctgattc

SEQ ID NO: 227829 - DNA, 544 bp, Artificial Sequence
  derived and/or modified sequence
agttggagaggaggacttcaggcgggtgggacaagagaaactgaatctgaggtccttggggagaagcaggccctggagtcctgggcagcagatgccaggctctgagccccatgactgctgaccctcctcccctccctctcatcctcagcccaggtaaagcttcatttccagcccagagtgaaagtgtccccaggccaaaagcccagggctccaggctgccatcaggatggtgggtgaaggaccctaccttatctcagatctggaccagcgaggccggcggagatcctttgcagaaagatatgaccccagcctgaagaccatgatcccagtgcgaccctgtgcaaggttagcacccaacccggtggatgatgccgggctactctccttcgccacattttcctggctcacgccggtgatggtgaaaggctaccggcaaaggctgaccgtagacaccctgcccccattgtcgacatatgactcatctgacaccaatgccaaaagatttcgagtcctttgggatgaagaggtagcaagggtgggtcct

SEQ ID NO: 227830 - DNA, 1224 bp, Artificial Sequence
  derived and/or modified sequence
agttggagaggaggacttcaggcgggtgggacaagagaaactgaatctgaggtccttggggagaagcaggccctggagtcctgggcagcagatgccaggctctgagccccatgactgctgaccctcctcccctccctctcatcctcagcccagagtgaaagtgtccccaggccaaaagcccagggctccaggctgccatcaggatggtgggtgaaggaccctaccttatctcagatctggaccagcgaggccggcggagatcctttgcagaaagatatgaccccagcctgaagaccatgatcccagtgcgaccctgtgcaaggttagcacccaacccggtggatgatgccgggctactctccttcgccacattttcctggctcacgccggtgatggtgaaaggctaccggcaaaggctgaccgtagacaccctgcccccattgtcgacatatgactcatctgacaccaatgccaaaagatttcgagtcctttgggatgaagaggtagcaagggtgggtcctgagaaggcctctctgagccacgtggtgtggaaattccagaggacacgcgtgttgatggacatcgtggccaacatcctgtgcatcatcatggcagccatagggccgacagttctcattcaccaaatcctccagcagactgagaggacctctgggaaagtctgggttggcattggactgtgcatagccctttttgccaccgagtttaccaaagtcttcttttgggcccttgcctgggccatcaactaccgcacggccatccggttgaaggtggcgctctccaccttggtttttgaaaacctagtgtccttcaagacattgacccacatctctgttggcgaggtgctcaatatactgtcaagtgatagctattctttgtttgaagctgccttgttttgtcctttgccagccaccatcccgatcctaatggtcttttgtgcggcgtacgcctttttcattctggggcccacagctctcatcgggatatcagtatgtttatggccaagctcaattcagctttccgaaggtcagcaattttggtgacagacaagcgagttcagacaatgaatgagtttctgacctgcatcaggctgatcaaaatgtatgcctgggagaaatcttttaccaacactatccaagatataagaaggagggaaagaaaattactggaaaaagctggatttgtccaaagtggaaactctgccct

SEQ ID NO: 227831 - DNA, 4080 bp, Artificial Sequence
  derived and/or modified sequence
atggtgggcgagggcccctacctgatcagcgacctggaccagagaggcagaagaagaagcttcgccgagagatacgaccccagcctgaagaccatgatccccgtgagaccctgcgccagactggcccccaaccccgtggacgacgccggcctgctgagcttcgccaccttcagctggctgacccccgtgatggtgaagggctacagacagagactgaccgtggacaccctgccccccctgagcacctacgacagcagcgacaccaacgccaagagattcagagtgctgtgggacgaggaggtggccagagtgggccccgagaaggccagcctgagccacgtggtgtggaagttccagagaaccagagtgctgatggacatcgtggccaacatcctgtgcatcatcatggccgccatcggccccgtgatcctgatccaccagatcctgcagcagaccgagagaaccagcggcaaggtgtgggtgggcatcggcctgtgcatcgccctgttcgccaccgagttcaccaaggtgttcttctgggccctggcctgggccatcaactacagaaccgccatcagactgaaggtggccctgagcaccctggtgttcgagaacctggtgagcttcaagaccctgacccacatcagcgtgggcgaggtgctgaacatcctgagcagcgacagctacagcctgttcgaggccgccctgttctgccccctgcccgccaccatccccatcctgatggtgttctgcgccgcctacgccttcttcatcctgggccccaccgccctgatcggcatcagcgtgtacgtgatcttcatccccgtgcagatgttcatggccaagctgaacagcgccttcagaagaagcgccatcctggtgaccgacaagagagtgcagaccatgaacgagttcctgacctgcatcagactgatcaagatgtacgcctgggagaagagcttcaccaacaccatccaggacatcagaagaagagagagaaagctgctggagaaggccggcttcgtgcagagcggcaacagcgccctggcccccatcgtgagcaccatcgccatcgtgctgaccctgagctgccacatcctgctgagaagaaagctgaccgcccccgtggccttcagcgtgatcgccatgttcaacgtgatgaagttcagcatcgccatcctgcccttcagcatcaaggccatggccgaggccaacgtgagcctgagaagaatgaagaagatcctgatcgacaagagcccccccagctacatcacccagcccgaggaccccgacaccgtgctgctgctggccaacgccaccctgacctgggagcacgaggccagcagaaagagcacccccaagaagctgcagaaccagaagagacacctgtgcaagaagcagagaagcgaggcctacagcgagagaagcccccccgccaagggcgccaccggccccgaggagcagagcgacagcctgaagagcgtgctgcacagcatcagcttcgtggtgagaaagggcaagatcctgggcatctgcggcaacgtgggcagcggcaagagcagcctgctggccgccctgctgggccagatgcagctgcagaagggcgtggtggccgtgaacggcaccctggcctacgtgagccagcaggcctggatcttccacggcaacgtgagagagaacatcctgttcggcgagaagtacgaccaccagagataccagcacaccgtgagagtgtgcggcctgcagaaggacctgagcaacctgccctacggcgacctgaccgagatcggcgagagaggcctgaacctgagcggcggccagagacagagaatcagcctggccagagccgtgtacagcgacagacagctgtacctgctggacgaccccctgagcgccgtggacgcccacgtgggcaagcacgtgttcgaggagtgcatcaagaagaccctgagaggcaagaccgtggtgctggtgacccaccagctgcagttcctggagagctgcgacgaggtgatcctgctggaggacggcgagatctgcgagaagggcacccacaaggagctgatggaggagagaggcagatacgccaagctgatccacaacctgagaggcctgcagttcaaggaccccgagcacctgtacaacgccgccatggtggaggccttcaaggagagccccgccgagagagaggaggacgccggcatcatcgtgctggcccccggcaacgagaaggacgagggcaaggagagcgagaccggcagcgagttcgtggacaccaaggtgcccgagcaccagctgatccagaccgagagcccccaggagggcaccgtgacctggaagacctaccacacctacatcaaggccagcggcggctacctgctgagcctgttcaccgtgttcctgttcctgctgatgatcggcagcgccgccttcagcaactggtggctgggcctgtggctggacaagggcagcagaatgacctgcggcccccagggcaacagaaccatgtgcgaggtgggcgccgtgctggccgacatcggccagcacgtgtaccagtgggtgtacaccgccagcatggtgttcatgctggtgttcggcgtgaccaagggcttcgtgttcaccaagaccaccctgatggccagcagcagcctgcacgacaccgtgttcgacaagatcctgaagagccccatgagcttcttcgacaccacccccaccggcagactgatgaacagattcagcaaggacatggacgagctggacgtgagactgcccttccacgccgagaacttcctgcagcagttcttcatggtggtgttcatcctggtgatcctggccgccgtgttccccgccgtgctgctggtggtggccagcctggccgtgggcttcttcatcctgctgagaatcttccacagaggcgtgcaggagctgaagaaggtggagaacgtgagcagaagcccctggttcacccacatcaccagcagcatgcagggcctgggcatcatccacgcctacggcaagaaggagagctgcatcacctaccacctgctgtacttcaactgcgccctgagatggttcgccctgagaatggacgtgctgatgaacatcctgaccttcaccgtggccctgctggtgaccctgagcttcagcagcatcagcaccagcagcaagggcctgagcctgagctacatcatccagctgagcggcctgctgcaggtgtgcgtgagaaccggcaccgagacccaggccaagttcaccagcgtggagctgctgagagagtacatcagcacctgcgtgcccgagtgcacccaccccctgaaggtgggcacctgccccaaggactggcccagcagaggcgagatcaccttcagagactaccagatgagatacagagacaacacccccctggtgctggacagcctgaacctgaacatccagagcggccagaccgtgggcatcgtgggcagaaccggcagcggcaagagcagcctgggcatggccctgttcagactggtggagcccgccagcggcaccatcttcatcgacgaggtggacatctgcatcctgagcctggaggacctgagaaccaagctgaccgtgatcccccaggaccccgtgctgttcgtgggcaccgtgagatacaacctggaccccttcgagagccacaccgacgagatgctgtggcaggtgctggagagaaccttcatgagagacaccatcatgaagctgcccgagaagctgcaggccgaggtgaccgagaacggcgagaacttcagcgtgggcgagagacagctgctgtgcgtggccagagccctgctgagaaacagcaagatcatcctgctggacgaggccaccgccagcatggacagcaagaccgacaccctggtgcagaacaccatcaaggacgccttcaagggctgcaccgtgctgaccatcgcccacagactgaacaccgtgctgaactgcgaccacgtgctggtgatggagaacggcaaggtgatcgagttcgacaagcccgaggtgctggccgagaagcccgacagcgccttcgccatgctgctggccgccgaggtgagactgtag

SEQ ID NO: 227832 - DNA, 1902 bp, Artificial Sequence
  derived and/or modified sequence
atggtgggcgagggcccctacctgatcagcgacctggaccagagaggcagaagaagaagcttcgccgagagatacgaccccagcctgaagaccatgatccccgtgagaccctgcgccagactggcccccaaccccgtggacgacgccggcctgctgagcttcgccaccttcagctggctgacccccgtgatggtgaagggctacagacagagactgaccgtggacaccctgccccccctgagcacctacgacagcagcgacaccaacgccaagagattcagagtgctgtgggacgaggaggtggccagagtgggccccgagaaggccagcctgagccacgtggtgtggaagttccagagaaccagagtgctgatggacatcgtggccaacatcctgtgcatcatcatggccgccatcggccccaccgtgctgatccaccagatcctgcagcagaccgagagaaccagcggcaaggtgtgggtgggcatcggcctgtgcatcgccctgttcgccaccgagttcaccaaggtgttcttctgggccctggcctgggccatcaactacagaaccgccatcagactgaaggtggccctgagcaccctggtgttcgagaacctggtgagcttcaagaccctgacccacatcagcgtgggcgaggtgctgaacatcctgagcagcgacagctacagcctgttcgaggccgccctgttctgccccctgcccgccaccatccccatcctgatggtgttctgcgccgcctacgccttcttcatcctgggccccaccgccctgatcggcatcagcgtgtacgtgatcttcatccccgtgcagatgttcatggccaagctgaacagcgccttcagaagaagcgccatcctggtgaccgacaagagagtgcagaccatgaacgagttcctgacctgcatcagactgatcaagatgtacgcctgggagaagagcttcaccaacaccatccaggacatcagaagaagagagagaaagctgctggagaaggccggcttcgtgcagagcggcaacagcgccctggcccccatcgtgagcaccatcgccatcgtgctgaccctgagctgccacatcctgctgagaagaaagctgaccgcccccgtggccttcagcgtgatcgccatgttcaacgtgatgaagttcagcatcgccatcctgcccttcagcatcaaggccatggccgaggccaacgtgagcctgagaagaatgaagaagatcctgatcgacaagagcccccccagctacatcacccagcccgaggaccccgacaccgtgctgctgctggccaacgccaccctgacctgggagcacgaggccagcagaaagagcacccccaagaagctgcagaaccagaagagacacctgtgcaagaagcagagaagcgaggcctacagcgagagaagcccccccgccaagggcgccaccggccccgaggagcagagcgacagcctgaagagcgtgctgcacagcatcagcttcgtggtgagaaagggcaagatcctgggcatctgcggcaacgtgggcagcggcaagagcagcctgctggccgccctgctgggccagatgcagctgcagaagggcgtggtggccgtgaacggcaccctggcctacgtgagccagcaggcctggatcttccacggcaacgtgagagagaacatcctgttcggcgagaagtacgaccaccagagactgggcagcggcgccagcaccagcctgggcggcagaggcagaggcctggcctggcccgccctgagcacccccaccgtgagcagcacctgctggaccaccccctgcagaccctggacccccacctggggcagcaccagcctgagaagcgccctgagaagaagaagcggcgagagacagagcagctggtag

SEQ ID NO: 227833 - DNA, 2808 bp, Artificial Sequence
  derived and/or modified sequence
atggtgggcgagggcccctacctgatcagcgacctggaccagagaggcagaagaagaagcttcgccgagagatacgaccccagcctgaagaccatgatccccgtgagaccctgcgccagactggcccccaaccccgtggacgacgccggcctgctgagcttcgccaccttcagctggctgacccccgtgatggtgaagggctacagacagagactgaccgtggacaccctgccccccctgagcacctacgacagcagcgacaccaacgccaagagattcagagtgctgtgggacgaggaggtggccagagtgggccccgagaaggccagcctgagccacgtggtgtggaagttccagagaaccagagtgctgatggacatcgtggccaacatcctgtgcatcatcatggccgccatcggccccaccgtgctgatccaccagatcctgcagcagaccgagagaaccagcggcaaggtgtgggtgggcatcggcctgtgcatcgccctgttcgccaccgagttcaccaaggtgttcttctgggccctggcctgggccatcaactacagaaccgccatcagactgaaggtggccctgagcaccctggtgttcgagaacctggtgagcttcaagaccctgacccacatcagcgtgggcgaggtgctgaacatcctgagcagcgacagctacagcctgttcgaggccgccctgttctgccccctgcccgccaccatccccatcctgatggtgttctgcgccgcctacgccttcttcatcctgggccccaccgccctgatcggcatcagcgtgtacgtgatcttcatccccgtgcagatgttcatggccaagctgaacagcgccttcagaagaagcgccatcctggtgaccgacaagagagtgcagaccatgaacgagttcctgacctgcatcagactgatcaagatgtacgcctgggagaagagcttcaccaacaccatccaggacatcagaagaagagagagaaagctgctggagaaggccggcttcgtgcagagcggcaacagcgccctggcccccatcgtgagcaccatcgccatcgtgctgaccctgagctgccacatcctgctgagaagaaagctgaccgcccccgtggccttcagcgtgatcgccatgttcaacgtgatgaagttcagcatcgccatcctgcccttcagcatcaaggccatggccgaggccaacgtgagcctgagaagaatgaagaagatcctgatcgacaagagcccccccagctacatcacccagcccgaggaccccgacaccgtgctgctgctggccaacgccaccctgacctgggagcacgaggccagcagaaagagcacccccaagaagctgcagaaccagaagagacacctgtgcaagaagcagagaagcgaggcctacagcgagagaagcccccccgccaagggcgccaccggccccgaggagcagagcgacagcctgaagagcgtgctgcacagcatcagcttcgtggtgagaaagggcaagatcctgggcatctgcggcaacgtgggcagcggcaagagcagcctgctggccgccctgctgggccagatgcagctgcagaagggcgtggtggccgtgaacggcaccctggcctacgtgagccagcaggcctggatcttccacggcaacgtgagagagaacatcctgttcggcgagaagtacgaccaccagagataccagcacaccgtgagagtgtgcggcctgcagaaggacctgagcaacctgccctacggcgacctgaccgagatcggcgagagaggcctgaacctgagcggcggccagagacagagaatcagcctggccagagccgtgtacagcgacagacagctgtacctgctggacgaccccctgagcgccgtggacgcccacgtgggcaagcacgtgttcgaggagtgcatcaagaagaccctgagaggcaagaccgtggtgctggtgacccaccagctgcagttcctggagagctgcgacgaggtgatcctgctggaggacggcgagatctgcgagaagggcacccacaaggagctgatggaggagagaggcagatacgccaagctgatccacaacctgagaggcctgcagttcaaggaccccgagcacctgtacaacgccgccatggtggaggccttcaaggagagccccgccgagagagaggaggacgccgtgctggcccccggcaacgagaaggacgagggcaaggagagcgagaccggcagcgagttcgtggacaccaaggtgcccgagcaccagctgatccagaccgagagcccccaggagggcaccgtgacctggaagacctaccacacctacatcaaggccagcggcggctacctgctgagcctgttcaccgtgttcctgttcctgctgatgatcggcagcgccgccttcagcaactggtggctgggcctgtggctggacaagggcagcagaatgacctgcggcccccagggcaacagaaccatgtgcgaggtgggcgccgtgctggccgacatcggccagcacgtgtaccagtgggtgtacaccgccagcatggtgttcatgctggtgttcggcgtgaccaagggcttcgtgttcaccaagaccaccctgatggccagcagcagcctgcacgacaccgtgttcgacaagcacttcccccagagaagccccggcgcccaggagggcggcgagtgccagcccgtgaccctggtgcacccccaccacctgctgcacgccggccccggccaccacagcagactgtggcaggagggcgagctgcaccacctggtgtag

SEQ ID NO: 227834 - DNA, 2793 bp, Artificial Sequence
  derived and/or modified sequence
atggtgggcgagggcccctacctgatcagcgacctggaccagagaggcagaagaagaagcttcgccgagagatacgaccccagcctgaagaccatgatccccgtgagaccctgcgccagactggcccccaaccccgtggacgacgccggcctgctgagcttcgccaccttcagctggctgacccccgtgatggtgaagggctacagacagagactgaccgtggacaccctgccccccctgagcacctacgacagcagcgacaccaacgccaagagattcagagtgctgtgggacgaggaggtggccagagtgggccccgagaaggccagcctgagccacgtggtgtggaagttccagagaaccagagtgctgatggacatcgtggccaacatcctgtgcatcatcatggccgccatcggccccaccgtgctgatccaccagatcctgcagcagaccgagagaaccagcggcaaggtgtgggtgggcatcggcctgtgcatcgccctgttcgccaccgagttcaccaaggtgttcttctgggccctggcctgggccatcaactacagaaccgccatcagactgaaggtggccctgagcaccctggtgttcgagaacctggtgagcttcaagaccctgacccacatcagcgtgggcgagatgttcatggccaagctgaacagcgccttcagaagaagcgccatcctggtgaccgacaagagagtgcagaccatgaacgagttcctgacctgcatcagactgatcaagatgtacgcctgggagaagagcttcaccaacaccatccaggacatcagaagaagagagagaaagctgctggagaaggccggcttcgtgcagagcggcaacagcgccctggcccccatcgtgagcaccatcgccatcgtgctgaccctgagctgccacatcctgctgagaagaaagctgaccgcccccgtggccttcagcgtgatcgccatgttcaacgtgatgaagttcagcatcgccatcctgcccttcagcatcaaggccatggccgaggccaacgtgagcctgagaagaatgaagaagatcctgatcgacaagagcccccccagctacatcacccagcccgaggaccccgacaccgtgctgctgctggccaacgccaccctgacctgggagcacgaggccagcagaaagagcacccccaagaagctgcagaaccagaagagacacctgtgcaagaagcagagaagcgaggcctacagcgagagaagcccccccgccaagggcgccaccggccccgaggagcagagcgacagcctgaagagcgtgctgcacagcatcagcttcgtggtgagaaagggcaagatcctgggcatctgcggcaacgtgggcagcggcaagagcagcctgctggccgccctgctgggccagatgcagctgcagaagggcgtggtggccgtgaacggcaccctggcctacgtgagccagcaggcctggatcttccacggcaacgtgagagagaacatcctgttcggcgagaagtacgaccaccagagataccagcacaccgtgagagtgtgcggcctgcagaaggacctgagcaacctgccctacggcgacctgaccgagatcggcgagagaggcctgaacctgagcggcggccagagacagagaatcagcctggccagagccgtgtacagcgacagacagctgtacctgctggacgaccccctgagcgccgtggacgcccacgtgggcaagcacgtgttcgaggagtgcatcaagaagaccctgagaggcaagaccgtggtgctggtgacccaccagctgcagttcctggagagctgcgacgaggtgatcctgctggaggacggcgagatctgcgagaagggcacccacaaggagctgatggaggagagaggcagatacgccaagctgatccacaacctgagaggcctgcagttcaaggaccccgagcacctgtacaacgccgccatggtggaggccttcaaggagagccccgccgagagagaggaggacgccggcatcatcgtgcccgagcaccagctgatccagaccgagagcccccaggagggcaccgtgacctggaagacctaccacacctacatcaaggccagcggcggctacctgctgagcctgttcaccgtgttcctgttcctgctgatgatcggcagcgccgccttcagcaactggtggctgggcctgtggctggacaagggcagcagaatgacctgcggcccccagggcaacagaaccatgtgcgaggtgggcgccgtgctggccgacatcggccagcacgtgtaccagtgggtgtacaccgccagcatggtgttcatgctggtgttcggcgtgaccaagggcttcgtgttcaccaagaccaccctgatggccagcagcagcctgcacgacaccgtgttcgacaagatcctgaagagccccatgagcttcttcgacaccacccccaccggcagactgatgaacagattcagcaaggacatggacgagctggacgtgagactgcccttccacgccgagaacttcctgcagcagttcttcatggtggtgttcatcctggtgatcctggccgccgtgttccccgccgtgctgctggtggtggccagcctggccgtgggcttcttcatcctgctgagaatcttccacagaggcgtgcaggagctgaagaaggtggagaacgtgagcagaagcccctggttcacccacatcaccagcagcatgcagggcctgggcatcatccacgcctacggcaagaaggagagctgcatcacctag

SEQ ID NO: 227835 - DNA, 321 bp, Artificial Sequence
  derived and/or modified sequence
atggtgggcgagggcccctacctgatcagcgacctggaccagagaggcagaagaagaagcttcgccgagagatacgaccccagcctgaagaccatgatccccgtgagaccctgcgccagactggcccccaaccccgtggacgacgccggcctgctgagcttcgccaccttcagctggctgacccccgtgatggtgaagggctacagacagagactgaccgtggacaccctgccccccctgagcacctacgacagcagcgacaccaacgccaagagattcagagtgctgtgggacgaggaggtggccagagtgggcccctag

SEQ ID NO: 227836 - DNA, 858 bp, Artificial Sequence
  derived and/or modified sequence
atggtgggcgagggcccctacctgatcagcgacctggaccagagaggcagaagaagaagcttcgccgagagatacgaccccagcctgaagaccatgatccccgtgagaccctgcgccagactggcccccaaccccgtggacgacgccggcctgctgagcttcgccaccttcagctggctgacccccgtgatggtgaagggctacagacagagactgaccgtggacaccctgccccccctgagcacctacgacagcagcgacaccaacgccaagagattcagagtgctgtgggacgaggaggtggccagagtgggccccgagaaggccagcctgagccacgtggtgtggaagttccagagaaccagagtgctgatggacatcgtggccaacatcctgtgcatcatcatggccgccatcggccccaccgtgctgatccaccagatcctgcagcagaccgagagaaccagcggcaaggtgtgggtgggcatcggcctgtgcatcgccctgttcgccaccgagttcaccaaggtgttcttctgggccctggcctgggccatcaactacagaaccgccatcagactgaaggtggccctgagcaccctggtgttcgagaacctggtgagcttcaagaccctgacccacatcagcgtgggcgaggtgctgaacatcctgagcagcgacagctacagcctgttcgaggccgccctgttctgccccctgcccgccaccatccccatcctgatggtgttctgcgccgcctacgccttcttcatcctgggccccaccgccctgatcggcatcagcgtgtgcctgtggcccagcagcatccagctgagcgagggccagcagttctggtag

SEQ ID NO: 227837 - protein, 569 aa, Artificial Sequence
  derived and/or modified sequence
MATLVVNKLGAGVDSGRQGSRGTAVVKVLECGVCEDVFSLQGDKVPRLLLCGHTVCHDCLTRLPLHGRAIRCPFDRQVTDLGDSGVWGLKKNFALLELLERLQNGPIGQYGAAEESIGISGESIIRCDEDEAHLASVYCTVCATHLCSECSQVTHSTKTLAKHRRVPLADKPHEKTMCSQHQVHAIEFVCLEEGCQTSPLMCCVCKEYGKHQGHKHSVLEPEANQIRASILDMAHCIRTFTEEISDYSRKLVGIVQHIEGGEQIVEDGIGMAHTEHVPGTAENARSCIRAYFYDLHETLCRQEEMALSVVDAHVREKLIWLRQQQEDMTILLSEVSAACLHCEKTLQQDDCRVVLAKQEITRLLETLQKQQQQFTEVADHIQLDASIPVTFTKDNRVHIGPKMEIRVVTLGLDGAGKTTILFKLKQDEFMQPIPTIGFNVETVEYKNLKFTIWDVGGKHKLRPLWKHYYLNTQAVVFVVDSSHRDRISEAHSELAKLLTEKELRDALLLIFANKQDVAGALSVEEITELLSLHKLCCGRSWYIQGCDARSVFQIICDQYTGKEVVTEKG

SEQ ID NO: 227838 - DNA, 1710 bp, Artificial Sequence
  derived and/or modified sequence
atggccaccctggtggtgaacaagctgggcgccggcgtggacagcggcagacagggcagcagaggcaccgccgtggtgaaggtgctggagtgcggcgtgtgcgaggacgtgttcagcctgcagggcgacaaggtgcccagactgctgctgtgcggccacaccgtgtgccacgactgcctgaccagactgcccctgcacggcagagccatcagatgccccttcgacagacaggtgaccgacctgggcgacagcggcgtgtggggcctgaagaagaacttcgccctgctggagctgctggagagactgcagaacggccccatcggccagtacggcgccgccgaggagagcatcggcatcagcggcgagagcatcatcagatgcgacgaggacgaggcccacctggccagcgtgtactgcaccgtgtgcgccacccacctgtgcagcgagtgcagccaggtgacccacagcaccaagaccctggccaagcacagaagagtgcccctggccgacaagccccacgagaagaccatgtgcagccagcaccaggtgcacgccatcgagttcgtgtgcctggaggagggctgccagaccagccccctgatgtgctgcgtgtgcaaggagtacggcaagcaccagggccacaagcacagcgtgctggagcccgaggccaaccagatcagagccagcatcctggacatggcccactgcatcagaaccttcaccgaggagatcagcgactacagcagaaagctggtgggcatcgtgcagcacatcgagggcggcgagcagatcgtggaggacggcatcggcatggcccacaccgagcacgtgcccggcaccgccgagaacgccagaagctgcatcagagcctacttctacgacctgcacgagaccctgtgcagacaggaggagatggccctgagcgtggtggacgcccacgtgagagagaagctgatctggctgagacagcagcaggaggacatgaccatcctgctgagcgaggtgagcgccgcctgcctgcactgcgagaagaccctgcagcaggacgactgcagagtggtgctggccaagcaggagatcaccagactgctggagaccctgcagaagcagcagcagcagttcaccgaggtggccgaccacatccagctggacgccagcatccccgtgaccttcaccaaggacaacagagtgcacatcggccccaagatggagatcagagtggtgaccctgggcctggacggcgccggcaagaccaccatcctgttcaagctgaagcaggacgagttcatgcagcccatccccaccatcggcttcaacgtggagaccgtggagtacaagaacctgaagttcaccatctgggacgtgggcggcaagcacaagctgagacccctgtggaagcactactacctgaacacccaggccgtggtgttcgtggtggacagcagccacagagacagaatcagcgaggcccacagcgagctggccaagctgctgaccgagaaggagctgagagacgccctgctgctgatcttcgccaacaagcaggacgtggccggcgccctgagcgtggaggagatcaccgagctgctgagcctgcacaagctgtgctgcggcagaagctggtacatccagggctgcgacgccagaagcgtgttccagatcatctgcgaccagtacaccggcaaggaggtggtgaccgagaagggctag

SEQ ID NO: 227839 - DNA, 1710 bp, Artificial Sequence
  derived and/or modified sequence
atggcaacactcgtggtcaacaagctgggagccggggtagactctggccggcagggaagcagggggacagccgtcgtgaaagtgctcgaatgcggcgtctgcgaagacgtgttcagcctgcaaggagacaaggttccgcgtcttttactttgcggacatactgtgtgtcacgattgtcttactcgcctcccccttcatgggcgggccataaggtgtccgttcgaccgtcaggtgaccgacctgggcgatagtggagtgtggggcttgaagaaaaattttgccttgttagaactgttggagcgacttcagaacggtccaattggccaatacggcgccgccgaagagtcaatcggtatcagcggggaaagtattattaggtgtgatgaggacgaagcgcatctggcatccgtgtactgtaccgtgtgtgcaacccacttgtgcagcgagtgcagccaggttactcattcaactaagacactggccaagcacaggagagtgcccctggcggataagcctcacgaaaaaaccatgtgctctcagcaccaagtgcacgcaatcgagtttgtgtgcctggaggagggctgccagactagcccccttatgtgttgcgtgtgcaaggaatacgggaagcaccaaggccataaacacagcgtactggaaccagaggccaaccagattagggccagcatcctcgacatggcacactgtattcgtacgtttacggaggaaatcagcgactatagtaggaagctggtgggaatcgtgcagcatattgagggcggtgagcagattgtagaagatggaatcggaatggctcacacagagcacgttcctggcaccgccgagaacgctagatcctgcattagggcctatttttacgacctgcacgagactctgtgccgtcaagaagaaatggccctgtccgtggtggacgcccacgtgcgagagaagctgatctggcttagacagcaacaggaagacatgacaatattactgtctgaggtcagcgctgcctgcctgcactgcgaaaagaccctgcagcaggacgactgtagggtggttttagcaaaacaggaaattacccggctccttgagacactacagaaacagcagcagcagttcacagaagtcgctgaccatatccagctcgacgcttccatccccgtgacgtttacgaaggacaacagggtgcacattggtcccaaaatggagataagggttgtgacactcggcctggacggcgcgggaaagacaacaattctgtttaagctgaagcaggacgaatttatgcagcctatccccaccatcggtttcaatgtcgagactgtggagtacaaaaacctcaaatttactatttgggacgtggggggcaagcataaattaagaccactttggaagcactactacttgaatacacaggcagttgtgtttgtcgtcgattctagccatagagataggatctccgaggcacatagcgagttggctaagctcctgactgaaaaagagctgagggatgcactgctattgatcttcgctaacaaacaagacgtggccggggctcttagcgtggaggagattaccgagcttctgagcttgcacaagctctgctgcggaaggagctggtacatacaagggtgtgatgcccggagtgtgttccagataatctgtgaccagtacaccggaaaggaagtggtgacagaaaaagggtag

SEQ ID NO: 227840 - DNA, 1710 bp, Artificial Sequence
  derived and/or modified sequence
atggccaccctggtggtgaacaagctgggcgccggcgtggacagcggccggcagggcagccggggcacagctgtggtgaaggtgctggagtgtggggtgtgtgaagatgtgttcagcctgcagggcgacaaggtgccccggctgctgctgtgtggccacacagtgtgccacgactgcctgacccggctgcccctgcacggccgggccatccgctgcccctttgaccggcaggtgacagacctgggggacagcggcgtgtggggcctgaagaagaactttgccctgctggagctgctggagcggctgcagaatggccccatcggccagtacggggctgctgaggagagcatcggcatcagcggggagagcatcatccgctgtgatgaagatgaggcccacctggcctctgtgtactgcaccgtgtgtgccacccacctgtgcagtgaatgttcccaggtgacccacagcaccaagaccctggccaagcaccggcgggtgcccctggccgacaagccccatgagaagaccatgtgcagccagcaccaggtgcacgccatcgagtttgtgtgcctggaggagggctgccagaccagccccctgatgtgctgcgtgtgcaaggagtatggcaagcaccagggccacaagcacagcgtgctggagcctgaggccaaccagatccgggccagcatcctggacatggcccactgcatccgcaccttcacagaggagatcagtgactacagcaggaagctggtgggcatcgtgcagcacatcgagggcggggagcagatcgtggaggatggcatcggcatggcccacacagagcacgtgcccggcacagcagaaaatgcccggagctgcatccgggcctacttctatgacctgcacgagaccctgtgccggcaggaggagatggccctgtctgtggtggatgcccacgtgcgggagaagctgatctggctgcggcagcagcaggaggacatgaccatcctgctgtctgaggtgtctgctgcctgcctgcactgtgagaagaccctgcagcaggatgactgccgggtggtgctggccaagcaggagatcacccggctgctggagaccctgcagaagcagcagcagcagttcacagaggtggccgaccacatccagctggatgccagcatccctgtgaccttcaccaaggacaacagagtgcacatcggccccaagatggagatccgggtggtgaccctgggcctggatggagctgggaagaccaccatcctcttcaagctgaagcaggatgagttcatgcagcccatccccaccatcggcttcaacgtggagaccgtggagtacaagaacctgaagttcaccatctgggatgtgggcggcaagcacaagctgcggcccctgtggaagcactactacctgaacacccaggccgtggtgtttgtggtggacagcagccaccgggaccgcatcagcgaggcccacagcgagctggccaagctgctgacagagaaggagctgagagatgccctgctgctgatctttgccaacaagcaggatgtggccggggccctgtctgtggaggagatcacagagctgctgagcctgcacaagctgtgctgcggccgctcctggtacatccagggctgtgatgcccggagcgtcttccagatcatctgtgaccagtacaccgggaaggaggtggtgacagagaagggctag

SEQ ID NO: 227841 - DNA, 1855 bp, Artificial Sequence
  derived and/or modified sequence
ctgtggcgcttcccctgcgaggatggctaccctggttgtaaacaagctcggagcgggagtagacagtggccggcagggcagccgggggacagctgtagtgaaggtgctagagtgtggagtttgtgaagatgtcttttctttgcaaggagacaaagttccccgtcttttgctttgtggccataccgtctgtcatgactgtctcactcgcctacctcttcatggaagagcaatccgttgcccatttgatcgacaagtaacagacctaggtgattcaggtgtctggggattgaaaaaaaattttgctttattggagcttttggaacgactgcagaatgggcctattggtcagtatggagctgcagaagaatccattgggatatctggagagagcatcattcgttgtgatgaagatgaagctcaccttgcctctgtatattgcactgtgtgtgcaactcatttgtgctctgagtgttctcaagttactcattctacaaagacattagcaaagcacaggcgagttcctctagctgataaacctcatgagaaaactatgtgctctcagcaccaggtgcatgccattgagtttgtttgcttggaagaaggttgtcaaactagcccactcatgtgctgtgtctgcaaagaatatggaaaacaccagggtcacaagcattcagtattggaaccagaagctaatcagatccgagcatcaattttagatatggctcactgcatacggaccttcacagaggaaatctcagattattccagaaaattagttggaattgtgcagcacattgaaggaggagaacaaatcgtggaagatggaattggaatggctcacacagaacatgtaccagggactgcagagaatgcccggtcatgtattcgagcttatttttatgatctacatgaaactctgtgtcgtcaagaagaaatggctctaagtgttgttgatgctcatgttcgtgaaaaattgatttggctcaggcagcaacaagaagatatgactattttgttgtcagaggtttctgcagcctgcctccactgtgaaaagactttgcagcaggatgattgtagagttgtcttggcaaaacaggaaattacaaggttactggaaacattgcagaaacagcagcagcagtttacagaagttgcagatcacattcagttggatgccagcatccctgtcacttttacaaaggataatcgagttcacattggaccaaaaatggaaattcgggtcgttacgttaggattggatggtgctggaaaaactactatcttgtttaagttaaaacaggatgaattcatgcagcccattccaacaattggttttaacgtggaaactgtagaatataaaaatctaaaattcactatttgggatgtaggtggaaaacacaaattaagaccattgtggaaacattattacctcaatactcaagctgttgtgtttgttgtagatagcagtcatagagacagaattagtgaagcacacagcgaacttgcaaagttgttaacggaaaaagaactccgagatgctctgctcctgatttttgctaacaaacaggatgttgctggagcactgtcagtagaagaaatcactgaactactcagtctccataaattatgctgtggccgtagctggtatattcagggctgtgatgctcgaagtgtttttcagataatatgtgaccaatatactgggaaagaggtagtcacagagaaagggtaaaaggtcatgctgttacaggtgtagtttgtgtgcataaataatacttccgaattaaattatttaatatttgactgatttcaataactgtgaaaaataaaaaaggtgttgtattgcttgtgagaa

SEQ ID NO: 227842 - DNA, 1710 bp, Artificial Sequence
  derived and/or modified sequence
atggccaccctggtggtgaacaagctgggcgccggcgtggacagcgggcgccagggctcaagaggcacagctgtcgtgaaagtacttgagtgcggggtgtgtgaagacgtcttttcactccaaggcgataaagtgcccaggttactactctgtggccatacggtctgccatgattgcctcacgcggctgcccctgcacggtcgcgcaatcaggtgtccatttgatagacaggtcaccgacctgggcgattcgggggtatggggcctaaagaagaattttgcactgttagagctactggaaaggctgcaaaacgggcccatcggccagtatggtgccgcggaagagtccatcgggatatccggcgaaagcatcatccggtgtgacgaagacgaagctcacttggcctccgtgtactgtactgtctgtgccacgcacctatgtagcgagtgttcccaggtgacgcactctacaaaaactctcgccaagcataggagggtacctctggccgacaaaccccacgagaaaactatgtgctcccagcaccaggtgcacgctatagagtttgtttgtctggaggaggggtgtcagacatcacccttaatgtgttgtgtctgtaaagagtatgggaagcatcagggccacaagcacagtgtcctcgagcctgaggccaaccagatccgcgcttcaatcttagatatggcacattgcatacggactttcacagaagagatatctgattactctagaaaattagtgggaatcgtgcagcacatcgaaggcggagaacagatagtcgaagacggcataggcatggcccacaccgaacacgttcctggcactgccgaaaacgctaggtcttgtatccgtgcatatttctacgatctgcatgaaactctttgcagacaagaggagatggccctgtcagtggtagacgcgcacgtgagagaaaagctgatctggcttcggcagcaacaggaggacatgaccattttgttgtcggaggtgtccgccgcatgcctgcactgtgagaagactctgcagcaggacgactgtcgtgtggtcctggcaaagcaggaaataactcgtctgttagaaacattgcagaagcagcagcaacagtttaccgaggtggcagaccatatccagttggacgcctctatccccgtcaccttcactaaggacaacagagtgcatataggcccaaaaatggagatcagggttgtgacattaggactcgacggagccggcaagacaaccatcttgttcaaattgaagcaagacgaatttatgcagcctatacccacgatcggcttcaacgtcgaaacagtagaatacaagaacctgaagttcaccatctgggatgtgggcgggaagcacaaactaaggccgctgtggaagcattactaccttaatacacaggcagttgtgtttgtggtggattccagccaccgggataggatctcagaggctcattcagagttggctaagctgctcacagaaaaggagctcagggacgcgctcctgctcattttcgcaaataaacaagacgtagccggcgcattatcggtggaggagattacagagctgctgagcctacataaactttgttgtggaagaagctggtacatccagggctgcgacgccaggtcggtgttccaaattatttgtgatcagtacaccggcaaggaagtggtcacagagaaaggatag

SEQ ID NO: 227843 - DNA, 1710 bp, Artificial Sequence
  derived and/or modified sequence
atggccaccctagtcgttaacaagctcggcgcaggcgtggatagcggaaggcaaggctctcgagggaccgctgtggtgaaagttctggaatgcggggtatgcgaagacgttttcagcctccaaggcgacaaagttcctcgcctgttactctgtggtcacaccgtgtgccacgactgcctgacccgcctccctctgcacgggagagctatccggtgccctttcgatcgccaggtgactgatcttggcgatagcggggtgtggggcctgaaaaaaaacttcgctctgctggaactgctggaacggctccagaatggtcctatcgggcaatacggcgcagcagaggagagcatcggaatctctggcgagtccatcattcgatgcgacgaggacgaggcccacctcgctagcgtgtactgtaccgtgtgcgccacccacctctgctccgagtgtagccaagttactcactcaaccaagactctggcaaagcaccggagggtaccacttgccgacaagcctcacgagaaaaccatgtgcagccagcaccaggtgcacgcaatagaatttgtgtgcctggaggagggttgccagaccagtccactaatgtgttgcgtttgcaaagagtacggcaagcaccagggccacaagcacagcgtactggagcctgaggcaaaccaaatccgtgcctctatcctggacatggcccattgtattcgcacttttaccgaggagatttcagattattcccggaaactggtaggcatcgtgcagcatatagaaggaggggaacaaattgtcgaggacgggattgggatggctcacactgagcacgtgcccggaacggccgaaaatgctagatcatgcattcgcgcatatttttacgacctgcacgagaccctttgtagacaggaagaaatggcactctcggtagtggacgcccacgtgagggaaaaactcatctggctgcggcaacagcaggaggatatgactattttgctgtccgaagtgtctgctgcatgccttcattgcgagaagactctccagcaagatgattgcagggtggttctagccaaacaggagattacgcgcttgctggaaacccttcagaagcagcagcaacaattcacagaggttgccgaccacatccagctggacgcctctattcctgtgacgtttaccaaagacaatcgcgtccacatcgggcctaaaatggagatccgggtggtcacactgggccttgatggggctggcaaaacaactattctatttaagcttaagcaggacgagttcatgcagcccatcccaacaataggttttaatgtcgagactgtcgaatacaaaaatcttaagttcactatctgggatgttggaggaaaacataagctgcggcctttatggaaacactactatcttaatacgcaggcggttgtcttcgtggtcgactccagtcatcgcgacaggatttcggaggcccactctgaattggcaaaactcctcactgaaaaggagctcagagatgcactgttgctgattttcgctaataagcaggacgtggctggcgcactttccgtcgaggagatcacggaacttctcagtttgcacaagctctgttgcggtagaagctggtatattcaggggtgcgacgcacgaagcgtttttcagatcatttgtgatcagtatacaggtaaagaagtggtgaccgagaagggctag

SEQ ID NO: 227844 - protein, 546 aa, Artificial Sequence
  derived and/or modified sequence
MATLVVNKLGAGVDSGRQGSRGTAVVKVLECGVCEDVFSLQGDKVPRLLLCGHTVCHDCLTRLPLHGRAIRCPFDRQVTDLGDSGVWGLKKNFALLELLERLQNGPIGQYGAAEESIGISGESIIRCDEDEAHLASVYCTVCATHLCSECSQVTHSTKTLAKHRRVPLADKPHEKTMCSQHQVHAIEFVCLEEGCQTSPLMCCVCKEYGKHQGHKHSVLEPEANQIRASILDMAHCIRTFTEEISDYSRKLVGIVQHIEGGEQIVEDGIGMAHTEHVPGTAENARSCIRAYFYDLHETLCRQEEMALSVVDAHVREKLIWLRQQQEDMTILLSEVSAACLHCEKTLQQDDCRVVLAKQEITRLLETLQKQQQQFTEVADHIQLDASIPVTFTKDNRVHIGPKMEIRVVTLGLDGAGKTTILFKLKQDEFMQPIPTIGFNVETVEYKNLKFTIWDVGGKHKLRPLWKHYYLNTQAVVFVVDSSHRDRISEAHSELAKLLTEKELRDALLLIFANKQDVAGALSVEEITELLSLHKLCCGRSCFSDNM

SEQ ID NO: 227845 - protein, 35 aa, Artificial Sequence
  derived and/or modified sequence
MATLVVNKLGAGVDSGRQGSRGTAVVKVLECGVCE

SEQ ID NO: 227846 - DNA, 1641 bp, Artificial Sequence
  derived and/or modified sequence
atggccactctggtggtgaacaaactgggtgctggcgtggactccggcagacagggctcccgtggcactgccgtggtgaaggtgttagagtgcggagtctgcgaggacgtcttctctctgcaaggcgacaaggtgcctagattgctgctttgtggccacaccgtgtgccatgattgcctcactcgacttccactccacggcagggccatcaggtgtccttttgaccggcaagtgactgaccttggggattccggcgtgtgggggctgaagaagaatttcgccttgctggaattactcgaacgcctccagaacggtcctatcggccaatacggagctgctgaagaatctattggcataagcggagagtcaatcattcggtgtgatgaagatgaggcgcaccttgcttcagtatactgcacagtctgcgctacccatctgtgctctgagtgttctcaggtgacacattcaacaaaaacactagctaagcataggcgtgttccattagcggataaacctcacgaaaaaactatgtgcagccagcaccaggtgcacgctattgagtttgtgtgtctggaggagggttgccagacttctcccctgatgtgctgcgtttgcaaagagtatggcaagcaccaggggcacaaacactctgtgctggaacccgaggcgaaccagatccgggccagtatcctggatatggcccactgcatacgaacattcactgaagagattagcgactactccaggaaattggtgggaatcgtgcagcacatcgaggggggagaacagatcgtcgaggatggcattgggatggcgcacacagagcacgtgcctggcaccgcggagaatgccagatcatgcatcagagcttatttttatgacctccacgagacactttgccggcaggaggaaatggctttgtctgttgtggatgcacatgtgcgggagaaactcatatggctgaggcagcagcaagaggatatgaccattctgctgtctgaggtgtcggccgcttgcctgcattgtgaaaagaccttgcagcaggatgattgccgtgtggtcctggccaaacaggaaatcaccagactgctggaaaccttgcagaagcagcagcagcagtttactgaggtggcggatcacatccaacttgacgcttccatccctgttacattcaccaaggataatcgcgtgcacatcggccctaagatggaaatcagggttgtcaccttaggtctggacggtgcaggtaagacgacaattctctttaagctaaagcaggatgagttcatgcagcctattcccaccataggcttcaatgtggagaccgtggaatacaaaaacttgaagtttaccatttgggatgtcggtggcaagcataaactgcgtccactctggaaacactactaccttaacacccaggcagtggtgttcgtcgtggacagctctcatcgtgaccgcatctctgaggcgcactcggaactggccaagctgcttaccgaaaaagaactgcgcgatgctcttctcctcatctttgccaataaacaagacgttgcaggcgcgctaagcgtagaagagataacagagttgctgtccttgcacaaattatgctgcggaagaagctgcttcagcgacaacatgtag

SEQ ID NO: 227847 - DNA, 1641 bp, Artificial Sequence
  derived and/or modified sequence
atggccaccctggtggtgaacaagctgggcgccggcgtggacagcggccggcagggcagccggggcacagctgtggtgaaggtgctggagtgtggggtgtgtgaagatgtgttcagcctgcagggcgacaaggtgccccggctgctgctgtgtggccacacagtgtgccacgactgcctgacccggctgcccctgcacggccgggccatccgctgcccctttgaccggcaggtgacagacctgggggacagcggcgtgtggggcctgaagaagaactttgccctgctggagctgctggagcggctgcagaatggccccatcggccagtacggggctgctgaggagagcatcggcatcagcggggagagcatcatccgctgtgatgaagatgaggcccacctggcctctgtgtactgcaccgtgtgtgccacccacctgtgcagtgaatgttcccaggtgacccacagcaccaagaccctggccaagcaccggcgggtgcccctggccgacaagccccatgagaagaccatgtgcagccagcaccaggtgcacgccatcgagtttgtgtgcctggaggagggctgccagaccagccccctgatgtgctgcgtgtgcaaggagtatggcaagcaccagggccacaagcacagcgtgctggagcctgaggccaaccagatccgggccagcatcctggacatggcccactgcatccgcaccttcacagaggagatcagtgactacagcaggaagctggtgggcatcgtgcagcacatcgagggcggggagcagatcgtggaggatggcatcggcatggcccacacagagcacgtgcccggcacagcagaaaatgcccggagctgcatccgggcctacttctatgacctgcacgagaccctgtgccggcaggaggagatggccctgtctgtggtggatgcccacgtgcgggagaagctgatctggctgcggcagcagcaggaggacatgaccatcctgctgtctgaggtgtctgctgcctgcctgcactgtgagaagaccctgcagcaggatgactgccgggtggtgctggccaagcaggagatcacccggctgctggagaccctgcagaagcagcagcagcagttcacagaggtggccgaccacatccagctggatgccagcatccctgtgaccttcaccaaggacaacagagtgcacatcggccccaagatggagatccgggtggtgaccctgggcctggatggagctgggaagaccaccatcctcttcaagctgaagcaggatgagttcatgcagcccatccccaccatcggcttcaacgtggagaccgtggagtacaagaacctgaagttcaccatctgggatgtgggcggcaagcacaagctgcggcccctgtggaagcactactacctgaacacccaggccgtggtgtttgtggtggacagcagccaccgggaccgcatcagcgaggcccacagcgagctggccaagctgctgacagagaaggagctgagagatgccctgctgctgatctttgccaacaagcaggatgtggccggggccctgtctgtggaggagatcacagagctgctgagcctgcacaagctgtgctgcggccgcagctgcttcagtgacaacatgtag

SEQ ID NO: 227848 - DNA, 1641 bp, Artificial Sequence
  derived and/or modified sequence
atggccaccctggtggtgaacaagctgggcgccggcgtggacagcggccgccagggaagtaggggcacagcagtggtaaaggtgctggaatgcggggtgtgtgaagatgtgttttcgctgcagggcgacaaagtgccgcggttactcctatgtggccacacagtgtgccacgattgtctcacgagactcccactgcacgggagagcaatccggtgcccctttgatcggcaggtcactgatttgggggatagcggagtttgggggctcaaaaaaaactttgccctcctcgagcttcttgagcgcttgcagaacggcccaataggccagtatggggcggccgaggagtccatcggaatctcaggagagtccattatccgatgtgacgaggatgaggcccatcttgccagcgtttactgtactgtgtgcgctacacacctgtgtagtgaatgtagtcaagtcacccatagtaccaaaactctggccaagcacaggagggttcctcttgccgataagcctcacgaaaaaactatgtgcagccagcatcaggtacatgccatagagttcgtctgccttgaggaaggctgtcagacttcgcccctcatgtgttgtgtgtgtaaagagtacggcaagcaccagggccacaaacacagtgttttggaacccgaagcaaaccaaattagggctagcatcctggatatggcacattgtatcagaacattcacagaggagatctcagactatagtcgcaagcttgtgggaatcgtccagcacattgagggtggtgagcagattgtcgaagatgggatcggcatggcacacactgagcacgttccgggtacagctgaaaatgccagatcttgcataagagcttacttttatgacctgcatgaaaccctatgcaggcaggaggagatggcactatccgttgtggatgctcacgtccgggagaagttgatctggctccggcagcagcaggaggacatgacaatcctgttatctgaagtgtccgccgcttgtctgcattgtgagaagactctgcagcaggacgactgtcgcgtggtgctagccaaacaagaaataacaaggctgctagaaacactgcagaaacagcagcagcagttcaccgaagtcgccgatcatatacagctggatgcttcgatcccagtcactttcacgaaagataacagggtccacattggcccaaaaatggagatacgtgtcgtgacactcggactggatggtgcaggcaaaaccaccattctgtttaaactgaaacaggatgaatttatgcagccaattccaacaattgggttcaatgtggaaactgtcgaatacaagaatttaaagttcacaatctgggatgtcgggggtaagcataagctgcggccactgtggaaacactactatctgaatacacaggcagttgtgttcgtggtcgactcttctcaccgtgaccgcatctcagaggcccattctgagctggcaaagctccttacagaaaaagagttaagagatgctctgcttttaattttcgccaataagcaagacgtggctggagccctgagcgtggaagaaattacagagctgttgagcctgcacaagctctgttgtgggagaagttgcttttccgacaatatgtag

SEQ ID NO: 227849 - DNA, 1641 bp, Artificial Sequence
  derived and/or modified sequence
atggccaccttggtggtgaataaactgggagccggtgtagattcaggtcgccagggtagtcggggtacagcggtggtaaaagtgctggagtgcggcgtctgtgaggatgtattttccctgcagggcgataaggttcctcggctgctactctgcggccacaccgtatgccatgattgcctcacacgactcccattgcatggcagagccatccgatgtccgtttgataggcaagttactgatttgggcgatagcggcgtgtggggcctcaaaaagaacttcgcgctcctggagctgttagagaggttgcaaaatggtcccattggacaatatggagccgctgaagaatcgatcggcatttcgggcgaaagtatcatccggtgtgacgaggatgaggctcacctggcctcagtgtactgcaccgtgtgcgccacccatctctgttctgaatgcagccaggttacacactcaaccaagaccctggcaaagcaccgcagggtgcctctggcggacaagccccacgagaaaacaatgtgttcccagcaccaagtccatgcgatcgagtttgtctgtttggaggaggggtgtcagacatctcctctgatgtgctgtgtgtgcaaagagtacggtaagcaccaagggcataagcacagcgtgttggagcctgaggcaaaccagattagagcctcaattctcgacatggcccactgcattcgaacttttaccgaggaaatttcagattactctaggaagctcgtggggatcgtgcaacatattgagggaggggaacagatcgttgaggacggcattggcatggctcatacggagcatgtcccaggcaccgccgagaatgcacggagttgcatacgtgcctatttttatgatttacatgagacactctgccggcaggaggagatggcactgtccgtggttgacgcccacgtccgcgaaaagttgatctggctgcggcagcaacaggaggatatgaccatcctgctgtcggaggtgagcgccgcatgcctccactgcgagaagaccctacaacaggacgactgtcgagtcgtgctggcaaagcaggagatcactaggctgctggaaacgcttcagaagcaacagcagcagtttactgaagtcgcagatcacattcagctggatgccagtatcccagtaacgtttaccaaggacaatcgagtgcatatcggtccaaagatggaaatccgggtggtcacactgggcttagatggcgcaggaaagactaccattctgttcaagcttaagcaggatgaattcatgcaacctattccgacaatcggatttaacgtggagaccgtggagtataagaacctgaagttcaccatctgggacgtgggaggcaagcataagcttcggccactctggaagcactactacctgaacacacaggcggttgtgttcgtggtggatagtagccatagggacaggatctcagaggcacactccgagctagccaagctgttgaccgaaaaggagttgcgagacgctcttttgctaatttttgctaacaagcaggacgtggccggtgcgctcagtgtggaagaaataaccgaactgctgagcttgcataagttatgctgtggacgatcatgtttctctgataatatgtag

SEQ ID NO: 227850 - DNA, 574 bp, Artificial Sequence
  derived and/or modified sequence
gatgactacatcataatgggaaggataaggcgttcctcaaaatggatgccataagtaaagggaagctgaagcctgattaacttcgtcagtgccacaggaagaaacaagagacagaaggaaaaagcactttggatgcccgctgtaattcacagagatctccacggtaggagcgggacgtcagcttctgcggctaaaatctcgtgactgaagcagcacagatcagaaagaacgatttaccagcagctgcagactacataatgaaaaataacaaaagtgcccatgcgcgaggctgtgcaactaaccacccgacgattgcggggaggaggagtaagagtcggctaagcggcgcccagtgtcctactgcgcctgtgcgccggtggcgtgcgcagaggcctctgggtaggtggctcaaccccgcctctcagttgaggactctgaaggctgtttctgtggcgcttcccctgcgaggatggctaccctggttgtaaacaagctcggagcgggagtagacagtggccggcagggcagccgggggacagctgtagtgaaggtgctagagtgtggagtttgtgaa

SEQ ID NO: 227851 - DNA, 1829 bp, Artificial Sequence
  derived and/or modified sequence
tttctgtggcgcttcccctgcgaggatggctaccctggttgtaaacaagctcggagcgggagtagacagtggccggcagggcagccgggggacagctgtagtgaaggtgctagagtgtggagtttgtgaagatgtcttttctttgcaaggagacaaagttccccgtcttttgctttgtggccataccgtctgtcatgactgtctcactcgcctacctcttcatggaagagcaatccgttgcccatttgatcgacaagtaacagacctaggtgattcaggtgtctggggattgaaaaaaaattttgctttattggagcttttggaacgactgcagaatgggcctattggtcagtatggagctgcagaagaatccattgggatatctggagagagcatcattcgttgtgatgaagatgaagctcaccttgcctctgtatattgcactgtgtgtgcaactcatttgtgctctgagtgttctcaagttactcattctacaaagacattagcaaagcacaggcgagttcctctagctgataaacctcatgagaaaactatgtgctctcagcaccaggtgcatgccattgagtttgtttgcttggaagaaggttgtcaaactagcccactcatgtgctgtgtctgcaaagaatatggaaaacaccagggtcacaagcattcagtattggaaccagaagctaatcagatccgagcatcaattttagatatggctcactgcatacggaccttcacagaggaaatctcagattattccagaaaattagttggaattgtgcagcacattgaaggaggagaacaaatcgtggaagatggaattggaatggctcacacagaacatgtaccagggactgcagagaatgcccggtcatgtattcgagcttatttttatgatctacatgaaactctgtgtcgtcaagaagaaatggctctaagtgttgttgatgctcatgttcgtgaaaaattgatttggctcaggcagcaacaagaagatatgactattttgttgtcagaggtttctgcagcctgcctccactgtgaaaagactttgcagcaggatgattgtagagttgtcttggcaaaacaggaaattacaaggttactggaaacattgcagaaacagcagcagcagtttacagaagttgcagatcacattcagttggatgccagcatccctgtcacttttacaaaggataatcgagttcacattggaccaaaaatggaaattcgggtcgttacgttaggattggatggtgctggaaaaactactatcttgtttaagttaaaacaggatgaattcatgcagcccattccaacaattggttttaacgtggaaactgtagaatataaaaatctaaaattcactatttgggatgtaggtggaaaacacaaattaagaccattgtggaaacattattacctcaatactcaagctgttgtgtttgttgtagatagcagtcatagagacagaattagtgaagcacacagcgaacttgcaaagttgttaacggaaaaagaactccgagatgctctgctcctgatttttgctaacaaacaggatgttgctggagcactgtcagtagaagaaatcactgaactactcagtctccataaattatgctgtggccgtagctgtttttcagataatatgtgaccaatatactgggaaagaggtagtcacagagaaagggtaaaaggtcatgctgttacaggtgtagtttgtgtgcataaataatacttccgaattaaattatttaatatttgactgatttcaataactgtgaaaaataaaaaaggtgttgtattgcttgtgagaa

SEQ ID NO: 227852 - DNA, 1641 bp, Artificial Sequence
  derived and/or modified sequence
atggccaccctggtggtgaacaagctgggcgccggcgtggacagcggcagacagggcagcagaggcaccgccgtggtgaaggtgctggagtgcggcgtgtgcgaggacgtgttcagcctgcagggcgacaaggtgcccagactgctgctgtgcggccacaccgtgtgccacgactgcctgaccagactgcccctgcacggcagagccatcagatgccccttcgacagacaggtgaccgacctgggcgacagcggcgtgtggggcctgaagaagaacttcgccctgctggagctgctggagagactgcagaacggccccatcggccagtacggcgccgccgaggagagcatcggcatcagcggcgagagcatcatcagatgcgacgaggacgaggcccacctggccagcgtgtactgcaccgtgtgcgccacccacctgtgcagcgagtgcagccaggtgacccacagcaccaagaccctggccaagcacagaagagtgcccctggccgacaagccccacgagaagaccatgtgcagccagcaccaggtgcacgccatcgagttcgtgtgcctggaggagggctgccagaccagccccctgatgtgctgcgtgtgcaaggagtacggcaagcaccagggccacaagcacagcgtgctggagcccgaggccaaccagatcagagccagcatcctggacatggcccactgcatcagaaccttcaccgaggagatcagcgactacagcagaaagctggtgggcatcgtgcagcacatcgagggcggcgagcagatcgtggaggacggcatcggcatggcccacaccgagcacgtgcccggcaccgccgagaacgccagaagctgcatcagagcctacttctacgacctgcacgagaccctgtgcagacaggaggagatggccctgagcgtggtggacgcccacgtgagagagaagctgatctggctgagacagcagcaggaggacatgaccatcctgctgagcgaggtgagcgccgcctgcctgcactgcgagaagaccctgcagcaggacgactgcagagtggtgctggccaagcaggagatcaccagactgctggagaccctgcagaagcagcagcagcagttcaccgaggtggccgaccacatccagctggacgccagcatccccgtgaccttcaccaaggacaacagagtgcacatcggccccaagatggagatcagagtggtgaccctgggcctggacggcgccggcaagaccaccatcctgttcaagctgaagcaggacgagttcatgcagcccatccccaccatcggcttcaacgtggagaccgtggagtacaagaacctgaagttcaccatctgggacgtgggcggcaagcacaagctgagacccctgtggaagcactactacctgaacacccaggccgtggtgttcgtggtggacagcagccacagagacagaatcagcgaggcccacagcgagctggccaagctgctgaccgagaaggagctgagagacgccctgctgctgatcttcgccaacaagcaggacgtggccggcgccctgagcgtggaggagatcaccgagctgctgagcctgcacaagctgtgctgcggcagaagctgcttcagcgacaacatgtag

SEQ ID NO: 227853 - protein, 465 aa, Artificial Sequence [sequence omitted]

SEQ ID NO: 227854 - protein, 115 aa, Artificial Sequence
  derived and/or modified sequence
MPATPSLKVVHELPACTLCAGPLEDAVTIPCGHTFCRLCLPALSQMGAQSSGKILLCPLCQEEEQAETPMAPVPLGPLGETYCEEHGEKIYFFCENDAEFLCVSECRTTDGFGCA

SEQ ID NO: 227855 - protein, 396 aa, Artificial Sequence
  derived and/or modified sequence
MAPVPLGPLGETYCEEHGEKIYFFCENDAEFLCVFCREGPTHQAHTVGFLDEAIQPYRDRLRSRLEALSTERDEIEDVKCQEDQKLQVLLTQIESKKHQVETAFERLQQELEQQRCLLLARLRELEQQIWKERDEYITKVSEEVTRLGAQVKELEEKCQQPASELLQVIREGLHGCEMKTFVSPEAISPDLVKKIRDFHRKILTLPEMMRMFSENLAHHLEIDSGVITLDPQTASRSLVLSEDRKSVRYTRQKKSLPDSPLRFDGLPAVLGFPGFSSGRHRWQVDLQLGDGGGCTVGVAGEGVRRKGEMGLSAEDGVWAVIISHQQCWASTSPGTDLPLSEIPRGVRVALDYEAGQVTLHNAQTQEPIFTFTASFSGKVFPFFAVWKKGSCLTLKG

SEQ ID NO: 227856 - protein, 465 aa, Artificial Sequence
  derived and/or modified sequence
MPATPSLKVVHELPACTLCAGPLEDAVTIPCGHTFCRLCLPALSQMGAQSSGKILLCPLCQEEEQAETPMAPVPLGPLGETYCEEHGEKIYFFCENDAEFLCVFCREGPTHQAHTVGFLDEAIQPYRDRLRSRLEALSTERDEIEDVKCQEDQKLQVLLTQIESKKHQVETAFERLQQELEQQRCLLLARLRELEQQIWKERDEYITKVSEEVTRLGAQVKELEEKCQQPASELLQDVRVNQSRCEMKTFVSPEAISPDLVKKIRDFHRKILTLPEMMRMFSENLAHHLEIDSGVITLDPQTASRSLVLSEDRKSVRYTRQKKNLPDSPLRFDGLPAVLGFPGFSSGRHRWQVDLQLGDGGGCTVGVAGEGVRRKGEMGLSAEDGVWAVIISHQQCWASTSPGTDLPLSEIPRGVRVALDYEAGQVTLHNAQTQEPIFTFTASFSGKVFPFFAVWKKGSCLTLKG

SEQ ID NO: 227857 - protein, 396 aa, Artificial Sequence
  derived and/or modified sequence
MAPVPLGPLGETYCEEHGEKIYFFCENDAEFLCVFCREGPTHQAHTVGFLDEAIQPYRDRLRSRLEALSTERDEIEDVKCQEDQKLQVLLTQIESKKHQVETAFERLQQELEQQRCLLLARLRELEQQIWKERDEYITKVSEEVTRLGAQVKELEEKCQQPASELLQVIREGLHGCEMKTFVSPEAISPDLVKKIRDFHRKILTLPEMMRMFSENLAHHLEIDSGVITLDPQTASRSLVLSEDRKSVRYTRQKKNLPDSPLRFDGLPAVLGFPGFSSGRHRWQVDLQLGDGGGCTVGVAGEGVRRKGEMGLSAEDGVWAVIISHQQCWASTSPGTDLPLSEIPRGVRVALDYEAGQVTLHNAQTQEPIFTFTASFSGKVFPFFAVWKKGSCLTLKG

SEQ ID NO: 227858 - DNA, 2241 bp, Artificial Sequence
  derived and/or modified sequence
actttgatgctgtgggcacgcctcagagccagaagtttatggctcccacctgctcaatctgacaggaagcttctgctccccagttctccccagccactgtggtctacagattccaggaaacccatccccctgtgacctcatggtgtgctctgttctccaccctagggaccagaaggagccaggagtaaagaactggcttacttggccgccactgggaaattctgggtaattcgagacgccctggaatttggacccactccgctgataggtggtggccagggttctagggaacacaagaggcggagccaggtggcttccctgtgctggcattcttgcctctctctctctttctctctctctgtctcttagccttgcagccgtttccctctgcgattcatgtaagtgtgactcgatttcagggaaagggaactcgcgtgggctgaggagaccggagtggacgggctggggaaggcaccgtgatgcccgcaaccccgtccctgaaggtggtccatgagctgcctgcctgtaccctctgtgcggggccgctggaggatgcggtgaccattccctgtggacacaccttctgccggctctgcctccccgcgctctcccagatgggggcccaatcctcgggcaagatcctgctctgcccgctctgccaagaggaggagcaggcagagactcccatggcccctgtgcccctgggcccgctgggagaaacttactgcgaggagcacggcgagaagatctacttcttctgcgagaacgatgccgagttcctctgtgtgttctgcagggagggtcccacgcaccaggcgcacaccgtggggttcctggacgaggccattcagccctaccgggatcgtctcaggagtcgactggaagctctgagcacggagagagatgagattgaggatgtaaagtgtcaagaagaccagaagcttcaagtgctgctgactcagatcgaaagcaagaagcatcaggtggaaacagcttttgagaggctgcagcaggagctggagcagcagcgatgtctcctgctggccaggctgagggagctggagcagcagatttggaaggagagggatgaatatatcacaaaggtctctgaggaagtcacccggcttggagcccaggtcaaggagctggaggagaagtgtcagcagccagcaagtgagcttctacaagatgtcagagtcaaccagagcaggtgtgagatgaagacttttgtgagtcctgaggccatttctcctgaccttgtcaagaagatccgtgatttccacaggaaaatactcaccctcccagagatgatgaggatgttctcagaaaacttggcgcatcatctggaaatagattcaggggtcatcactctggaccctcagaccgccagccggagcctggttctctcggaagacaggaagtcagtgaggtacacccggcagaagaagagcctgccagacagccccctgcgcttcgacggcctcccggcggttctgggcttcccgggcttctcctccgggcgccaccgctggcaggttgacctgcagctgggcgacggcggcggctgcacggtgggggtggccggggagggggtgaggaggaagggagagatgggactcagcgccgaggacggcgtctgggccgtgatcatctcgcaccagcagtgctgggccagcacctccccgggcaccgacctgccgctgagcgagatcccgcgcggcgtgagagtcgccctggactacgaggcggggcaggtgaccctccacaacgcccagacccaggagcccatcttcaccttcactgcctctttctccggcaaagtcttccctttctttgccgtctggaaaaaaggttcctgccttacgctgaaaggctgaagtggggcgcgcgaagggcggcgaagcggagacggcggctctccgggatccagctccgcccctggccagtgtgcggcccgggggctccctgtgcccgcgtgaggcgagagaacaggggacttgagtctcgaacagcggttgtttttactttatttatcttaggccctcagctccctgacgtcctgagcctccctgtgacgctctggccttctctgtacctcagagtgcagaaccacagacggcttcggctgtgcctagggcaacagccaacctaggagccagcgggctttcggggaaaaaaaagaaaaagacatctaaaataaaatgtttaaactgtttcaaaataaaaaaaaaaaaaaaaaaa

SEQ ID NO: 227859 - DNA, 1398 bp, Artificial Sequence
  derived and/or modified sequence
atgcccgccacccccagcctgaaggtggtgcacgagctgcccgcctgcaccctgtgcgccggccccctggaggacgccgtgaccatcccctgcggccacaccttctgcagactgtgcctgcccgccctgagccagatgggcgcccagagcagcggcaagatcctgctgtgccccctgtgccaggaggaggagcaggccgagacccccatggcccccgtgcccctgggccccctgggcgagacctactgcgaggagcacggcgagaagatctacttcttctgcgagaacgacgccgagttcctgtgcgtgttctgcagagagggccccacccaccaggcccacaccgtgggcttcctggacgaggccatccagccctacagagacagactgagaagcagactggaggccctgagcaccgagagagacgagatcgaggacgtgaagtgccaggaggaccagaagctgcaggtgctgctgacccagatcgagagcaagaagcaccaggtggagaccgccttcgagagactgcagcaggagctggagcagcagagatgcctgctgctggccagactgagagagctggagcagcagatctggaaggagagagacgagtacatcaccaaggtgagcgaggaggtgaccagactgggcgcccaggtgaaggagctggaggagaagtgccagcagcccgccagcgagctgctgcaggacgtgagagtgaaccagagcagatgcgagatgaagaccttcgtgagccccgaggccatcagccccgacctggtgaagaagatcagagacttccacagaaagatcctgaccctgcccgagatgatgagaatgttcagcgagaacctggcccaccacctggagatcgacagcggcgtgatcaccctggacccccagaccgccagcagaagcctggtgctgagcgaggacagaaagagcgtgagatacaccagacagaagaagagcctgcccgacagccccctgagattcgacggcctgcccgccgtgctgggcttccccggcttcagcagcggcagacacagatggcaggtggacctgcagctgggcgacggcggcggctgcaccgtgggcgtggccggcgagggcgtgagaagaaagggcgagatgggcctgagcgccgaggacggcgtgtgggccgtgatcatcagccaccagcagtgctgggccagcaccagccccggcaccgacctgcccctgagcgagatccccagaggcgtgagagtggccctggactacgaggccggccaggtgaccctgcacaacgcccagacccaggagcccatcttcaccttcaccgccagcttcagcggcaaggtgttccccttcttcgccgtgtggaagaagggcagctgcctgaccctgaagggctag

SEQ ID NO: 227860 - DNA, 1191 bp, Artificial Sequence
  derived and/or modified sequence
atggcccccgtgcccctgggccccctgggcgagacctactgcgaggagcacggcgagaagatctacttcttctgcgagaacgacgccgagttcctgtgcgtgttctgcagagagggccccacccaccaggcccacaccgtgggcttcctggacgaggccatccagccctacagagacagactgagaagcagactggaggccctgagcaccgagagagacgagatcgaggacgtgaagtgccaggaggaccagaagctgcaggtgctgctgacccagatcgagagcaagaagcaccaggtggagaccgccttcgagagactgcagcaggagctggagcagcagagatgcctgctgctggccagactgagagagctggagcagcagatctggaaggagagagacgagtacatcaccaaggtgagcgaggaggtgaccagactgggcgcccaggtgaaggagctggaggagaagtgccagcagcccgccagcgagctgctgcaggtgatcagagagggcctgcacggctgcgagatgaagaccttcgtgagccccgaggccatcagccccgacctggtgaagaagatcagagacttccacagaaagatcctgaccctgcccgagatgatgagaatgttcagcgagaacctggcccaccacctggagatcgacagcggcgtgatcaccctggacccccagaccgccagcagaagcctggtgctgagcgaggacagaaagagcgtgagatacaccagacagaagaagagcctgcccgacagccccctgagattcgacggcctgcccgccgtgctgggcttccccggcttcagcagcggcagacacagatggcaggtggacctgcagctgggcgacggcggcggctgcaccgtgggcgtggccggcgagggcgtgagaagaaagggcgagatgggcctgagcgccgaggacggcgtgtgggccgtgatcatcagccaccagcagtgctgggccagcaccagccccggcaccgacctgcccctgagcgagatccccagaggcgtgagagtggccctggactacgaggccggccaggtgaccctgcacaacgcccagacccaggagcccatcttcaccttcaccgccagcttcagcggcaaggtgttccccttcttcgccgtgtggaagaagggcagctgcctgaccctgaagggctag

SEQ ID NO: 227861 - DNA, 1398 bp, Artificial Sequence
  derived and/or modified sequence
atgcccgccacccccagcctgaaggtggtgcacgagctgcccgcctgcaccctgtgcgccggccccctggaggacgccgtgaccatcccctgcggccacaccttctgcagactgtgcctgcccgccctgagccagatgggcgcccagagcagcggcaagatcctgctgtgccccctgtgccaggaggaggagcaggccgagacccccatggcccccgtgcccctgggccccctgggcgagacctactgcgaggagcacggcgagaagatctacttcttctgcgagaacgacgccgagttcctgtgcgtgttctgcagagagggccccacccaccaggcccacaccgtgggcttcctggacgaggccatccagccctacagagacagactgagaagcagactggaggccctgagcaccgagagagacgagatcgaggacgtgaagtgccaggaggaccagaagctgcaggtgctgctgacccagatcgagagcaagaagcaccaggtggagaccgccttcgagagactgcagcaggagctggagcagcagagatgcctgctgctggccagactgagagagctggagcagcagatctggaaggagagagacgagtacatcaccaaggtgagcgaggaggtgaccagactgggcgcccaggtgaaggagctggaggagaagtgccagcagcccgccagcgagctgctgcaggacgtgagagtgaaccagagcagatgcgagatgaagaccttcgtgagccccgaggccatcagccccgacctggtgaagaagatcagagacttccacagaaagatcctgaccctgcccgagatgatgagaatgttcagcgagaacctggcccaccacctggagatcgacagcggcgtgatcaccctggacccccagaccgccagcagaagcctggtgctgagcgaggacagaaagagcgtgagatacaccagacagaagaagaacctgcccgacagccccctgagattcgacggcctgcccgccgtgctgggcttccccggcttcagcagcggcagacacagatggcaggtggacctgcagctgggcgacggcggcggctgcaccgtgggcgtggccggcgagggcgtgagaagaaagggcgagatgggcctgagcgccgaggacggcgtgtgggccgtgatcatcagccaccagcagtgctgggccagcaccagccccggcaccgacctgcccctgagcgagatccccagaggcgtgagagtggccctggactacgaggccggccaggtgaccctgcacaacgcccagacccaggagcccatcttcaccttcaccgccagcttcagcggcaaggtgttccccttcttcgccgtgtggaagaagggcagctgcctgaccctgaagggctag

SEQ ID NO: 227862 - DNA, 1191 bp, Artificial Sequence
  derived and/or modified sequence
atggcccccgtgcccctgggccccctgggcgagacctactgcgaggagcacggcgagaagatctacttcttctgcgagaacgacgccgagttcctgtgcgtgttctgcagagagggccccacccaccaggcccacaccgtgggcttcctggacgaggccatccagccctacagagacagactgagaagcagactggaggccctgagcaccgagagagacgagatcgaggacgtgaagtgccaggaggaccagaagctgcaggtgctgctgacccagatcgagagcaagaagcaccaggtggagaccgccttcgagagactgcagcaggagctggagcagcagagatgcctgctgctggccagactgagagagctggagcagcagatctggaaggagagagacgagtacatcaccaaggtgagcgaggaggtgaccagactgggcgcccaggtgaaggagctggaggagaagtgccagcagcccgccagcgagctgctgcaggtgatcagagagggcctgcacggctgcgagatgaagaccttcgtgagccccgaggccatcagccccgacctggtgaagaagatcagagacttccacagaaagatcctgaccctgcccgagatgatgagaatgttcagcgagaacctggcccaccacctggagatcgacagcggcgtgatcaccctggacccccagaccgccagcagaagcctggtgctgagcgaggacagaaagagcgtgagatacaccagacagaagaagaacctgcccgacagccccctgagattcgacggcctgcccgccgtgctgggcttccccggcttcagcagcggcagacacagatggcaggtggacctgcagctgggcgacggcggcggctgcaccgtgggcgtggccggcgagggcgtgagaagaaagggcgagatgggcctgagcgccgaggacggcgtgtgggccgtgatcatcagccaccagcagtgctgggccagcaccagccccggcaccgacctgcccctgagcgagatccccagaggcgtgagagtggccctggactacgaggccggccaggtgaccctgcacaacgcccagacccaggagcccatcttcaccttcaccgccagcttcagcggcaaggtgttccccttcttcgccgtgtggaagaagggcagctgcctgaccctgaagggctag

SEQ ID NO: 227863 - DNA, 1398 bp, Artificial Sequence
  derived and/or modified sequence
atgcctgcaacacctagcctgaaagttgtgcatgaactcccagcctgcacgttgtgtgccggaccgttggaggatgccgtgaccattccctgcgggcatacgttttgtagactctgcttgcccgccctcagccagatgggagcccagagcagtgggaagatactgctttgtcctctttgtcaggaggaggagcaagctgagactccaatggccccagtgcctctgggacccctcggcgaaacgtactgcgaggagcacggcgaaaagatctacttcttctgcgagaacgatgccgaattcttgtgcgttttttgccgtgaggggcccactcatcaggcacacaccgtggggttcttggacgaggcaattcagccttatcgcgaccgccttcggtcgcgcttggaggcactgagcacagaacgcgatgagattgaggacgtcaaatgtcaggaggaccagaagctccaggtgctgctgacgcagattgagagcaagaaacaccaggtggagacagcctttgagaggctccagcaagaactcgagcagcagagatgcctgttgctcgcgcgcctgagagaattggaacaacaaatctggaaagaaagggatgaatacatcactaaagtcagcgaagaagtcacaaggctcggggcccaggtaaaagaactggaagagaagtgccaacagccagcttccgaactgctgcaggacgtaagagtcaatcagtcaagatgcgagatgaaaacttttgtatcccctgaagcaatctctccagaccttgtcaagaaaatacgcgacttccaccggaaaatcctcaccctccccgagatgatgagaatgttctccgaaaatctcgctcatcacttggagatcgactccggggtcattacattggacccccagacagcgagtcgttccctggtgctgtccgaggatcgcaagagtgtgagatatacccggcagaaaaagtccttgcctgacagtcctttgagattcgatgggctccccgctgtgctcggttttcctgggtttagtagtggccgccataggtggcaggtggatctgcagctgggagatggcggtggttgcactgtgggagtcgcaggtgaaggggtgaggagaaaaggcgaaatggggttgagcgccgaagacggcgtatgggcagtgatcatctctcaccagcagtgttgggcttctacctcaccagggaccgacctccccttatctgagatcccacgcggagtgagggtggcccttgactacgaggcaggtcaagtgacactgcataatgcccagacccaagaacccatattcacatttacagcgagcttcagcggcaaggtgtttccgtttttcgcggtttggaagaagggctcctgcctgacactcaaaggctag

SEQ ID NO: 227864 - DNA, 1398 bp, Artificial Sequence
  derived and/or modified sequence
atgcccgccacaccatctttgaaggtggtgcacgaactcccggcttgtacattgtgtgccggtccacttgaggacgccgtgaccattccctgtggacacacgttttgccgcctgtgcctgccagcattgtcccagatgggagctcagtcatcaggcaagattctgctgtgtcccctgtgccaggaggaggagcaggccgaaacacccatggccccagtccccctcggaccgctgggagagacctactgcgaagagcacggagagaaaatttattttttttgcgagaatgacgcggagtttctgtgcgttttttgcagagaagggcctactcaccaggcacacacagttggcttcctcgatgaggccatccagccctatagagataggctgcggtcccgactggaggcccttagcaccgaacgcgatgagatagaggatgttaagtgccaggaggaccaaaaactacaggtgttgctgacgcagattgaatctaaaaagcaccaggtggaaaccgcattcgaacggctgcaacaggaattggagcagcagcggtgtctcctgctggccaggctcagagagctggagcaacaaatctggaaagagagggatgaatatatcactaaagtaagcgaagaggtgacacgcctgggagcccaggtaaaggagctcgaggaaaaatgccagcagcccgcatctgagcttctccaagacgtgagagtgaaccagagccggtgtgaaatgaagacgttcgtgagtcccgaggctatctctccggatctggttaagaagatccgtgattttcatcgaaaaattctgaccttgccagagatgatgaggatgtttagcgagaacctggctcatcatctcgaaattgactccggggtgataactctggacccccagactgctagtcgatccctcgtgttatcggaagatcgtaaaagtgtcagatatactagacagaagaagagcctcccagacagtcccctccgatttgatgggctccctgccgttcttggctttccaggcttttcctcagggcgtcataggtggcaagtcgatctgcagctgggagacggaggaggctgtaccgtgggtgtggctggtgagggagtccgacggaagggtgagatgggactctcagctgaggacggggtttgggctgtgattatcagccaccagcagtgctgggctagcacttccccaggcacagacctgcctctctccgaaatacctcgtggcgtgcgggtagccctcgactatgaagccggtcaagtgacccttcataatgcacaaacacaggagcccatattcacattcacagcatcattctctgggaaagtttttcctttttttgctgtgtggaagaagggaagttgtttgaccctcaagggctag

SEQ ID NO: 227865 - DNA, 1191 bp, Artificial Sequence
  derived and/or modified sequence
atggcaccggtgcctctgggtcctctaggcgagacatattgtgaagagcacggcgagaagatctactttttctgcgaaaatgatgcagaatttctatgcgtgttctgccgggagggcccaacccaccaagcccacactgtggggttcctggacgaagctatacagccttaccgcgatcggctcagaagcagacttgaagccctttctaccgagagagatgagatcgaggatgtaaagtgtcaagaagaccaaaagctccaggttctcctgacacagattgagtccaaaaaacatcaggttgaaactgcctttgagcggttgcaacaggaactggaacagcagcggtgcctgctcctcgcacgcttgagggaactcgagcaacagatatggaaggaacgggatgagtatatcaccaaagtgagcgaggaagtcaccaggctgggagcacaggtaaaggagctggaagaaaagtgccagcagcccgcgagcgaactgctgcaagtaattagagaaggcctgcatggctgcgaaatgaagactttcgtttcaccagaagccatctcccctgatcttgtaaaaaaaatcagagactttcatcggaagatcctgacgctgccagaaatgatgcgtatgttttcagagaaccttgcccatcacctggaaatcgacagcggagtaattactttggaccctcagactgcttcacggagcctggtgctttcagaggatcgaaagtcagtgcgttacactcgacagaagaagtctctgccagattccccacttcggttcgacgggctgccggcggtgcttggcttcccaggtttctcctctgggcgccatcgttggcaagtagacctccagcttggggacggcggcggatgcaccgtgggcgttgcaggcgaaggagtgaggcggaaaggagagatgggtctgtcagctgaggacggagtctgggccgtgatcatatctcatcagcagtgttgggcctcaacatcccccggcacagacctgccactctcagaaatccccaggggcgtgagggtggccctggactatgaggcaggacaggtcacacttcataacgcacaaactcaggagcctatctttacttttactgcctccttttccggtaaagtctttccttttttcgccgtgtggaagaaggggagttgtctcaccctgaagggctag

SEQ ID NO: 227866 - DNA, 1398 bp, Artificial Sequence
  derived and/or modified sequence
atgcccgcaaccccctccctgaaggtggtgcatgagctacctgcgtgcacactttgtgcggggccactagaggatgccgtgacaattccatgtgggcatacattttgtcggctttgtctacccgctctctcccaaatgggtgctcagtcctcgggcaaaattctgctctgtcccctgtgtcaggaggaagaacaggctgagaccccaatggccccagttcctttaggcccattaggcgagacatattgtgaggagcacggcgagaaaatttatttcttttgtgagaatgatgcggagtttctttgtgtgttctgcagagagggcccgacacaccaagcacacaccgtgggattcctggacgaggcaatacaaccctaccgcgaccgactcagatcgagacttgaggctctgtctactgagcgagatgaaatagaagatgtgaaatgtcaggaggatcagaaactacaggtgctgctgacccaaattgagagtaagaagcatcaagtagaaacagccttcgagagattacagcaggaattggagcagcagaggtgtcttctcctggctcgcctgagagagctcgagcaacaaatctggaaagagcgggatgagtacatcaccaaggtgtccgaagaggtcactcgattaggcgcacaagtgaaggagcttgaagagaagtgtcaacagccggcgagcgagcttttgcaggatgttagggtgaatcaaagtaggtgcgagatgaaaactttcgtgagccccgaagcgatttctcccgatctcgtgaaaaaaatacgcgactttcatcggaaaatcctaactctgcctgagatgatgcgaatgttctctgaaaatttagctcaccacctggaaatcgactctggtgtaattacactcgatccacagacagcctcaagaagcctggttctcagtgaagatagaaagtcagtgagatatactcgacagaaaaagtccctcccagacagtcccctgcgttttgatggattacctgccgtgctcggctttcccggtttttctagtggacggcacagatggcaggtggacctgcagcttggggacgggggcgggtgcacggtgggagtggctggtgaaggtgtgcggcgaaaaggcgagatggggttaagcgcagaagacggcgtgtgggctgtgatcattagtcatcagcagtgttgggccagtacatctccaggaactgacctgcctctgagtgaaatacctcgcggggtccgagtggccttggactatgaagcaggccaagtcacattgcataacgctcagactcaggagcctatctttacctttaccgccagcttcagtggcaaggtgtttccctttttcgctgtgtggaaaaaggggtcttgtctcaccctcaagggatag

SEQ ID NO: 227867 - DNA, 1398 bp, Artificial Sequence
  derived and/or modified sequence
atgccggcaacaccctccctgaaagtggtccacgagcttccagcctgtactctttgtgcaggtcctctggaagatgccgtgacaattccatgtgggcacactttttgccggttgtgcttgcccgcactgtctcagatgggggctcagtcttcaggaaagatcctgctgtgcccactgtgccaggaagaggagcaggctgaaacacccatggctcctgtccccttgggacctttgggggaaacatactgcgaagagcatggggaaaaaatttattttttctgcgagaacgacgctgaattcctgtgcgtgttctgtagggaaggcccaactcaccaggctcatactgtgggttttttggatgaagctattcagccatatagggacaggctgcggtctagactcgaagccctgagcacggagcgggacgaaatcgaggacgttaagtgccaggaagatcagaaactccaggtactgctcactcagattgagagcaaaaagcaccaggtggagacagcctttgaacggttacaacaggaactggagcagcagaggtgccttctgctcgctcggcttagggaactggagcagcagatctggaaggagcgggacgagtacattacaaaagttagcgaagaagttacaaggctgggggcccaagttaaagagctggaagagaagtgtcaacagcccgccagcgaactgctacaggatgtcagagtgaatcaaagcaggtgcgaaatgaagacattcgtgtcaccagaggcgatctctccagacttggtcaagaagattagagacttccatcggaaaattttaacgttgccagagatgatgcggatgttctccgagaatttggcacaccacctcgagatcgattcaggagtgattactctcgacccacagacggcctcacgctccctggtacttagcgaggatagaaaaagcgtgagatacaccaggcaaaagaagtccctgcctgactctcccctgcgctttgacggactccccgctgtactaggctttccagggttttcaagtggtcgacaccgttggcaggtcgatcttcaactcggcgatggcggaggctgcactgttggagtagcaggggaaggtgttagacgcaagggagaaatgggactctccgccgaggacggggtctgggctgttatcatttctcaccagcagtgttgggcttctacttcccctggaacagatctgccactctctgaaataccgcgcggggtgcgtgtggcccttgactacgaagcaggccaggtgaccctccataacgcccaaacccaagagcccatctttaccttcaccgcctccttcagcggtaaagttttccccttttttgctgtgtggaagaaaggctcgtgccttacactgaaaggatag

SEQ ID NO: 227868 - DNA, 1398 bp, Artificial Sequence
  derived and/or modified sequence
atgcccgctactccttcacttaaggtggtgcacgagttaccggcctgcacgctgtgcgctggtccattggaggatgccgtcactataccctgtggccataccttttgccgactctgcctccccgcactttctcagatgggggcccaatcttctggcaagattcttctctgcccactgtgtcaggaagaggaacaagccgaaaccccaatggcacccgtacctctgggccccctcggagaaacatactgtgaggaacacggagagaagatctactttttttgtgagaatgatgctgaattcctgtgcgtgttttgccgcgaagggccaacccatcaagcacacacggtgggatttttagatgaagccatccagccatatagggaccgtctcaggagccgcctggaggctctttccactgagcgggatgagatcgaggatgtcaagtgccaggaagatcagaagctacaagttctgctgacgcagatagaatcaaagaagcatcaggtcgagacagcctttgagaggctgcagcaggagctggaacagcagcgttgtctattgctggcacggttacgtgaactggaacaacagatctggaaggagcgtgatgaatacatcactaaagtaagtgaggaagtgaccagactcggggcacaggtcaaagaactggaggagaagtgtcaacaacctgcctcagaactcctccaggatgtgcgtgtgaaccagagtcgttgtgagatgaagacattcgttagcccggaggccatttcccccgatttggtcaaaaagattcgcgattttcacaggaagatattgacacttcccgagatgatgcgtatgtttagcgagaatcttgcccaccacttagagatcgattccggcgtcattaccctggacccccaaaccgcatcacgcagcctggtcctatccgaagacaggaagtctgtgcgatacacacgacaaaaaaagtcactgcccgattcacctctacggttcgacgggctgccagccgtgctgggatttcctgggttctcatctggtaggcacaggtggcaagtggacctccagcttggagacggaggcggatgcaccgtgggcgtggcaggggagggtgtgcgaaggaagggcgaaatgggactgtcggccgaggacggtgtgtgggcagttataattagccaccaacaatgttgggcttcgacaagcccaggaacagaccttcccctttctgagatacctcgaggcgtgagggtggctctggactacgaggctggacaagtgacgttgcataatgcgcagacccaggagcctattttcacattcactgcaagtttttctggcaaagtctttccgtttttcgcagtctggaagaaagggagctgcctcacactgaaaggctag

SEQ ID NO: 227869 - DNA, 1398 bp, Artificial Sequence
  derived and/or modified sequence
atgcccgcaactccctcgctgaaggtcgtgcatgagctgcctgcatgcactctctgtgccgggccgttagaggacgccgtcaccatcccttgtggccacaccttctgtaggctctgtctgccagctctttcgcagatgggggcccagtcctccggtaaaattctgctctgccccctgtgccaggaagaggaacaggccgagactcctatggcccctgtgcctctgggtccgctgggagagacctactgcgaagaacacggagagaaaatttatttcttctgcgagaacgatgccgagttcttatgcgtcttttgtagagagggcccaacacaccaggcccacaccgtgggatttctggatgaggccatccagccctacagagatcgtcttcggtcccgtctggaggccctctcaactgagcgcgatgagatcgaagacgtgaaatgccaggaggaccaaaagctacaggtacttctcactcaaattgaatccaagaaacatcaagtagaaacagcctttgagagattacagcaggagcttgaacaacaaaggtgcttgcttttggcgagattaagagagctcgagcagcagatttggaaggaaagagacgaatacattactaaagtatctgaggaagtgaccaggctgggtgcccaggtcaaggagctcgaagagaaatgccaacaacccgcaagcgagcttctgcaagatgtccgcgtgaaccagtcacgctgcgaaatgaaaaccttcgtgtcccctgaggcgatatcccctgacctcgtaaagaagatcagggattttcacaggaagatcttaactctccctgagatgatgaggatgttctcagaaaatctggcccatcatttggagattgactctggggtgattacccttgaccctcagactgccagccgcagcctcgttcttagtgaagaccgtaagagtgtgcggtataccagacagaaaaagaacctccccgactcccccttgaggttcgacggtctgccagctgtgttagggtttccagggttcagcagcggtcgacacaggtggcaagtcgatttacagctgggcgatggcggtgggtgcactgtgggagtagctggggaaggcgtcagacgcaaaggtgagatgggtctgtccgcagaagatggcgtttgggcggtcatcatttcgcaccagcagtgttgggccagtacatcacctggtactgacctgcctctcagcgaaatcccacgcggcgttcgggtcgccctggattacgaagcagggcaggtgacactgcacaacgcccagacccaggaacctatcttcacgtttactgcctcattcagcggaaaagttttccctttctttgcagtttggaaaaaaggttcgtgcctgaccctgaaaggttag

SEQ ID NO: 227870 - DNA, 1398 bp, Artificial Sequence
  derived and/or modified sequence
atgcccgctacaccctccttgaaggtggtacatgagctgccggcctgcaccctttgcgcggggccattggaagatgccgtgaccattccctgcgggcacacattttgtaggctttgcctgccagcactgtcccagatgggagctcagagcagtggcaaaattctgctttgtccgctgtgccaggaagaggagcaagcggagacgcccatggcccccgtgcctctggggcctctgggtgaaacctattgcgaggagcatggcgagaagatttatttcttctgtgagaacgacgcagagttcctctgtgtcttttgccgcgagggccccacacaccaagcacacacagtaggcttcctggacgaagccatccagccgtatcgcgatcggctgagatccagactggaggccctctctactgagagggatgaaatagaagatgttaagtgtcaggaggatcagaaacttcaggtgctgttgacccaaatagaatcaaagaaacatcaggtggagaccgcctttgaaagattacagcaggaactggagcagcaaaggtgtctcttgctggctcgtttacgggagctcgagcaacagatttggaaagaaagagacgagtacatcaccaaagtctcagaggaagttacacgcttaggagcccaggtcaaggagctggaggaaaagtgccagcaacccgcaagcgaactccttcaggatgtcagagtgaatcagtctagatgtgaaatgaaaacgtttgtgtcacctgaggcgatctcccccgatttagttaagaagatccgggattttcatagaaaaattctgaccctgccagagatgatgcgtatgttcagcgaaaacctagctcatcatctggagatcgacagcggcgttatcacactggatccccagaccgcgagcagaagtcttgtcttgtcagaagataggaaaagtgtcaggtatacccgccagaagaagaacctacctgatagcccgctccgctttgatggtctgccggctgtacttgggtttcctggattctccagcgggagacaccggtggcaggtcgaccttcagctgggagatgggggtgggtgcaccgtgggggttgctggcgagggggtacgacgcaagggggagatgggtttaagcgctgaggacggagtctgggctgtgataatttcacatcaacaatgttgggcctctactagtccgggcacagaccttccactcagtgagatcccaaggggggtccgagtggcactcgattacgaagccggacaagtcaccctccacaacgcccagacccaggaaccaatatttacctttactgcttccttttctgggaaagtgttccctttcttcgcagtttggaaaaagggatcatgcttaaccctcaaggggtag

SEQ ID NO: 227871 - DNA, 1398 bp, Artificial Sequence
  derived and/or modified sequence
atgcctgcaacacccagtcttaaggtggtgcacgaactccccgcgtgcaccttgtgcgctgggcctctggaggatgcggttaccatcccctgtgggcataccttctgtagactttgcctacccgcactgagtcaaatgggagcccagtcttccgggaaaatactgctttgccctctatgtcaagaggaggagcaggccgagactcccatggccccggtcccactgggaccactgggggaaacatattgtgaagaacacggggagaagatttacttcttctgtgagaacgatgcggagttcctgtgcgtgttttgtagagagggccccacccaccaggcacatacagttggttttctcgacgaagctatccagccttatcgcgatcggctgcgttctcgcctggaggccctctctacagaacgcgacgaaattgaagacgtcaaatgtcaggaagatcaaaaattacaagtgttattgactcagattgagagcaaaaagcaccaggttgaaactgccttcgaacggctgcagcaagaattagagcagcagcgctgccttctccttgccaggttaagggagcttgaacagcaaatctggaaggaaagggacgagtacataacaaaagtgtcagaggaggtgacacgcctcggagcccaggttaaggagctggaagaaaaatgtcaacagccagcctccgagctcctgcaggatgttcgtgtgaaccaatcacgctgtgagatgaagacgttcgtgtcaccggaagcgatatctcccgacttggtgaagaaaattagagatttccacagaaaaatcctcactctcccagaaatgatgagaatgtttagtgaaaacctcgcccatcacctggagattgacagcggcgtcatcaccttagatccgcagaccgcaagccgtagcctcgtgctgagcgaggatcgcaagagcgtccggtacaccaggcagaaaaagtctttgcccgattccccgctgagatttgacgggctgcctgcagtgctgggctttcccggattcagctccggtaggcacaggtggcaagtcgatctgcagcttggtgatggcggcggctgcaccgtgggggtggctggtgaaggagttagacgcaagggcgagatgggactgagcgctgaggacggggtttgggccgtgatcatcagccaccagcaatgctgggcctccaccagcccgggtactgacctgcccttatccgaaattcctaggggcgtgagagtggccctggattacgaagctggtcaagtcacgctgcacaacgcccagacacaggaacccatttttacctttacagctagcttttccgggaaagtgttccctttctttgctgtgtggaaaaagggaagttgcctgacccttaagggttag

SEQ ID NO: 227872 - DNA, 1191 bp, Artificial Sequence
  derived and/or modified sequence
atggctcctgttccattggggccactgggagaaacctactgcgaggaacacggtgagaagatttacttcttttgcgaaaacgatgctgaatttctttgcgtattctgtcgcgagggccctacccaccaggcacacactgtcggttttctcgacgaagccatccagccttatcgcgaccggttacggtctcggctcgaggcgctaagtaccgaacgggacgaaatcgaagatgtgaagtgccaggaagaccagaagctgcaagttctgttaacgcagatagaaagtaagaaacatcaggtggagactgcatttgagcggctacaacaggaactggaacaacagcggtgcctgctactcgctaggttgagagagctcgaacagcagatttggaaggagcgagatgagtacataacgaaggtgagtgaagaagtgacaaggctcggggcccaggttaaagaactggaggaaaagtgccagcagcccgcctctgaattactccaagtgatcagggaggggctccacggctgtgaaatgaaaacattcgtctcacccgaggctatctctccagatctagtgaagaaaatcagagattttcaccgcaagattctgaccctacctgagatgatgaggatgttttccgaaaatttggcccaccacctcgaaatcgattccggtgtcattaccctggatcctcagacagcatcccggagcttggtactgtccgaggatcgtaaatctgtgcgatacacgaggcagaagaagaacctccctgattctcctcttagatttgatgggctgccagcggtattgggattccctggcttctcgagtggcagacaccggtggcaagtggatctacagcttggagacggtgggggctgtacagtgggtgtggccggcgagggcgtccgtaggaaaggcgaaatggggctatcagccgaagatggagtttgggctgttatcatatcccatcagcagtgctgggcctcaacttctcccggtaccgacttgcctctgagcgaaatcccgaggggggtgcgcgtcgccttggactacgaggcggggcaggtgactctccataacgcacagacccaggaacccatcttcaccttcacagccagtttttccggtaaagtctttcctttctttgcggtgtggaagaagggaagctgtctcactttaaaagggtag

SEQ ID NO: 227873 - DNA, 1191 bp, Artificial Sequence
  derived and/or modified sequence
atggctcctgtccctctgggtcccttgggtgaaacctattgtgaggagcacggcgaaaaaatatacttcttttgcgagaatgacgccgagttcctctgtgtattctgcagggagggtcctacccaccaagcccacacggtgggtttcttggatgaagccattcaaccatatagagaccggctccggtccaggctagaagcgctcagcactgaaagggacgaaatagaggatgtcaagtgtcaggaggatcaaaagctgcaggtactgctgacacagatagagtcgaaaaaacatcaggtcgagactgccttcgagcgcctgcaacaggaattagagcagcaaagatgtttactgctagcaagactccgtgaactggagcagcagatttggaaagagagagatgagtacattactaaagttagtgaagaggttacacgcctaggtgctcaagtgaaggaactggaggaaaagtgccagcaaccagcgtccgaactcctccaggtgatccgagagggtctccacggatgcgaaatgaagacattcgtgtctccagaggccattagccccgacttagttaagaaaattagggactttcatcgcaaaattctgaccctgcccgaaatgatgaggatgttctcagagaatctcgcccatcacctggagatcgatagtggggtgattactttagacccacagacagcgtcaagatcactggtcctgtccgaagaccgcaagagtgtcagatacacacggcagaaaaagtctctccccgattctcccctgcgtttcgacggactacccgccgtgctgggtttcccaggattcagcagcgggagacacagatggcaggtggatttacagttaggcgacgggggagggtgcaccgtaggggtcgcaggtgagggcgtgcgaaggaagggtgagatggggctgtccgcggaggatggagtctgggccgttatcatatcacaccagcagtgctgggccagcactagtcccggtacagatcttccccttagtgagataccaagaggtgtgagggtggctctggactacgaggctgggcaagtaacgttacacaacgctcagacacaagaacctattttcacattcaccgcgagctttagcggcaaagtgtttccatttttcgcagtttggaagaagggatcctgtcttacactcaagggctag

SEQ ID NO: 227874 - DNA, 1191 bp, Artificial Sequence
  derived and/or modified sequence
atggcccccgtccccctgggaccactgggcgagacttactgtgaggagcatggcgagaaaatttatttcttttgtgagaacgatgctgaatttttgtgtgtgttctgccgtgagggacctactcaccaggcgcacacagtgggcttcttggatgaggccatacagccttacagggatcgattacgctcccgcttagaggctttgagcacagaaagggacgagatcgaagatgttaagtgtcaggaggaccagaagttgcaagtcctgctgacacagatcgaatctaagaagcatcaggttgagacggcttttgagagacttcagcaggagctggagcagcagcgctgtctacttctggcacgtctgcgggaattggagcagcagatctggaaggagagagacgagtacatcaccaaagtgagcgaggaggtcactaggcttggtgcccaggtgaaggaactcgaagaaaaatgtcagcagcccgcctctgaactgctccaagtgatccgtgaggggctgcacgggtgcgaaatgaagactttcgtctcacccgaggcaatcagccccgatctcgtgaagaaaattcgggacttccatcgcaagatactgacgctgcctgaaatgatgaggatgttcagcgagaacttagctcaccacttagaaattgattcaggcgtaattacgctggatccccagaccgcatctcgctcactggtactctcagaagatcggaagagcgtccgttacacccggcagaaaaagtccctccccgacagcccattaagattcgacggccttccagccgtcctgggctttccaggattctcctcaggacgacatcgctggcaggtggatctgcagttgggggacggtggcggatgcacggtgggcgtggccggcgaaggagtgcggcggaagggggaaatgggcttgagtgccgaggacggagtatgggccgtgatcattagtcaccagcaatgctgggcaagcacatcacccggtaccgacctgccattgagcgagatccctagaggggtgcgcgtggccttagactatgaagctgggcaggtcacactccataatgctcaaacccaggaacctatcttcacattcacagcttccttttcaggaaaagtgtttcccttcttcgctgtgtggaagaagggttcttgtctcaccctgaaagggtag

SEQ ID NO: 227875 - DNA, 1191 bp, Artificial Sequence
  derived and/or modified sequence
atggcaccagtgcccctggggccactgggagagacctactgcgaagagcacggtgagaagatttattttttctgcgagaatgatgctgagtttctctgtgtcttctgtagggaaggccccacacaccaggctcatacagttgggttcctcgacgaagccatacagccttatagagaccgtttgagatctagattagaagccctgtctacggaaagggatgagattgaggatgtcaagtgtcaggaagaccaaaaactccaagtgttgttgacacagatcgagtccaaaaaacatcaggtcgaaaccgcctttgaaaggctgcagcaggaattggagcagcagaggtgtcttctgctcgccagacttcgcgagttggaacagcagatatggaaggaaagggacgagtatatcacaaaggtgtcagaagaggtgacaagactgggggctcaagtgaaagagctcgaggaaaagtgccaacagcctgcttctgagttactgcaggtcattcgggaggggttgcacggatgcgagatgaaaaccttcgtaagcccagaggctatctcccctgatctggtgaaaaagatccgggactttcaccggaagatcttaaccctgccagagatgatgcggatgttctccgaaaacctggcccatcaccttgaaatagactccggggtaatcactctggatccccagactgctagccggtcactagtactgtccgaagacaggaaatcagtacggtacacaagacagaaaaagagtttaccagacagccctctgcgcttcgacggcctcccggcggtcctgggattccctggattctcctccggtcgacaccgatggcaggttgacctccaactcggagatggagggggatgtactgtaggggttgcgggcgaaggcgttaggcgtaaaggagagatggggctgtccgcagaagacggggtctgggccgtaataatctcccatcagcagtgttgggctagcacgtctcccggaactgatctgccccttagtgagatcccaaggggtgtccgggtagctcttgactatgaggcaggccaggtgactctccacaatgcacagacgcaagagccgatttttacctttactgcctccttttcagggaaagtgttcccattctttgctgtgtggaagaagggctcttgtctgactttgaagggctag

SEQ ID NO: 227876 - DNA, 1191 bp, Artificial Sequence
  derived and/or modified sequence
atggccccggtacccctgggacccttgggagagacatactgtgaggaacacggggaaaaaatttatttcttctgtgagaacgacgcagagtttttatgtgtcttctgccgagaaggaccaacacatcaggcccacaccgttgggttcttggacgaggctatccagccttaccgagaccgcttgaggtctaggctggaggcgctgagcacagaaagggacgagattgaggacgttaagtgtcaggaagatcagaaacttcaagtgctactgacccagattgagtcaaagaaacaccaggtggagactgccttcgaacggctacagcaggagctagagcagcagcggtgcctactcttggccaggctgagagagctggagcaacagatttggaaagagcgcgatgagtacatcactaaggtgtcagaagaggtcacccgcttaggggcgcaggtgaaagagctcgaggaaaaatgtcagcaaccagcttcggagctgctgcaagttattcgggagggtctgcacggctgtgaaatgaagacatttgtgtccccagaagctatctcacctgacctggttaaaaagattagggacttccaccgcaaaatcctgactctcccagaaatgatgcgaatgttttctgagaatctggcccaccacctcgaaattgacagtggtgtcattacactggacccacaaactgcctcacggtcactggtgctttccgaggacagaaagagtgtcaggtatactagacaaaagaagaaccttccagactctccactacggttcgacggcctcccggcagtactgggttttccaggctttagctccggtaggcatcgctggcaggtggatctccagctcggcgacggcggtggatgcacagtcggcgttgccggcgaaggggtacgaaggaagggtgaaatgggtctctctgcggaagacggcgtctgggcagtgattatcagtcatcaacagtgctgggcctctactagcccgggcacagacctccccctttctgagataccacgtggagtgagagttgctttagattatgaggcaggtcaggttactcttcacaatgcccagactcaggaaccaatctttactttcacagcatcttttagtggaaaggtgtttccatttttcgctgtttggaagaaaggctcatgcctcacactcaagggctag

SEQ ID NO: 227877 - DNA, 1191 bp, Artificial Sequence
  derived and/or modified sequence
atggcccccgttcccctaggacctttgggggagacctactgcgaggagcatggagagaagatctatttcttctgtgagaacgatgccgagttcctctgtgtcttttgtcgcgagggccccactcaccaggctcacacagtcggttttctcgatgaggcgatccagccgtatagagaccgattaagatcacggctggaggccctgtcaaccgagagggatgaaatcgaagacgtgaagtgccaggaagaccagaaacttcaggtgctgttgacccagatcgaatccaaaaaacatcaggtggaaacagcattcgaacgcctccagcaggaactggagcagcagcggtgtctgcttctggcgcggctcagagagctggagcaacaaatctggaaggaaagggatgaatacattaccaaggtttcggaagaggtcacaagattgggcgcacaggtcaaagagttggaggaaaagtgtcagcagcccgcatccgaactgcttcaagtcattcgggagggtctgcacggatgtgagatgaagaccttcgtgagtccagaagctatttccccggacctcgtaaaaaagattagagatttccacaggaagattcttactcttccggaaatgatgcggatgttctctgagaacctagctcatcatctagagatagatagcggagtgatcacactcgacccacagacagcctcacgttcccttgtattgagcgaagacaggaaatccgtgcgatacactaggcagaagaaaagtctcccagattcacccttacgattcgacggactgccagccgtacttggtttccccggctttagttccgggagacacagatggcaggtcgacttgcagctgggggacggcggagggtgtacagtcggcgtggcaggcgagggggtccgaagaaagggagagatggggcttagcgccgaggatggggtgtgggccgtaatcatttcccaccaacagtgttgggcgagcacctcccctgggaccgatctgccactgtccgagattccgaggggggtaagagtagctctagattacgaagccgggcaagtgacgctgcacaatgctcagacccaggagccaatttttacttttacagcttccttctccggaaaagtgttccctttttttgccgtgtggaagaagggctcatgtctgactctgaaaggatag

SEQ ID NO: 227878 - DNA, 1191 bp, Artificial Sequence
  derived and/or modified sequence
atggctccagtgcccctgggtcccctgggcgaaacttactgtgaggagcatggtgaaaaaatttacttcttctgtgagaacgatgcggaattcctgtgtgtcttctgccgggagggccccacgcatcaggctcatacagtgggattcctggatgaagccatccagccctacagagaccggctgcgcagtagactggaggccctgagcacagaacgagatgagatagaggacgtgaaatgtcaggaagatcagaaattacaggtcctgcttacccaaatcgaaagcaaaaagcatcaagttgagaccgcattcgagaggctgcagcaagaactcgagcagcagagatgtctactccttgcccggttaagggaacttgaacagcagatatggaaggagagggacgaatacatcacgaaagtctctgaggaggtcacccgtttgggcgctcaggttaaagaactggaggagaagtgccaacagcctgcgagtgagcttctgcaggtaattcgggaaggattacacgggtgcgagatgaagacatttgtctcccctgaagccatttctcctgatttggtgaaaaagatcagagattttcaccgcaagatcttaactttaccagagatgatgcggatgttcagtgaaaatctcgcccatcacctcgagatcgattctggtgtgatcacactggacccacagacagcgtctcgtagcttagtgctgtccgaggatcgcaaatcggtgcgttacacaagacagaagaaatcccttcccgacagcccgctgagattcgacggtttgcccgccgttcttgggtttccaggatttagtagcggtcggcatcgctggcaggttgatcttcagctaggagatgggggcggatgcacggtgggtgtggccggggagggagtgagacgaaagggcgagatgggcctcagtgcggaggatggcgtgtgggccgtaattatctcccatcaacaatgttgggccagcacttcacccggaaccgacctgccgctttccgaaatcccaagaggggtgagggttgccctcgactatgaggcgggacaggtgaccctgcataacgctcagacccaggaaccaattttcaccttcactgcctctttctctggcaaggtgtttcctttttttgcagtctggaaaaaaggttcctgcctgactctgaagggttag

SEQ ID NO: 227879 - DNA, 1398 bp, Artificial Sequence
  derived and/or modified sequence
atgcctgccacccccagcctgaaggtggtgcatgagctgcctgcctgcaccctgtgtgccggccccctggaggatgctgtgaccatcccctgtggccacaccttctgccgcctgtgcctgcctgccctgagccagatgggcgcccagagcagcggcaagatcctgctgtgccccctgtgccaggaggaggagcaggccgagacccccatggcccctgtgcccctgggccccctgggggagacctactgtgaggagcacggggagaagatctacttcttctgtgaaaatgatgctgagttcctgtgtgtgttctgccgggagggccccacccaccaggcccacacagtgggcttcctggatgaggccatccagccctacagagaccggctgcggagccggctggaggccctgagcacagaaagagatgaaattgaagatgtgaagtgccaggaggaccagaagctgcaggtgctgctgacccagatcgagagcaagaagcaccaggtggagacagcctttgagcggctgcagcaggagctggagcagcagcgctgcctgctgctggcccggctgcgggagctggagcagcagatctggaaggagagagatgagtacatcaccaaggtgtctgaggaggtgacccggctgggcgcccaggtgaaggagctggaggagaagtgccagcagcctgccagcgagctgctgcaggatgtgcgggtgaaccagagccgctgtgagatgaagacctttgtgtccccagaggccatcagcccagacctggtgaagaagatccgggacttccacaggaagatcctgaccctgcctgagatgatgaggatgttttctgagaacctggcccaccacctggagattgattctggagtcatcaccctggacccccagacagccagccgcagcctggtgctgtctgaggacaggaagtctgtgcgctacacccggcagaagaagagcctgcctgacagccccctgcgctttgatggcctgcctgctgtgctgggcttccctggcttcagcagcggccgccaccgctggcaggtggacctgcagctgggagatggcggcggctgcaccgtgggcgtggccggggagggcgtgagaagaaaaggagagatgggcctgtctgcagaagatggagtgtgggccgtcatcatcagccaccagcagtgctgggccagcaccagccctggaacagacctgcccctgtctgagatcccccggggcgtgcgggtggccctggactatgaagctggccaggtgaccctgcacaatgcccagacccaggagcccatcttcaccttcaccgccagcttcagcggcaaggtgttccccttctttgctgtgtggaagaagggcagctgcctgaccctgaagggctag

SEQ ID NO: 227880 - DNA, 1191 bp, Artificial Sequence
  derived and/or modified sequence
atggcccctgtgcccctgggccccctgggggagacctactgtgaggagcacggggagaagatctacttcttctgtgaaaatgatgctgagttcctgtgtgtgttctgccgggagggccccacccaccaggcccacacagtgggcttcctggatgaggccatccagccctacagagaccggctgcggagccggctggaggccctgagcacagaaagagatgaaattgaagatgtgaagtgccaggaggaccagaagctgcaggtgctgctgacccagatcgagagcaagaagcaccaggtggagacagcctttgagcggctgcagcaggagctggagcagcagcgctgcctgctgctggcccggctgcgggagctggagcagcagatctggaaggagagagatgagtacatcaccaaggtgtctgaggaggtgacccggctgggcgcccaggtgaaggagctggaggagaagtgccagcagcctgccagcgagctgctgcaggtgatccgggagggcctgcacggctgtgagatgaagacctttgtgtccccagaggccatcagcccagacctggtgaagaagatccgggacttccacaggaagatcctgaccctgcctgagatgatgaggatgttttctgagaacctggcccaccacctggagattgacagcggggtcatcaccctggacccccagacagccagccgcagcctggtgctgtctgaggacaggaagtctgtgcgctacacccggcagaagaagagcctgcctgacagccccctgcgctttgatggcctgcctgctgtgctgggcttccctggcttcagcagcggccgccaccgctggcaggtggacctgcagctgggagatggcggcggctgcaccgtgggcgtggccggggagggcgtgcggaggaagggggagatgggcctgtctgcagaagatggagtgtgggccgtcatcatcagccaccagcagtgctgggccagcaccagccctggaacagacctgcccctgtctgagatcccccggggcgtgcgggtggccctggactatgaggccggccaggtgaccctgcacaatgcccagacccaggagcccatcttcaccttcaccgccagcttcagcggcaaggtgttccccttctttgctgtgtggaagaagggcagctgcctgaccctgaagggctag

SEQ ID NO: 227881 - DNA, 1398 bp, Artificial Sequence
  derived and/or modified sequence
atgcctgccacccccagcctgaaggtggtgcatgagctgcctgcctgcaccctgtgtgccggccccctggaggatgctgtgaccatcccctgtggccacaccttctgccgcctgtgcctgcctgccctgagccagatgggcgcccagagcagcggcaagatcctgctgtgccccctgtgccaggaggaggagcaggccgagacccccatggcccctgtgcccctgggccccctgggggagacctactgtgaggagcacggggagaagatctacttcttctgtgaaaatgatgctgagttcctgtgtgtgttctgccgggagggccccacccaccaggcccacacagtgggcttcctggatgaggccatccagccctacagagaccggctgcggagccggctggaggccctgagcacagaaagagatgaaattgaagatgtgaagtgccaggaggaccagaagctgcaggtgctgctgacccagatcgagagcaagaagcaccaggtggagacagcctttgagcggctgcagcaggagctggagcagcagcgctgcctgctgctggcccggctgcgggagctggagcagcagatctggaaggagagagatgagtacatcaccaaggtgtctgaggaggtgacccggctgggcgcccaggtgaaggagctggaggagaagtgccagcagcctgccagcgagctgctgcaggatgtgcgggtgaaccagagccgctgtgagatgaagacctttgtgtccccagaggccatcagcccagacctggtgaagaagatccgggacttccacaggaagatcctgaccctgcctgagatgatgaggatgttttctgagaacctggcccaccacctggagattgattctggagtcatcaccctggacccccagacagccagccgcagcctggtgctgtctgaggacaggaagtctgtgcgctacacccggcagaagaagaacctgcctgacagccccctgcgctttgatggcctgcctgctgtgctgggcttccctggcttcagcagcggccgccaccgctggcaggtggacctgcagctgggagatggcggcggctgcaccgtgggcgtggccggggagggcgtgagaagaaaaggagagatgggcctgtctgcagaagatggagtgtgggccgtcatcatcagccaccagcagtgctgggccagcaccagccctggaacagacctgcccctgtctgagatcccccggggcgtgcgggtggccctggactatgaagctggccaggtgaccctgcacaatgcccagacccaggagcccatcttcaccttcaccgccagcttcagcggcaaggtgttccccttctttgctgtgtggaagaagggcagctgcctgaccctgaagggctag

SEQ ID NO: 227882 - DNA, 1191 bp, Artificial Sequence
  derived and/or modified sequence
atggcccctgtgcccctgggccccctgggggagacctactgtgaggagcacggggagaagatctacttcttctgtgaaaatgatgctgagttcctgtgtgtgttctgccgggagggccccacccaccaggcccacacagtgggcttcctggatgaggccatccagccctacagagaccggctgcggagccggctggaggccctgagcacagaaagagatgaaattgaagatgtgaagtgccaggaggaccagaagctgcaggtgctgctgacccagatcgagagcaagaagcaccaggtggagacagcctttgagcggctgcagcaggagctggagcagcagcgctgcctgctgctggcccggctgcgggagctggagcagcagatctggaaggagagagatgagtacatcaccaaggtgtctgaggaggtgacccggctgggcgcccaggtgaaggagctggaggagaagtgccagcagcctgccagcgagctgctgcaggtgatccgggagggcctgcacggctgtgagatgaagacctttgtgtccccagaggccatcagcccagacctggtgaagaagatccgggacttccacaggaagatcctgaccctgcctgagatgatgaggatgttttctgagaacctggcccaccacctggagattgacagcggggtcatcaccctggacccccagacagccagccgcagcctggtgctgtctgaggacaggaagtctgtgcgctacacccggcagaagaagaacctgcctgacagccccctgcgctttgatggcctgcctgctgtgctgggcttccctggcttcagcagcggccgccaccgctggcaggtggacctgcagctgggagatggcggcggctgcaccgtgggcgtggccggggagggcgtgcggaggaagggggagatgggcctgtctgcagaagatggagtgtgggccgtcatcatcagccaccagcagtgctgggccagcaccagccctggaacagacctgcccctgtctgagatcccccggggcgtgcgggtggccctggactatgaggccggccaggtgaccctgcacaatgcccagacccaggagcccatcttcaccttcaccgccagcttcagcggcaaggtgttccccttctttgctgtgtggaagaagggcagctgcctgaccctgaagggctag

SEQ ID NO: 227883 - DNA, 1398 bp, Artificial Sequence
  derived and/or modified sequence
atgcccgccacccccagcctgaaggtggtgcacgagctgcccgcctgtactctctgtgcaggacctctggaggatgccgtaaccatcccatgcggacatactttctgtagactctgccttccagccctgagccagatgggcgcacaatcaagtggcaaaattctgctctgccctctctgccaagaggaagaacaggcagagacgcccatggcccccgttccactcggccccttaggagaaacgtactgtgaagaacacggggagaagatctactttttctgcgagaatgacgccgagtttctgtgcgtgttctgtagggaggggcccacacatcaggcacacaccgtaggctttctggatgaggccatacaaccctatagggataggctgaggtcacgactagaagctctgtctaccgaaagggatgaaatcgaagatgtaaagtgtcaggaggaccagaagctgcaggtgcttctgacgcaaattgaaagtaaaaaacatcaggtcgaaacagccttcgaacgactccaacaggagctagaacaacagcggtgcttgctcctggcacgcctgagagagctggagcagcagatttggaaggaacgcgacgaatacatcacaaaggtaagcgaagaggtgacccgcctgggggcccaggtcaaagaactggaggagaaatgccagcagccagcatccgagctgctgcaggatgtacgagtgaaccagtccagatgcgagatgaagacatttgtgtccccagaggcaatctcacccgaccttgtgaagaagatccgcgactttcaccggaagatcctgacgctgcctgaaatgatgaggatgttcagcgaaaaccttgcgcatcacttagagattgattctggggtcatcaccctggacccccaaacggccagccggagcctggtcttatccgaggacaggaaaagcgtgaggtacacaagacagaaaaagtcactccccgactcacctttaagattcgatgggttgccggctgtgcttggttttccggggttctcatctgggagacaccgttggcaagtggatcttcaactgggagacggtggcgggtgcactgtgggagtagcaggtgagggggtcaggaggaagggggagatgggtctgtcagccgaggatggagtatgggcagtgatcatttcccaccagcagtgctgggcctccacttctccgggaacagacctgccactgtctgagatacctcggggcgtccgagtggccttagattatgaggccggccaggtcacactgcataatgcacagacccaagaaccgatctttacctttacagcctcattctccgggaaagtgttcccctttttcgctgtgtggaagaagggatcgtgtctgacactgaagggttag

SEQ ID NO: 227884 - DNA, 1398 bp, Artificial Sequence
  derived and/or modified sequence
atgcccgccacccccagcctgaaggtggtgcacgagctgcccgcctgcacactctgcgcaggacctcttgaggacgctgtgactattccatgcggccacacattttgtcgtttgtgtctgccagcactgagtcaaatgggggcccaaagttccggcaagattttgctctgccccctctgccaggaggaggagcaggctgagacacccatggccccggtcccactggggcccctgggggagacatactgcgaggaacacggagaaaaaatttattttttttgtgaaaacgatgctgagtttctgtgcgttttctgtagggaggggccaacacatcaggcccatactgtggggtttttggacgaggccatccaaccttaccgcgaccgcttacgctcgcgccttgaggcgctgtcaacagaaagagatgaaatcgaagatgtgaagtgtcaggaggaccagaaactacaggttctcctgactcagattgagtctaaaaagcaccaggtcgagaccgctttcgagcgtctacaacaggaactcgagcaacaacgctgcctgctgctggccaggttgcgcgagttggagcaacaaatctggaaggagagagacgaatatataaccaaagtgtcggaggaggtgacccggcttggcgcacaggtgaaggaactcgaggaaaagtgtcagcagccggcaagcgagttactgcaggacgtccgggtcaatcagtccagatgcgagatgaaaacttttgtctctccagaagctatttcaccagacctcgtgaagaaaattcgcgattttcacaggaaaattctgacattgcctgaaatgatgcgtatgttcagcgaaaatttggcccatcatctggaaattgattctggagtgataacattagatccgcagactgcatcccgcagcctggtcctgtccgaagatcggaaatctgtgagatataccaggcagaagaagtcactcccagactctcccctgagattcgacggattgcccgcagtgctcggatttcctggattttccagtggcaggcatcggtggcaggtcgacctccagctcggagatggaggcgggtgcactgtcggtgtcgcaggcgagggcgtacggcgaaagggggaaatggggctgagcgcagaagacggagtgtgggcggtcataatctctcatcaacagtgctgggcatccacgtcacctggaactgaccttccgctgtcagagatcccacgtggggtaagggtcgccctagattatgaggctggccaggtgaccctgcacaatgcccagacccaggagcccattttcacattcaccgcgagtttttccggcaaagtgtttcctttttttgcagtgtggaagaagggttcctgtcttacacttaagggctag

SEQ ID NO: 227885 - DNA, 1191 bp, Artificial Sequence
  derived and/or modified sequence
atggcccccgtgcccctgggccccctgggcgagacctactgcgaggagcacggtgagaaaatctatttcttctgcgagaacgatgcagaatttctgtgtgtgttctgtagggagggccccacccatcaggcacacacagtgggctttcttgacgaagcgattcagccatacagagaccgcctacggagccgattggaggcattatccactgagagagatgagatcgaggacgtgaaatgtcaggaagaccagaaactgcaggtactccttactcagatcgaaagtaagaaacatcaggttgagacagctttcgagaggctgcagcaggagttagagcagcagcggtgcctcctgctggcccgcttgagagaactggaacagcaaatttggaaagagcgggatgagtacattactaaagtctctgaagaggtgacacgcctgggtgcacaggtcaaagagctcgaggaaaagtgtcagcagcctgcgtcagagctcttgcaagtgattagggagggcctacacggttgtgaaatgaaaactttcgtcagcccagaggcgatcagtccagatctggtgaagaagatccgcgacttccacagaaagatcctgacgctccccgagatgatgcggatgttcagcgaaaacctagcgcaccacctggagattgattccggggtcatcacactagacccccaaacagcgagtagatcactagttctgtccgaagatcggaaatctgtccgctataccaggcaaaagaagtccctgcccgattctccccttaggttcgacgggctgcctgcagtcttggggttccctggcttttcttccgggcggcatcgttggcaggtcgatcttcagcttggtgatgggggtggctgcaccgtaggggttgccggtgaaggtgtgaggaggaaaggcgaaatgggtctttctgctgaggacggggtttgggctgtgatcatttcacaccaacagtgctgggcctcaacttcgccaggcacagatcttcccctttcagagataccaagaggagtgcgcgtggccctggattatgaggctggccaggtcacattgcacaatgcccaaactcaagagccgatctttacctttaccgccagcttctccggaaaggtgtttcccttttttgccgtctggaaaaaggggtcatgcttaacccttaaaggctag

SEQ ID NO: 227886 - DNA, 1398 bp, Artificial Sequence
  derived and/or modified sequence
atgcccgccacccccagcctgaaggtggtgcacgagctgcccgcctgtaccctttgcgcagggcccctggaagacgcagtgacaatcccctgtgggcacactttttgcagactgtgtctgccggccttaagccagatgggtgcccagagcagcggaaaaatcctactgtgtccactatgccaagaggaggaacaagccgagacacctatggccccggtccccctcggaccattgggtgaaacctactgtgaggagcatggcgagaagatttattttttctgcgaaaatgatgcagagttcctatgtgtgttctgccgagagggcccaacacatcaggcgcacacagtgggctttctggacgaggcaattcagccttaccgggacaggttacggagccggctggaggctctctctactgagcgggacgagatagaggacgtgaaatgtcaggaagaccaaaagcttcaggtccttctcacccaaatcgagagtaaaaaacaccaggtggaaactgcattcgaaagactgcagcaggagctggaacaacagcgttgtttattgcttgcgagattgagggaacttgaacagcagatctggaaagaacgggacgagtacattaccaaggttagcgaggaggtgacacgcctgggcgcacaagtaaaggagttggaagaaaagtgccagcagcccgcttccgagcttctccaagacgtgagggtaaaccaaagcagatgtgaaatgaagaccttcgtcagccctgaggcaatcagtcctgacctggtgaagaagatacgggatttccaccgcaaaatactgacactacccgaaatgatgcggatgttttcagagaatctggctcaccacctagagatagacagcggcgtgatcacacttgatcctcagactgcctcacgaagtctggtgctgtcagaggatcggaaatcagtcagatacacaaggcagaagaagtctctgcctgattcgccgctccggtttgacggactccctgctgtactggggttccccgggtttagctccgggcggcaccggtggcaggtagatctgcagctgggcgacggtggtgggtgtaccgtgggggtggctggggaaggcgtccgacggaaaggggagatggggctgtctgctgaagacggtgtatgggctgtcattattagccatcagcagtgctgggcctctactagcccaggtaccgatctcccactctccgaaatcccccgcggagtaagggtggccctggattacgaagctggacaggtcaccctccacaacgctcagacacaggagcctatcttcacgttcacggcatcattctctgggaaggtgttcccttttttcgccgtgtggaagaagggatcctgcctgacactgaaggggtag

SEQ ID NO: 227887 - DNA, 1398 bp, Artificial Sequence
  derived and/or modified sequence
atgcccgccacccccagcctgaaggtggtgcacgagctgcccgcctgcactttgtgcgctggcccgcttgaagatgccgttaccatcccctgtggacacactttctgcagattgtgtctgccagctctatcacagatgggggcccagagttcagggaaaattctcctgtgccctctgtgccaggaggaagaacaagcggaaaccccgatggcacctgttcccctgggaccgctgggcgagacttattgtgaagagcatggagagaagatttatttcttctgcgaaaatgacgccgagtttctgtgcgtgttttgccgcgaaggccccacacaccaagctcatacggtaggcttcctggacgaagcgatccaaccctacagggatagactacgttcccgcctcgaggccctgtcaaccgagcgcgacgagattgaggatgttaaatgtcaagaggatcagaaactacaggtgcttctgacccaaattgaatcaaagaagcaccaggttgagactgcctttgagaggctccagcaggagcttgagcagcagcggtgtctactgcttgcacggctccgggagctggaacaacagatttggaaggagcgcgatgaatacataacgaaggtgtctgaggaggttacaagactgggagcccaggttaaggagctcgaggagaagtgtcaacagcccgccagcgaactgttgcaagacgtgagagtgaaccagagccgctgcgaaatgaagacattcgtcagtccggaagcaatttcacctgacttggtgaagaagatacgtgatttccacagaaaaatcctcaccctgccagagatgatgcgcatgttcagtgaaaatttggcgcaccatctcgaaatcgatagcggtgtcatcacattagatccccagaccgcctcacgctctctggttctgtcagaagatcggaagagtgtgcggtatacaagacagaagaaatcgcttcctgattcacccctacgttttgatggactacctgccgtgctcggtttccccggcttctcctctggcagacacaggtggcaggtggacctccagcttggggatggcggaggttgtacagtgggagtcgccggcgagggcgtaaggcgcaaaggagaaatgggcttgtccgcagaagacggagtgtgggctgtgataatctcccaccagcagtgttgggcctcaacttcgcctgggaccgacctcccactgagcgagatcccaagaggggttcgcgtggcgctggattacgaggctggacaagtgacgttgcacaatgctcagacacaggagccaatctttactttcacggcgtcgttttcaggaaaggtatttccttttttcgctgtttggaaaaaggggtcctgtttgacactcaaagggtag

SEQ ID NO: 227888 - DNA, 1398 bp, Artificial Sequence
  derived and/or modified sequence
atgcccgccacccccagcctgaaggtggtgcacgagctgcccgcctgtaccctgtgtgccgggcccctggaagacgcggttacaatcccgtgtggccacacattttgcaggctgtgcctgccagccttgtcacagatgggggcccagtcttcagggaagattttgctgtgtccactttgccaggaagaggaacaggcagaaacgcctatggcacccgttccgctcgggccgcttggggagacatactgtgaagagcatggagagaaaatatattttttttgcgagaacgatgctgagtttctgtgtgtgttctgcagagagggccctacgcatcaagcacacactgtcggcttcctcgatgaagcaattcagccttatcgcgaccgactccgttctagactcgaggctctgtccaccgagcgagatgagattgaagacgttaagtgtcaagaagatcaaaaacttcaggtgttgttgacccaaattgagagcaaaaagcaccaggttgagactgcctttgaacggctgcagcaggaactggagcagcagcgctgtctcctactggctagactgagggaactcgagcaacagatttggaaggagcgagacgaatacataactaaggtcagcgaagaggtgaccagactgggggctcaagtgaaggaactagaggaaaagtgtcagcagcctgcctccgaactgttgcaggatgtgcgggtgaaccagtcccggtgcgaaatgaaaacttttgtctcacccgaggctatcagccccgatctggtgaaaaagattcgggatttccatcgcaagatccttactctacccgagatgatgagaatgttttcagaaaacttagcccaccatctcgagatcgactcaggagtcatcactctggacccccagaccgcctcgcggtcactagtgttgtccgaagataggaagtcagttaggtatacccgacagaaaaagagcttgcctgactccccgctgaggtttgatggattgcctgcagtcctgggcttccctggcttctcctctggtagacacaggtggcaagtcgatctgcagttgggtgatgggggagggtgtacggtgggagtggcaggtgaaggagtacgcagaaaaggtgaaatgggcctctcagctgaagacggagtctgggcagttataatttctcaccagcagtgctgggcctcaacctccccaggcactgatcttcctcttagcgagatcccccgcggggtgcgcgtagcgctggactatgaggcaggccaggtcactttgcacaatgctcagacccaggagcccatattcactttcactgccagcttctctgggaaggtgttccctttctttgctgtatggaagaaggggtcatgcctgactctaaaggggtag

SEQ ID NO: 227889 - DNA, 1398 bp, Artificial Sequence
  derived and/or modified sequence
atgcccgccacccccagcctgaaggtggtgcacgagctgcccgcctgtaccctgtgcgccggcccattagaggatgcggtcaccatcccatgcgggcacacattctgcagactttgtctaccggccctctctcagatgggcgcccagtcgagcgggaagattctcctgtgtccactgtgccaagaggaagagcaggctgaaacaccaatggcacctgttccacttggtcccctcggtgagacctactgcgaggaacacggagaaaaaatatatttcttctgtgagaatgatgctgagttcctgtgcgtcttctgcagagaagggccaacccaccaggcccatacagttggatttctcgatgaggcaattcagccctacagggatcgcctgcggtctcgcctcgaagctctcagtacagagcgcgatgaaattgaggatgtgaagtgccaagaagaccaaaaactacaggtgctcctgactcagatagagagcaagaaacaccaggtggagacggcattcgaaaggctccagcaggagttggaacagcaacgctgtttgctactggcgcggctacgagaactagagcaacaaatctggaaggaaagagacgaatacatcaccaaagtgagtgaagaggtgactcgactgggtgctcaagtgaaagaactggaggaaaaatgccaacaaccagcatccgaactcctgcaggacgttagagtgaatcagtcacggtgcgagatgaagacatttgtgtcacccgaagcaatctccccggacctggtgaaaaagattagggatttccatcgaaaaatcttaacacttccggagatgatgagaatgttctctgagaacttagctcaccacctcgaaatcgactctggagtcatcaccctggatccccagaccgcgagccgctctctcgtactctccgaagatagaaagtctgtgcgatacaccagacaaaaaaaaaatctccctgactctcctctgaggttcgacggcctccccgccgtccttggttttccgggcttctcctccggcaggcacaggtggcaggtggaccttcagctgggcgacgggggtggctgcacagtgggtgttgcaggggagggagtccgcagaaagggcgaaatgggtttgagcgccgaagacggcgtatgggccgtgattatatcacaccagcaatgctgggcctctacctcccccgggacggatctgccattgtctgaaatacccaggggcgtcagagtcgccttagattatgaagctggtcaggttacactgcacaatgcccaaactcaagaaccgatttttacttttacggcctctttcagtggtaaagtctttccttttttcgcggtgtggaagaagggaagttgcctcacactaaagggctag

SEQ ID NO: 227890 - DNA, 1398 bp, Artificial Sequence
  derived and/or modified sequence
atgcccgccacccccagcctgaaggtggtgcacgagctgcccgcctgtacgctttgtgcgggaccactggaggacgcagtgactatcccgtgtggacacactttctgtagattgtgtctgcccgcactttcacagatgggggcccagtctagtggaaaaattctgctttgcccactgtgccaggaggaagaacaggctgagacacccatggcacctgtgcctttgggccccttgggcgaaacatactgcgaagaacacggtgaaaagatctacttcttctgtgagaacgacgctgagttcctgtgcgtgttctgcagagagggcccaactcaccaggcccacaccgttggctttctggacgaggccatccagccatatcgcgaccgactcagatcccggctcgaagcactcagtactgagcgggacgaaatagaggacgtgaaatgtcaggaggaccaaaagctgcaagttttactgacacagatcgagtcaaagaagcaccaagttgagacagccttcgagcggctccagcaggagcttgagcagcagagatgtttacttctcgcccgtcttcgcgagcttgagcagcagatctggaaagagagagacgaatatattacaaaggtatctgaggaggttactaggttgggagctcaggtgaaagagctcgaggaaaagtgccagcagcccgcctcagaactcctgcaggacgtgcgcgttaaccagtccaggtgcgagatgaaaacgttcgtcagcccagaagcgatttcccctgaccttgtaaaaaagatacgcgacttccatcggaagatcttaacgctcccagagatgatgaggatgtttagtgagaatttggctcaccacctggaaatcgatagcggggtcatcactttggacccacagacggcatccagatctctcgtgctcagtgaagaccggaagtccgttcgctacacgcgccagaagaagaatctgcccgactctccccttcggtttgatggactcccagccgtcctgggattccccgggttctcttccggtcgacaccggtggcaagtagatctacagctgggtgatggtggcggatgtactgtgggggtggccggagagggggtgcgccgtaaaggagaaatgggcctttccgccgaggacggcgtttgggccgttattattagccatcagcagtgttgggccagtacaagccctgggacagatctgccactgagcgagattccccgaggcgtccgcgtggcgctcgattatgaagcaggacaggtcacgttgcacaacgcccagactcaagagcctatcttcacctttacagcgtcgttctcaggtaaagtctttccgtttttcgccgtgtggaaaaagggttcctgccttactctcaaagggtag

SEQ ID NO: 227891 - DNA, 1398 bp, Artificial Sequence
  derived and/or modified sequence
atgcccgccacccccagcctgaaggtggtgcacgagctgcccgcctgcaccctttgtgccggccccctcgaagacgcagtcacaattccctgcggacatacattctgtcggttatgtctgcccgccttgagtcagatgggcgctcagtcttccggcaaaatcctgctatgtcctctctgtcaggaagaggaacaggcggaaactcccatggcgcccgttcccctcgggccccttggagaaacttactgtgaagaacacggcgagaagatttacttcttttgtgagaacgatgccgaatttctctgtgtcttctgtagagagggtccaacacaccaagctcatacagtgggattcctggacgaagctatacagccctatagagataggctgagatctaggcttgaagccctgagtactgagagagatgagattgaagacgttaagtgccaggaagaccagaaactgcaagtactcctgacacaaatcgaatctaagaaacatcaggtagaaacagccttcgagcgactgcaacaggaactcgagcagcaacgctgtctactgctggctcgcctgcgggagttagagcagcagatctggaaggaacgcgatgaatacatcaccaaagtgtctgaagaggtaacgcgcctgggcgctcaggttaaggagttggaagagaaatgtcaacagcccgcctccgagctgctccaggacgtgcgggtgaaccaaagccgatgcgaaatgaagacatttgtctcccccgaagcaattagtccagatctggtgaagaaaatcagggactttcatagaaaaatcctgaccttaccggagatgatgcgtatgttttcggaaaaccttgctcaccatttggagatcgacagtggcgtgatcaccctggacccccagacggcaagccgctctctggtgctaagtgaagatcgtaaaagcgtaagatatactcgtcagaagaagagccttcccgatagtcccctccggttcgacggtctgcctgctgtcctcggtttccccgggttcagctccggacggcatagatggcaggtggacctgcagctgggtgatgggggggggtgcaccgtgggcgtcgccggcgagggcgtgagacgcaagggtgaaatgggactgagcgcagaagatggggtttgggccgtaataatcagtcatcagcagtgctgggcctccacttccccaggcacagatctcccactaagcgaaatcccaaggggtgtccgagtcgccctcgactacgaggccggacaggtaaccctgcacaacgcccaaacacaggagccaatcttcaccttcacggccagtttttctgggaaagtattcccattctttgccgtctggaaaaagggctcatgcttgacactgaaggggtag

SEQ ID NO: 227892 - DNA, 1191 bp, Artificial Sequence
  derived and/or modified sequence
atggcccccgtgcccctgggccccctgggcgagacctactgcgaggaacatggcgaaaagatatacttcttttgcgaaaacgatgcggaatttctgtgcgtgttttgcagagaaggccctacacaccaagcccacactgtggggttcctcgacgaagctatccaaccctatagggatagactgagatcccgtctggaggccctgagcaccgagagagatgagatagaagacgtcaaatgccaggaggatcagaaacttcaagtgctccttacccagattgagtcaaagaagcatcaagtggagactgctttcgagcggctgcagcaggagctggagcagcagcgctgcctcctattggctaggttacgggagctggagcaacagatttggaaagagagagatgagtatattaccaaggtaagcgaggaggttactaggctaggggcccaagtaaaggagctcgaggagaaatgtcagcagccagcttctgagctgctgcaagtgattagagagggacttcatgggtgcgagatgaaaaccttcgtgtcgcccgaggcaataagtcctgatctagtcaagaaaattcgagacttccaccgcaagattctaacactgcccgagatgatgcgcatgttctcagagaatctggcccaccacctggagattgactccggagtcattacccttgaccctcagactgcctcgcgcagcctggtgttgtcggaggatcgaaagagtgtgcgatatacacggcagaaaaagaatttgcctgattccccactccggtttgatggtctgccagcagtgcttgggttccccggcttttcctctggtagacaccgatggcaggtggacctgcagctgggtgacggcggcggctgcactgtgggcgtagcaggcgagggcgtgaggagaaagggcgagatggggctgagcgccgaggacggggtgtgggctgtgatcatcagtcaccaacagtgctgggcaagcacctctcctgggaccgatttacctttgagtgagatccctcggggagttcgtgttgccctggattatgaggctggccaggtcacactacataatgctcaaacacaggagccaatattcacattcacagcatccttttccggcaaggtgtttcctttctttgcggtctggaaaaaaggcagttgcctcactctgaaaggctag

SEQ ID NO: 227893 - DNA, 1191 bp, Artificial Sequence
  derived and/or modified sequence
atggcccccgtgcccctgggccccctgggcgagacctactgcgaggaacatggagaaaaaatatatttcttttgcgaaaatgatgccgagttcctgtgcgttttttgtcgcgaagggccaacacatcaggctcacactgtcggatttctggacgaagccattcagccctatagagataggctcagaagccgcctggaggctctctctaccgagagggacgaaattgaggatgtgaaatgtcaagaggatcagaaactgcaggtcctgttgacacagatcgagagcaagaagcaccaggtggagacagcctttgagcgcctccagcaggaattggaacaacaacggtgtctcctgttggctaggttacgagaacttgaacaacagatctggaaagagagagacgaatatatcactaaggtgtcagaggaagtgacacgtttaggtgcccaggtgaaagaactggaagaaaaatgtcaacagcccgcgtcagagctgctccaagtcattagggagggcctgcatggatgcgaaatgaaaacctttgtttctcccgaagctatttctccggatttagttaagaagatccgggatttccaccggaaaatacttaccctcccagaaatgatgcggatgttctctgagaatctggctcatcacctggaaatcgactcaggggtgatcaccctggacccccaaactgctagccggtccctggtgctgtccgaggaccggaagtctgttcgctacacgagacagaaaaagtctctgcctgattcacccctgaggtttgacggtctgccagccgtgctggggtttccagggttttcttcaggccggcataggtggcaggtggatcttcaactgggggacgggggggggtgcacggttggtgtcgccggcgagggagtccgcagaaagggcgaaatgggcctgtccgctgaggacggagtgtgggccgtaataataagccatcagcaatgttgggcgtcaacctcccccgggacggacctccccctttctgagattcctcggggcgtcagagtagccttggattatgaggcaggccaggtgactttgcataatgcccagactcaggagcctatttttaccttcacggcttccttcagtggaaaagtgtttccctttttcgccgtctggaagaagggctcctgtcttactcttaagggatag

SEQ ID NO: 227894 - DNA, 1191 bp, Artificial Sequence
  derived and/or modified sequence
atggcccccgtgcccctgggccccctgggcgagacctactgcgaggaacacggagagaaaatctacttcttctgcgagaacgacgcggagttcctgtgcgtgttctgcagggagggccccacccaccaagcccacactgtcggtttcctggatgaagcgatccagccctatcgcgataggctgaggtctagactggaggccctgagcaccgagcgcgacgagatcgaggacgtgaaatgccaggaagaccagaaactgcaggtgctcctgacacagattgaaagcaaaaagcaccaggtagagactgcatttgaacgactgcagcaggaattagagcagcagcgctgcctgctcctagccaggctaagagaactcgagcagcaaatttggaaagaaagggatgagtacatcacgaaagtgtccgaagaagtcacccggctcggcgcccaagtcaaggaacttgaggagaaatgtcagcagcccgcaagtgaactactccaggtcattcgggaagggctgcacggatgtgaaatgaagaccttcgtgagccccgaggccatatctcccgacctggtcaagaaaatccgcgacttccaccgcaagatacttactttgccagaaatgatgcgaatgtttagcgaaaacctcgcccatcacttagagattgacagtggcgtcatcactctagacccgcagaccgctagcaggagtttggtactctccgaagaccgcaagtccgtgcggtatacaagacagaagaaatctctgcccgactcaccgctaagattcgacggcttgcccgccgtgctaggtttcccagggttttcgtccggccgccatcggtggcaagtggatctgcaactcggagacggtggcggctgtaccgtgggcgtagccggagagggagttagacggaaaggtgaaatggggctcagcgcagaggatggtgtgtgggctgtcatcataagtcaccagcagtgttgggccagcacatcccctggcacggatttgccccttagcgagattccgagaggtgtgcgggttgcccttgattacgaggctggacaagtgactcttcacaacgcccagacccaggagcccatcttcaccttcaccgcatctttttccgggaaggtctttccattctttgctgtgtggaagaagggttcttgcctcactctcaaaggttag

SEQ ID NO: 227895 - DNA, 1191 bp, Artificial Sequence
  derived and/or modified sequence
atggcccccgtgcccctgggccccctgggcgagacctactgcgaggaacacggagagaagatttactttttttgcgagaatgatgcggagttcttatgcgtgttctgtagagaagggccgacacaccaggcccatacagttggattcctagacgaagccatccaaccttacagagacagactgcgtagtcgactagaagcactgagcacagaacgtgatgagatagaagacgtgaaatgccaggaggaccaaaagttacaggtgctcctgacccagatcgagagcaagaaacaccaggtggagaccgcctttgaacggctacagcaggagctcgaacagcagcggtgcctgctgctggcacgcctgagagagctggaacagcagatctggaaggaacgagacgaatacatcacaaaagtttccgaagaagtaactagacttggcgctcaggtgaaagagctcgaggaaaagtgccagcaaccagccagcgagctgctccaggttattcgggaaggattacacggctgcgagatgaagactttcgtaagtcctgaagcaatctccccagatctggtcaagaagatccgggacttccatagaaaaatcctgacactgcccgaaatgatgcgcatgttttcggagaatctggcccaccacctcgagattgattctggggtgataaccctggatcctcagactgcctctagatccctagtcttgtccgaggatcggaagtctgttcgctatacgagacagaagaagagcttgccagatagtcctttaagattcgacggtctcccagccgtgctcggctttccgggcttttctagcggcaggcatcgttggcaggtggatcttcagttgggcgacgggggcggctgcactgtgggagtggccggcgaaggcgtgaggagaaaaggtgaaatggggctgtctgcggaggacggcgtgtgggctgtgatcatcagccatcagcagtgttgggcttcaacaagcccaggaaccgatctaccgcttagtgaaattccgagaggcgttcgtgtggctctggattacgaggccggccaggtcacgctgcataatgcccagacgcaagagcccatttttactttcaccgctagcttcagtggaaaggtttttccattctttgccgtgtggaagaaggggtcttgcctgaccttgaagggttag

SEQ ID NO: 227896 - DNA, 1191 bp, Artificial Sequence
  derived and/or modified sequence
atggcccccgtgcccctgggccccctgggcgagacctactgcgaggagcatggcgaaaagatatattttttctgcgagaatgatgccgaattcctctgtgtgttctgtagggagggaccaacgcatcaggctcacacggtcggctttctcgacgaagcaatacagccttatagagaccggctgagaagcaggctggaggcattgtccactgagagagacgaaattgaggacgtaaaatgtcaggaagaccagaagcttcaagtccttttgacgcagatcgaatcaaagaagcaccaggttgaaacggcctttgaacgactccagcaggagttagaacagcagaggtgcctgttgctcgcacggctccgagagctggagcagcaaatctggaaagaacgggatgaatatattacaaaagtaagtgaggaagtcacacggttaggggcccaggtgaaagaattggaagaaaaatgtcagcagccagcctccgaactgcttcaagtgatacgggaaggtctgcacggctgtgaaatgaagacctttgtaagccccgaggccatctcccccgatctggtgaaaaagatacgagactttcacagaaaaatcctgacacttcctgagatgatgaggatgttctcagaaaatctggcccatcatctggaaatcgattctggtgtgattacgctcgacccacagacagcctcacggtctttggtgttaagtgaagatcgaaagtctgtgaggtacacgcgccagaagaagaacttaccggactctccccttcgcttcgacggcctgcccgcggttctcggcttccctgggttttctagtgggcggcaccgctggcaggtagacttgcaactaggagatggggggggatgtacagtaggggtggcaggagaaggtgtgagaaggaagggagagatgggcctcagtgcagaggatggggtctgggccgtgataatatcacaccagcagtgctgggcctctactagtcccggtacagatctgcccctttccgagatacccaggggggtgcgcgtcgccttggactatgaagctgggcaagtgactttacataatgctcaaacccaggaacccatattcacattcaccgcgagcttttcaggtaaagttttcccattcttcgcagtgtggaaaaaggggagctgtctcaccctgaaaggctag

SEQ ID NO: 227897 - DNA, 1191 bp, Artificial Sequence
  derived and/or modified sequence
atggcccccgtgcccctgggccccctgggcgagacctactgcgaggaacatggggagaaaatctacttcttttgcgagaatgatgccgagtttctgtgtgtgttttgccgggaaggaccaactcatcaggcgcacacagtgggattcttggacgaggcaatccagccatatcgcgaccggctcaggtcccgcctggaggcattgagcacggagcgcgatgagattgaagacgttaagtgccaggaagaccagaagcttcaggttctgctcacacagattgagtctaaaaaacaccaggtggaaaccgcctttgagagacttcaacaggagctggagcagcagcgctgtctcctgttggcgagactgcgggaacttgaacagcagatctggaaagagagagacgagtatattaccaaggtgtcggaggaagtcacgcggctgggcgcacaagtaaaggaactggaggagaagtgtcagcagcccgctagcgagctactgcaggttatcagggaaggcctccacggttgcgagatgaagactttcgtgagtccagaagctatttcccctgatctggtaaaaaagatacgcgatttccaccgtaaaatcctgaccctgccggagatgatgcgaatgttctcagagaatttggctcaccacctcgagatagattccggcgtgatcaccctggatcctcagactgcgagtagaagtctggtgctgtccgaagatcgcaaaagcgtccgatataccagacaaaagaagtcccttcctgatagccctttacgcttcgatgggctacccgccgtgctcggtttccctggattttccagtggcagacaccggtggcaggtggacctgcagttgggagatggtggagggtgtacagttggtgtggccggtgagggagtgaggaggaagggagagatgggtttgtctgccgaggatggcgtgtgggccgtcattatttctcatcagcagtgctgggcgtctacatccccaggcaccgatttaccactctctgagatacccaggggtgtccgcgtagccctggactacgaggctggccaggtgactctgcataatgcgcagacacaagagccaatatttactttcaccgcctcttttagcggtaaagtctttccgttcttcgccgtttggaaaaagggctcttgtttaacactgaaggggtag

SEQ ID NO: 227898 - DNA, 1191 bp, Artificial Sequence
  derived and/or modified sequence
atggcccccgtgcccctgggccccctgggcgagacctactgcgaggagcacggcgaaaagatttactttttttgtgagaatgacgccgagtttctctgtgtgttctgcagggaagggcccacgcaccaggcacacaccgtcgggtttttggacgaggctattcagccgtatagggataggctaagaagtcggcttgaggctctgtctactgagagagacgaaatagaagacgttaaatgtcaggaggaccaaaagctgcaagtgctgctcacgcagattgagtcaaaaaagcaccaggtggaaactgcctttgaacgcctgcagcaagaactcgaacagcagagatgtctgctgctcgccagactgagagagcttgagcagcagatctggaaggagcgcgatgagtacattacgaaagtgtctgaggaggtaactaggctcggagcccaagtcaaagaactagaggagaagtgccagcaacccgcatctgaactgttacaggttatcagggaggggttacatggttgcgaaatgaagacatttgtctccccggaagccatatctccagatctcgtgaagaagattagagattttcaccgcaagattctgacattgcctgagatgatgagaatgtttagcgaaaatttggcacaccacctggagatagattccggcgtcatcaccctcgacccgcaaactgcctccagatccttagtgttaagcgaggatcgcaagtccgtgagatacaccagacagaagaagtcattaccagacagcccgcttaggtttgatgggctccctgcggtactcggcttccctggtttttcctcggggcggcacaggtggcaggtggatctgcaacttggggatggaggaggctgcacggtcggggtggcgggcgaaggggtgagaagaaaaggagagatgggtctgtctgccgaggatggcgtgtgggccgttataatttcacatcagcagtgttgggcaagcacatccccaggaaccgaccttcccttaagtgaaatcccacgtggagttagggtggcgctcgactacgaggccggccaggtgacgctacacaacgcgcagacacaagaacctatttttacgttcaccgcctcattttctggtaaagtgttcccattttttgccgtttggaagaagggtagctgcctgaccctcaaaggatag

SEQ ID NO: 227899 - DNA, 1398 bp, Artificial Sequence
  derived and/or modified sequence
atgcctgccactccatctctcaaggtggttcacgagctgccagcctgcacactgtgcgccggacctctcgaagatgccgtcaccatcccctgcggtcatacattctgtcggctatgtttgcccgctttgtctcagatgggcgctcagtcttccgggaagatccttctgtgtcctttatgtcaggaggaggaacaagcggagacacccatggcacctgttcctcttggcccacttggcgagacgtattgcgaagaacacggcgagaagatctacttcttttgtgaaaatgacgccgagttcctttgcgttttctgcagagaggggccaactcatcaagctcataccgttggattcttggatgaggccatccagccgtatagggataggctgcggagccgcctcgaagcgctaagtaccgagcgcgatgaaatcgaagatgtcaagtgccaggaagatcagaaactgcaggtgctgttgacccaaatagagtccaagaagcaccaggtggaaacggctttcgagagactacagcaggagttagaacagcagcgttgcctactgttggctcggctcagggagttagagcagcaaatttggaaggagcgagacgagtatattactaaagtgtcagaggaggtcacgagacttggggcacaggtgaaagagttggaagagaagtgccaacagccagcgtctgaactgcttcaggacgttagagtgaatcagtcaaggtgtgaaatgaagaccttcgtttcccctgaagcaatcagccccgatctggtgaagaagatacgggattttcaccgtaaaattttgacattgcctgaaatgatgaggatgttttccgagaatctcgcacaccatctcgaaatcgacagtggcgtcattaccttagatccgcagacagctagccggtctcttgtgctgtctgaagatcgcaagtctgtacgctacactaggcagaagaagtctttgccggatagccccctgcgttttgatgggctaccagccgttttgggtttcccaggattctcctcaggcaggcataggtggcaggtggatctgcagttgggcgacggcggaggctgcactgttggcgtggctggggaaggtgtgcgcaggaaaggtgaaatgggacttagtgcggaggatggtgtctgggccgtgattatcagtcaccagcagtgctgggcatcaacatccccagggaccgatttgcccctgtcagagatccctcggggagtgagggttgcccttgactacgaagcgggtcaggtgacattacataatgcccaaacacaggagcccatttttacatttacagcctccttcagcgggaaggtgttccctttctttgctgtgtggaaaaaagggtcctgcctcactctgaagggatag

SEQ ID NO: 227900 - DNA, 1398 bp, Artificial Sequence
  derived and/or modified sequence
atgcctgcaaccccatcccttaaggttgtgcatgaactgcccgcatgtacactttgcgcaggcccactagaggacgcagttacaataccttgcgggcacactttctgccggctgtgcctgcctgctcttagccagatgggggctcaaagttcgggtaagatcctgctgtgcccactgtgtcaggaagaggaacaggccgagacaccaatggcccctgtcccattggggcctctgggagagacgtattgtgaagagcatggagaaaagatttactttttttgcgagaacgacgcggagtttctctgcgttttctgtagggaagggccaactcatcaggcccacaccgtcggattcttggacgaagccatccaaccgtatcgtgacaggctgcgcagtcggttggaggcgctctctactgaaagggacgaaatagaggacgttaagtgccaagaagaccagaaactgcaggtgctcctgactcagatcgagtctaagaaacatcaggtggagactgctttcgagagactgcagcaggagctcgagcagcagcggtgcctactgttagcccgacttagagaattggaacaacaaatctggaaggaacgggacgaatacattactaaggtgtccgaagaagtcacacgactcggggctcaggtaaaagaattggaggaaaagtgtcagcagccagctagcgagttgctgcaggacgtgagagtcaaccaatcacgttgcgagatgaagaccttcgttagtccagaggctatctctcctgatttggtgaaaaagatccgggattttcatcgaaaaatcctgacgttacctgaaatgatgcgaatgttctccgaaaatctggcacaccacttagaaatagattcgggcgtgattactctagatcctcagactgcaagccggtcgctcgtgctgtctgaggaccggaagagtgttaggtataccaggcagaagaaaagcctgcccgactcaccgctccggttcgatggcctcccagcggttctggggttcccgggtttctcgtccggccgtcataggtggcaggtagatctccagctgggggatggcggtggatgtactgtgggggtagccggtgagggagtccggagaaagggagagatggggcttagcgcagaggacggtgtgtgggctgtgatcatttctcatcagcagtgttgggccagtacttccccaggcaccgaccttccgctgtcagaaatacctagaggagtgagagtggcccttgattatgaagctggacaggttaccctccacaatgctcagactcaagaacccatttttacctttaccgctagcttcagcggcaaggtcttccccttttttgccgtgtggaagaaggggtcctgtctgacgctcaaaggatag

SEQ ID NO: 227901 - DNA, 1191 bp, Artificial Sequence
  derived and/or modified sequence
atggctcccgtacctctaggccctctgggggagacttactgcgaagagcacggggagaaaatttattttttttgtgagaacgacgctgagttcctgtgcgtcttctgcagagagggacccactcatcaggcacacacagtcggttttttggatgaagccatccagccctaccgggacaggttacggtcccggctggaggccttaagcactgagcgcgacgagatcgaggacgtcaagtgtcaggaagatcaaaaactccaggtgctgttaacacagattgagtcaaagaagcaccaagtggagaccgctttcgagcggctccagcaagaactggagcagcagcgctgcctgctgcttgctaggctgcgggaactagagcagcagatttggaaagagcgtgacgaatacattacaaaggtcagcgaggaagtgactagactgggagcacaggtgaaagagttggaggagaagtgccagcagcccgctagtgaactgctccaggtcattcgtgagggccttcacggttgtgaaatgaaaacgtttgtgagtccggaggccattagcccggacctggtgaaaaaaatccgcgattttcatagaaaaattctaactctgcctgagatgatgcggatgttttccgagaatttagctcaccacctcgagattgactctggtgtgataactctagaccctcagacggcaagtcgctccctcgtgctgagtgaggaccgcaagtcggtccgctatacacggcagaagaagagcctccctgattcacccctgagattcgacggcttgcccgctgttctgggattccctggcttctcaagcggcaggcacaggtggcaggtcgatctgcagctgggagacgggggtggatgtactgtaggcgtggccggtgagggggttagaaggaagggcgagatgggcctgtccgcggaagacggagtttgggcggtgataatcagccaccagcaatgttgggcatctacgagtcctggtaccgatctcccgttgtctgaaatccctcggggagtcagggtggccctagattacgaggctggccaggtgaccctgcacaatgcccagacgcaggagcctatctttacgttcaccgccagcttcagtggcaaggtattcccattcttcgccgtctggaagaaggggtcatgtctgacactgaaaggctag

SEQ ID NO: 227902 - DNA, 1398 bp, Artificial Sequence
  derived and/or modified sequence
atgccggctactccaagtctaaaggttgtgcacgagttgccagcatgcacactgtgcgccggacccctagaggacgcagtcacaattccctgcggacacacattttgccgcctttgcctgcctgctttgagccagatgggggctcagtctagcggaaagatcctcttgtgtccactgtgccaggaggaagaacaggccgagacaccgatggcacccgtgcctcttggccctctgggcgaaacctattgcgaggaacacggggagaaaatatattttttctgcgagaacgacgctgaattcctgtgcgtgttttgtagggaggggcctacccaccaagctcatacagttggattcctcgacgaagcaatccagccctatcgagaccgcctgcgctccaggctcgaagctttatccacagagcgagacgaaatcgaggatgtcaaatgccaagaggatcagaaactgcaggtgctcctgactcaaattgagagtaagaagcatcaggtcgagacagccttcgaacggctccagcaagaacttgaacaacagagatgcctgctgctcgcacgcctgcgggagttggaacagcagatctggaaggagcgggatgaatatatcaccaaggtatccgaagaagtgacaaggctgggtgctcaggtgaaagagctggaggagaagtgccagcagcccgctagcgagcttctccaggatgtgagggtgaaccagagccggtgtgaaatgaaaacattcgttagccctgaggccatctctccagacttagtgaaaaaaatccgcgactttcatcgtaaaatcctgaccctgcctgaaatgatgagaatgttctcggaaaacctggcccaccacttggagattgactccggtgtgatcactttggacccacagaccgcgtctcgaagtcttgtgctgtccgaggataggaaatccgtgagatacactcgccagaaaaaatcattacctgacagccctctgcgattcgatggcctgccggctgttctcgggttccccggattctccagcggaagacaccggtggcaggtggatcttcaactcggggatggcggaggctgcaccgtgggcgtggcaggcgagggcgtgcgaaggaaaggggaaatgggactttccgccgaggacggagtgtgggctgtgattatctctcaccagcagtgttgggccagcacatctccgggaactgatctgccactttcagaaatccccaggggtgttagggtcgccctggattatgaagctggacaggtgaccctgcacaatgcccagacacaggaacccatctttaccttcaccgcctcattctccggcaaggtcttcccttttttcgccgtgtggaagaagggaagttgtctaaccttaaaaggctag

SEQ ID NO: 227903 - DNA, 1398 bp, Artificial Sequence
  derived and/or modified sequence
atgcctgccacacctagcctcaaagtggtgcacgaactccctgcatgcactctttgtgccggaccactggaggacgcggtgaccatcccgtgtggccacaccttctgtcgactctgccttccagcactttcccagatgggagctcagtcatccggcaagatcttactgtgtcccctatgccaagaagaggagcaggctgaaacccccatggcaccagtgcctctgggtcccctcggcgagacctactgcgaggaacatggagaaaagatctacttcttttgtgagaatgacgcggagttcctgtgcgtgttttgtagggagggtccgacacaccaggctcataccgtggggtttttagatgaggcaattcagccataccgtgaccggcttcggtctaggctcgaggccttatccacagagagagatgagattgaagacgtgaagtgccaagaagaccaaaaacttcaggtgctgcttactcagattgaatccaaaaaacatcaggtagagaccgctttcgaacgcttacagcaggaactcgagcagcagcggtgcctgctgctagctcgcctgagagaacttgaacagcaaatctggaaggagcgggacgagtacatcacaaaagtctccgaggaggtcaccagactcggagcccaggttaaggaattagaggagaaatgccaacaaccagccagtgagctgctccaggatgtcagggtgaaccaatctcgttgcgagatgaaaacctttgtatccccggaggctatcagccctgacctggtgaagaaaatccgggattttcaccgcaagattcttacactgccagagatgatgcgcatgttttccgagaatttggctcatcacctggagatcgatagtggcgtgatcactctggatccccagaccgctagtaggagccttgtgctctccgaagacaggaaaagcgtaagatacacgaggcagaagaagagcttacctgacagccccctgcgctttgatgggctgccggcagtactgggcttcccaggattttcaagcggtaggcaccgctggcaagtcgacctgcagctgggtgacgggggtgggtgtaccgtcggggtcgcaggcgagggagtgcgaaggaagggggagatgggcctgagcgccgaggacggcgtttgggctgtgatcatcagtcaccagcagtgctgggcgagtacttcgcccggtaccgatctgccactgtccgagattccaagaggtgttcgcgtggcattggattacgaggcaggccaggttacattacataatgcccaaacacaggagccaatcttcacttttactgcctctttctctggtaaagtgttcccgttctttgcagtctggaagaagggaagctgtttaactctgaagggatag

SEQ ID NO: 227904 - DNA, 1398 bp, Artificial Sequence
  derived and/or modified sequence
atgcccgctaccccttcgctgaaagtagtgcatgaactccctgcttgtaccctttgtgctggcccactggaagacgctgtgaccatcccatgtggccacacattctgtagactctgtttgcccgctctcagccagatgggggcacagagtagtggaaaaatcctgctgtgccctctgtgtcaagaagaagaacaagccgaaaccccgatggccccagtgccacttggcccactgggagagacttattgcgaggagcacggggagaagatctatttcttctgcgaaaacgacgcagaattcctttgtgtattttgcagggagggccctacacaccaggcacatacagtggggttcctcgacgaggctatccagccatacagagatcggttgagaagccgcctggaagccctgtcaacagagcgggacgaaatagaagatgtgaaatgccaggaggaccaaaagctgcaggtgcttctcacacagattgaatccaagaaacaccaggtcgagacagctttcgagaggctacagcaggagctcgagcagcagaggtgcctcttgttggctcgactgcgagagctcgagcagcagatctggaaagaaagagacgagtatattacaaaggtgagcgaggaggtgacaaggttgggagcccaggtgaaagaactggaagagaagtgccagcagcccgctagtgagctgctgcaagatgtgcgcgttaaccagtctagatgcgaaatgaaaaccttcgtgtcgcccgaggcaatatcccccgacctggtgaaaaagatccgggactttcatagaaaaatcctgacgctgcctgaaatgatgagaatgttttcagagaacctggcacatcaccttgagatcgattctggcgtcatcacgctggaccctcagacagcatctcggtcacttgtgttatcagaggataggaagtccgtgcgttacacccggcaaaaaaaaagcttacccgactctcctctaaggttcgacggattaccagcagtgctgggctttcctggctttagctctggacgacacagatggcaagtcgatttacagttgggcgacggaggtgggtgcaccgtaggggtagctggcgagggtgttcggcgaaagggcgaaatgggactcagtgccgaggatggcgtgtgggcagttatcattagccaccaacagtgttgggcctcaacttccccgggtactgatctccccctgagtgagattcctcggggtgttagagtcgccctggactatgaagcgggacaggttactctccataatgctcaaacacaggagcctatttttacattcactgcaagcttctctgggaaggtgttcccgtttttcgccgtctggaaaaagggaagctgtctgaccctgaagggctag

SEQ ID NO: 227905 - DNA, 1398 bp, Artificial Sequence
  derived and/or modified sequence
atgccggctactcccagtctgaaggtggtccacgagttacccgcttgcacactgtgcgccggaccactggaagatgctgtgactataccctgtggacatacgttttgtagattgtgcctgcccgcacttagccagatgggagcccagagctccgggaagatcctgctgtgtcccttgtgccaggaagaggagcaggctgaaacacccatggctccagtgccccttgggccactgggtgagacgtattgcgaggagcatggggaaaagatctactttttttgcgagaacgatgcagagtttctctgtgttttttgcagagaaggacccacacaccaggctcatacagtgggtttcctggacgaggctattcaaccgtaccgagaccgtttgcgttcacggctggaggcactaagcacagagagggacgaaatcgaggatgtgaaatgccaggaggatcagaagctccaggtgttgctgactcagattgaatccaaaaaacatcaggtggaaacagcctttgagcgtctgcagcaagagctggaacagcagcgttgcctcttactcgctaggctgagggagcttgagcaacagatctggaaggagcgggatgaatatataacaaaagtgagcgaggaggtgacccgcctgggcgctcaggtaaaggagcttgaagagaagtgtcaacagccggcatcagaactactgcaggatgtccgtgtcaaccagtcaaggtgcgagatgaaaacctttgtctcgcctgaggccatatcgcccgatttagttaagaaaatcagggattttcatcgcaaaatcctgacgttgcctgaaatgatgagaatgttctccgaaaacctggcccaccacctcgaaatcgattccggcgtcataactctggacccgcagaccgcttcacgtagtctcgttctttcagaggaccgcaaatcggtccggtatacacggcagaagaagaatctgcctgatagcccattacgcttcgatggtcttcccgctgtgctaggctttcctggattctcatcaggccgtcatcgctggcaagtggatctgcagctgggcgatggcggaggatgtactgttggggtggctggcgaaggagtccgacgcaagggcgagatgggcctctcagccgaagacggtgtgtgggctgtaataatatcccatcagcagtgttgggctagtacctctcctggcacagatcttccattaagtgagatcccacgcggtgtgagagtcgcgctggactatgaggcgggacaagttacattacacaacgcacagacccaagaacccatcttcacctttactgcttcattttcagggaaggtgtttcccttcttcgcagtgtggaaaaaggggagctgcctgacactgaaagggtag

SEQ ID NO: 227906 - DNA, 1398 bp, Artificial Sequence
  derived and/or modified sequence
atgccagccactccgagcctcaaggtagtgcatgaactgcccgcttgtacactgtgtgcaggacccctcgaggatgccgtgacaattccttgcggacacaccttctgtcgcctttgcttgccggctttgtctcaaatgggagcccagtctagtggaaagattttgctgtgtccactgtgccaggaggaagaacaggcggagacgccgatggcgcctgtgcctctgggccctcttggcgagacctattgcgaagaacacggggaaaaaatctactttttttgtgagaacgacgcagagtttctttgcgtgttctgcagggagggaccaacacaccaggcacacacagttggctttctagacgaggccatccaaccttatagggacaggttgcgatcacggttagaggcgctgtccaccgaaagggacgaaattgaagacgtgaagtgccaggaagatcagaagctacaggtcttactgacccagatagaatccaaaaagcaccaagtcgagacagcattcgagaggctccagcaggagctggaacagcagcgatgccttctgctcgctaggctaagagagctggagcaacagatttggaaagaacgcgacgagtacattaccaaagtgtccgaggaagttacccgactcggggcacaggtcaaggaactcgaagaaaagtgccagcagcccgcaagcgagctgctgcaagacgtaagagtgaatcaaagtcggtgcgagatgaaaacttttgtaagcccagaagccatctctcccgacttagtgaaaaaaatccgcgactttcacaggaaaatactaactctgccggagatgatgagaatgttttctgagaatctggctcaccatttagaaatcgatagtggggttattactcttgatccgcagacagcgtcacgaagtctggtgctcagcgaagatagaaaatcagtgaggtacaccaggcagaaaaaaaatctccctgattcccccctgcggttcgatgggctcccggctgtcctgggcttccccggattttcctcaggacggcatcgttggcaagtggacctgcagcttggcgatggagggggttgtactgtgggagtcgccggtgagggcgtgagacggaagggagagatgggcttgtctgccgaagacggagtgtgggcagtgataatatcacatcaacagtgctgggcctcaacatcccctgggactgacctgccactatccgagataccacgaggcgtcagggttgctctggattatgaggccggtcaggtgaccctccacaacgcccagacccaggagcctatttttacctttacggccagcttttctgggaaagtttttcccttttttgccgtctggaagaaagggagttgcctcaccctcaaaggctag

SEQ ID NO: 227907 - DNA, 1398 bp, Artificial Sequence
  derived and/or modified sequence
atgcccgcaactccaagtctgaaggtagtgcacgaattaccggcatgtactctgtgtgctggtccattggaggatgcagttacaatcccgtgcggacacactttctgtagactttgcttacctgcactctcccagatgggagcacagagttctggtaagatcctcctgtgcccattgtgtcaggaagaggagcaagctgagaccccaatggccccagttcccctcggaccactcggagagacctattgcgaagagcacggagagaagatatacttcttctgcgagaacgacgccgaatttctgtgtgtattctgtcgggaaggcccaacgcatcaggcgcacactgtggggttcttggatgaggccattcagccgtacagggataggctgagatcaagactggaggcactgagtaccgaacgggatgagatagaagatgttaaatgccaggaagaccagaagttgcaggtcttactcactcagatcgagagtaagaagcaccaagtggaaacagccttcgagaggctccagcaggaactcgagcaacagcggtgcttactcttggctaggctgagggagctggagcagcagatttggaaagagagagatgaatatattactaaggtgtccgaagaggtgacacggcttggggcacaggtgaaggaattggaagagaagtgtcagcaacccgcatccgagctgctgcaagacgtccgggtaaatcaatctcgctgcgagatgaagacctttgtgagtcctgaggctatcagccctgatttagtgaaaaaaatccgagactttcaccggaaaatactcacattgcccgagatgatgcgcatgttctctgaaaaccttgcccatcatctggaaattgattctggggttattacgctagacccacaaacggccagccgaagtttggtgttatccgaagatagaaagagtgtgcgttatacacgccagaaaaaaagtctgcccgactctccattgagattcgacggtctgcccgctgtgctgggctttcctggctttagctctggcaggcaccgatggcaggttgatctgcagctcggggacggtggaggctgcactgtgggggttgctggggagggcgtgcgaaggaaaggcgaaatgggactgtcagccgaggatggggtctgggccgtgataatttctcatcaacagtgttgggctagcacttcaccaggaactgatctgccactgagtgagatcccaaggggcgtaagggttgctcttgattacgaggctggccaggtgaccttacacaacgcacagacacaggaacctatcttcacattcaccgcctctttcagtggaaaggtgttcccattctttgctgtgtggaaaaagggctcttgtctgacattaaagggatag

SEQ ID NO: 227908 - DNA, 1191 bp, Artificial Sequence
  derived and/or modified sequence
atggccccagtccctctggggccactcggagaaacctactgtgaggaacacggcgagaagatctacttcttctgtgagaatgacgctgaatttctgtgcgtcttctgtagagagggaccgacccatcaggcccacactgtcggttttttggatgaagccattcaaccttatagagatcggctgagaagccgactcgaagccctctcaaccgaacgggacgagattgaggatgtgaaatgccaggaggatcagaagttgcaggtgctgctcacccagattgaatctaagaagcaccaggtggagacagccttcgagcgactgcagcaagaactggaacaacaaagatgtctgctgctggcaaggttaagggagttagagcagcagatctggaaagagagagacgaatacataaccaaagttagcgaggaagttacaaggctgggggctcaggtaaaggaactcgaagaaaagtgtcagcaaccggcttctgagctgctgcaggtaatacgcgaaggcttgcacggatgtgaaatgaagacattcgtgagtcctgaggccatcagcccggatctggtaaaaaaaattcgcgactttcacagaaagatcttaacgctcccggaaatgatgcgcatgtttagcgaaaatcttgcccaccacctggagattgacagcggggtgattacccttgacccacagacggcttctaggtccttagttttatctgaggacaggaaatccgtacgatacacaagacagaaaaaaaatttgcccgatagtcccctccggtttgatgggctgccagcagtattgggcttccccggattctcttccggacgacatcggtggcaggtcgacctgcagctgggggacggcggtggctgcactgtcggagtcgccggagagggtgttcggcgaaaaggcgagatggggttgagtgcggaagacggagtgtgggccgtgatcattagtcaccagcagtgctgggccagtacgtcgcccggtaccgacctacctctgtctgaaataccaaggggcgttcgagtggcgctcgattacgaggccggacaggtgacgctgcataacgcccagacccaggaacccatctttacttttactgcctctttttccggcaaagtcttccctttcttcgcagtttggaaaaaaggtagctgtcttaccctgaaaggctag

SEQ ID NO: 227909 - DNA, 1191 bp, Artificial Sequence
  derived and/or modified sequence
atggctcctgtgccccttggccctttgggcgagacctactgcgaagaacatggtgagaaaatttatttcttctgcgagaacgacgccgagtttttatgtgttttctgtcgagaagggcctacgcatcaggcccacaccgtgggattcttggatgaggccatccagccctatcgtgatcggctacgctcccgactcgaggccctgagcaccgaacgggatgaaattgaagacgtaaagtgccaggaggatcaaaagcttcaggtgctgttgacccagattgaatccaagaaacaccaggtggagaccgccttcgaacgattacagcaagagctagaacagcagcggtgcttgcttctcgcccgactgcgggagttagagcaacaaatctggaaagagcgagatgaatatattactaaagtgagtgaggaggttaccaggttgggagctcaggtgaaggagctggaggaaaagtgccagcaacctgcctcggagttgttacaggtgatcagagaaggactccatggctgtgaaatgaaaacctttgtttcaccagaggctatctccccagacctcgtgaagaaaattcgtgatttccatagaaagatactgacactacctgagatgatgcggatgttctcggagaatctagcccaccacctcgaaattgatagtggagtgattacattggatccacagacagcgtcgcggtctttggtcctgtccgaggatcgcaaaagcgtgaggtacactcgccaaaagaagagcctccccgatagtccgcttcggtttgacggactccccgctgtcctgggttttccgggtttttcaagtggaagacatagatggcaggtggacctccagctgggcgacggaggaggatgtacagttggagtagcaggtgaaggagtgcgcagaaaaggggaaatgggactgtccgccgaggacggagtgtgggctgtgatcatttctcaccagcagtgttgggcctccacctctccgggtaccgacctgccactaagtgagatacccagaggggtaagggttgctcttgattacgaggccggacaagtgacactgcataatgcccaaacacaagaacccatttttacatttacagcttctttcagcggtaaggtgttcccgtttttcgccgtgtggaagaagggaagttgtctcactttaaagggctag

SEQ ID NO: 227910 - DNA, 1191 bp, Artificial Sequence
  derived and/or modified sequence
atggcccctgttcccctgggcccacttggcgagacttactgtgaggaacatggtgagaagatctatttcttctgtgagaacgatgccgaattcctgtgtgttttctgccgggagggcccaacccaccaggcacacaccgtgggtttcctggacgaagctatccagccttatcgggacagactcaggagccggctcgaggcactgagtacagagcgcgatgaaatcgaagacgttaagtgtcaggaggaccaaaaacttcaggtacttctcacgcagatcgaaagtaaaaagcatcaggtcgagaccgcatttgagaggttacagcaagagcttgagcagcagagatgtttgctcctggcaagactcagagagctggaacagcagatctggaaagagagagatgagtatatcacaaaagtgtccgaggaggtcaccaggctcggagcccaggtcaaggaactggaggagaagtgccagcagccggcttctgaacttttgcaggtaattcgcgaaggcctgcatggttgtgaaatgaagacattcgtttccccagaggctataagccccgacctggtgaagaaaattagagactttcataggaagatcttgactttacctgagatgatgcgaatgttttccgaaaatcttgctcatcatctggagatcgactccggagtcatcactttggatccacagactgcgtcccgctcacttgtccttagcgaggaccggaaaagcgtgcggtacacaaggcagaaaaaaagtttacccgattcccccctgcgcttcgacggccttccagcagttctgggcttcccaggtttctcatctggtagacatcggtggcaggtggatctgcagttaggagatggcggagggtgcaccgtgggcgtagcaggagagggggtgcggcgtaaaggtgagatgggtctgtccgctgaagatggcgtgtgggctgtaattatttcacaccagcaatgctgggcaagtacatcccctgggacggaccttccactcagtgagattcccaggggtgtgcgagtggcgctggactatgaagctgggcaagtgacactgcacaacgcccaaacacaggagcctatcttcacgtttacagcttccttctctggcaaggtattcccattcttcgcagtctggaaaaaaggctcttgcttaaccttgaaggggtag

SEQ ID NO: 227911 - DNA, 1191 bp, Artificial Sequence
  derived and/or modified sequence
atggcacccgtccccctaggaccactcggtgaaacatactgcgaggaacacggcgaaaaaatatatttcttctgtgagaacgacgccgagttcttgtgcgtcttctgtcgtgagggtccaactcaccaggcacacaccgtgggcttccttgacgaagccatccagccgtatagggaccgattgcgcagccgcctggaggcattatcgactgagagggacgaaattgaggatgtgaaatgccaagaggaccagaagctgcaggttttattaacgcagatcgagtctaagaaacaccaggtggagaccgcatttgaaaggttgcagcaggaactggaacagcaacgatgtctcttactggccagacttagagagctggaacaacagatctggaaagaaagggatgagtatatcaccaaagtgtccgaggaggtcacgaggttaggcgcacaggtcaaggaacttgaggagaagtgccaacagcctgcgtccgagctactgcaggtgattcgcgaggggttgcatggctgcgaaatgaaaaccttcgtgtctccggaagctatctcaccagatttagtcaagaagattcgggatttccatcggaagatactgacattgcccgagatgatgagaatgttcagtgaaaatctcgcccatcacctggagatcgatagtggcgtgatcaccctggatcctcagaccgcttctagatccctcgttctgagtgaggatagaaagtcggtgagatataccaggcagaagaaatccctgcccgactctcccttacgatttgatggcctgcctgcagtcctgggttttccaggattctcaagcgggcgacatagatggcaggtcgacctacagctgggagacgggggtggatgtactgtgggggtggcaggtgaaggagtacggagaaaaggcgagatgggcttgagtgcagaagacggagtgtgggccgtgattatcagccatcagcagtgctgggcttcgacaagcccgggaacagacctgccactgtctgagatcccacgaggggtaagagttgctctcgattacgaagccggacaggttacccttcacaacgcccagacacaggagccaatttttacatttactgcttctttttcaggcaaggtcttcccgttcttcgctgtttggaagaaagggagctgcctaaccctcaaagggtag

SEQ ID NO: 227912 - DNA, 1191 bp, Artificial Sequence
  derived and/or modified sequence
atggcccctgtgccgctcggcccactgggggaaacctactgcgaggagcatggggagaaaatctatttcttttgcgaaaatgacgccgagttcctatgtgtattctgtcgcgagggtccgacccatcaggctcacaccgtggggtttttggacgaggctatccagccctacagagatcggctgcgctctaggctcgaggccctaagcaccgagcgggacgagattgaagacgtaaagtgtcaggaagaccagaagcttcaggtcctgttgacccaaatagagagcaagaaacatcaggttgaaaccgcttttgagagactccaacaagaactggagcaacagcggtgtctcctgttagccagactccgagaattggaacagcagatctggaaagagagggatgagtatataactaaagtgtcggaggaggtcacacgccttggggcacaggttaaggagctggaagaaaagtgtcaacagcccgctagtgaactccttcaggtcataagggaagggttgcacggctgcgaaatgaagacctttgtctccccagaagccataagcccagatcttgtaaagaagatacgagacttccatcggaaaattcttacccttcccgaaatgatgcgtatgttttctgaaaatctggcccatcacctggaaattgattcaggtgtcatcaccctggatccacagactgccagccgctctctggttctgtctgaggatagaaagtctgttcggtacacccgtcagaagaaaaatctgcccgattcaccattaaggtttgacgggctgcccgctgtccttgggtttcctgggttttcttcaggtcgtcaccggtggcaggtagatcttcagctgggcgacgggggtggatgtactgttggcgtcgcaggtgagggcgtgaggagaaagggcgaaatggggctgtccgccgaggatggtgtgtgggccgtcatcattagccaccagcaatgttgggccagtacgtcacctggcaccgatttacctttgtccgagatcccaaggggcgtgcgcgtcgctctggattatgaggccggacaagtgaccctgcacaacgcccagacccaggagccaattttcacatttacagccagtttttccgggaaggtcttcccttttttcgctgtctggaaaaagggatcttgtctgactcttaagggctag

SEQ ID NO: 227913 - DNA, 1191 bp, Artificial Sequence
  derived and/or modified sequence
atggcgccagtcccacttggacctctcggcgagacatattgtgaggagcacggcgagaagatctactttttctgtgagaatgatgctgagtttctgtgcgtgttctgcagagaaggcccaactcaccaggcacatacagtaggattcctggatgaggctatccagccttatagggataggttgagatcgagactggaggctctgagtacagaacgggatgaaatcgaggatgtcaagtgccaggaagaccaaaaactacaagtgctgttgacacaaatcgagtcaaagaaacatcaggtggagactgctttcgagagactgcaacaagagctggagcagcagagatgtctcttgcttgctcggcttagagagctggagcaacagatctggaaggaacgcgatgaatatattacgaaagtgtccgaggaagttacacgcctgggagctcaggtgaaggagctggaggagaagtgtcagcaacccgctagcgaactgctgcaggtcatcagggaaggactgcatggatgtgaaatgaaaacgttcgtgagccccgaggccatatccccggatctcgtgaaaaaaatcagggattttcatcgcaagattctcaccttgcctgagatgatgcgtatgttcagtgagaatctggctcatcatttagagatcgactccggggttatcaccctggaccctcagacggcatctcggagtcttgtgctgtccgaagacagaaagtccgttcggtacacaagacagaagaagtccctgccagactcaccactgcgtttcgacgggctacctgccgtcctgggcttccccggattcagctctggtcgacataggtggcaggtggacttgcagcttggcgacggcggaggatgcacagtaggcgtcgcaggtgagggagtgagaaggaaaggcgaaatgggactatcagctgaagacggggtgtgggccgttattatctctcaccaacagtgctgggccagtaccagtcccggaactgatcttcccttgtcagagataccgaggggggtgagggtcgccctggattacgaggccggacaggtcacactgcataacgcccagacacaggaacccattttcactttcactgctagcttcagcggtaaggtgttcccgttttttgctgtgtggaagaagggctcttgcttgacacttaaagggtag

SEQ ID NO: 227914 - DNA, 1191 bp, Artificial Sequence
  derived and/or modified sequence
atggctcccgtgcctttgggacctctgggtgaaacgtattgcgaggaacacggtgagaagatttattttttctgcgaaaatgatgccgaattcctatgcgtgttttgtcgcgaaggtccgacccaccaggcccacacagtcggatttttggatgaagccatacagccctaccgcgaccggcttcggagcaggctcgaagctctgagcactgaacgagatgaaatagaggatgtaaaatgccaagaggatcagaaactccaggtgttgttgacccagatcgagtcgaaaaaacatcaggttgagaccgcttttgagaggctgcagcaggagctcgaacagcagaggtgcctcttactggctcgcctgcgagagcttgaacagcagatctggaaggaacgtgacgaatatatcacaaaggttagcgaagaagtgactcgcctgggagcacaggtgaaggagctcgaggaaaagtgccagcagcctgcctccgaactgctacaggtgatcagagagggtttgcacgggtgcgagatgaagactttcgtttcaccagaggccatctctccagacctcgtgaagaaaatacgggattttcatcgaaagatcttaacgctccccgaaatgatgcggatgttctccgagaatctggcacatcatctcgagattgactcaggggttattacgctggatcctcagactgcaagccggagtctggtgttgtctgaggaccgaaagtcagttcggtacaccaggcaaaagaagtccttgcccgattccccactgcggttcgatggcctgcctgctgtactgggatttcctggattctcttccgggagacacagatggcaggtggacctgcagctgggagatgggggagggtgcacggtgggcgtggccggagagggcgtgaggaggaagggtgagatggggctcagtgccgaggacggcgtgtgggccgtgatcattagccaccagcagtgctgggccagtacatctcccggaacagacttgccactgagcgagattccaagaggcgtcagggtggccctggactacgaggcaggccaggtcacactccacaatgcccagacgcaggagccaattttcaccttcactgcgtcatttagtggaaaggtgtttccatttttcgccgtctggaagaagggcagttgcctcacgctaaagggatag

SEQ ID NO: 227915 - DNA, 2214 bp, Artificial Sequence
  derived and/or modified sequence
tgtgggcacgcctcagagccagaagtttatggctcccacctgctcaatctgacaggaagcttctgctccccagttctccccagccactgtggtctacagattccaggaaacccatccccctgtgacctcatggtgtgctctgttctccaccctagggaccagaaggagccaggagtaaagaactggcttacttggccgccactgggaaattctgggtaattcgagacgccctggaatttggacccactccgctgataggtggtggccagggttctagggaacacaagaggcggagccaggtggcttccctgtgctggcattcttgcctctctctctctttctctctctctgtctctcagccttgcagccgtttccctctgcgattcatgtaagtgtgactcgatttcagggaaagggaactcgcgtgggctgaggagaccggagtggacgggctggggaaggcaccgtgatgcccgcaaccccgtccctgaaggtggtccatgagctgcctgcctgtaccctctgtgcggggccgctggaggatgcggtgaccattccctgtggacacaccttctgccggctctgcctccccgcgctctcccagatgggggcccaatcctcgggcaagatcctgctctgcccgctctgccaagaggaggagcaggcagagactcccatggcccctgtgcccctgggcccgctgggagaaacttactgcgaggagcacggcgagaagatctacttcttctgcgagaacgatgccgagttcctctgtgtgttctgcagggagggtcccacgcaccaggcgcacaccgtggggttcctggacgaggccattcagccctaccgggatcgtctcaggagtcgactggaagctctgagcacggagagagatgagattgaggatgtaaagtgtcaagaagaccagaagcttcaagtgctgctgactcagatcgaaagcaagaagcatcaggtggaaacagcttttgagaggctgcagcaggagctggagcagcagcgatgtctcctgctggccaggctgagggagctggagcagcagatttggaaggagagggatgaatatatcacaaaggtctctgaggaagtcacccggcttggagcccaggtcaaggagctggaggagaagtgtcagcagccagcaagtgagcttctacaagatgtcagagtcaaccagagcaggtgtgagatgaagacttttgtgagtcctgaggccatttctcctgaccttgtcaagaagatccgtgatttccacaggaaaatactcaccctcccagagatgatgaggatgttctcagaaaacttggcgcatcatctggaaatagattcaggggtcatcactctggaccctcagaccgccagccggagcctggttctctcggaagacaggaagtcagtgaggtacacccggcagaagaagagcctgccagacagccccctgcgcttcgacggcctcccggcggttctgggcttcccgggcttctcctccgggcgccaccgctggcaggttgacctgcagctgggcgacggcggcggctgcacggtgggggtggccggggagggggtgaggaggaagggagagatgggactcagcgccgaggacggcgtctgggccgtgatcatctcgcaccagcagtgctgggccagcacctccccgggcaccgacctgccgctgagcgagatcccgcgcggcgtgagagtcgccctggactacgaggcggggcaggtgaccctccacaacgcccagacccaggagcccatcttcaccttcactgcctctttctccggcaaagtcttccctttctttgccgtctggaaaaaaggttcctgccttacgctgaaaggctgaagtggggcgcgcgaagggcggcgaagcggagacggcggctctccgggatccagctccgcccctggccagtgtgcggcccgggggctccctgtgcccgcgtgaggcgagagaacaggggacttgagtctcgaacagcggttgtttttactttatttatcttaggccctcagctccctgacgtcctgagcctccctgtgacgctctggccttctctgcacctcagagtgcagaaccacagacggcttcggctgtgcctagggcaacagccaacctaggagccagcgggctttcggggaaaaaaaagaaaaagacatctaaaataaaatgtttaaactgtttcaaaataa

SEQ ID NO: 227916 - DNA, 2214 bp, Artificial Sequence
  derived and/or modified sequence
tgtgggcacgcctcagagccagaagtttatggctcccacctgctcaatctgacaggaagcttctgctccccagttctccccagccactgtggtctacagattccaggaaacccatccccctgtgacctcatggtgtgctctgttctccaccctagggaccagaaggagccaggagtaaagaactggcttacttggccgccactgggaaattctgggtaattcgagacgccctggaatttggacccactccgctgataggtggtggccagggttctagggaacacaagaggcggagccaggtggcttccctgtgctggcattcttgcctctctctctctttctctctctctgtctcttagccttgcagccgtttccctctgcgattcatgtaagtgtgactcgatttcagggaaagggaactcgcgtgggctgaggagaccggagtggacgggctggggaaggcaccgtgatgcccgcaaccccgtccctgaaggtggtccatgagctgcctgcctgtaccctctgtgcggggccgctggaggatgcggtgaccattccctgtggacacaccttctgccggctctgcctccccgcgctctcccagatgggggcccaatcctcgggcaagatcctgctctgcccgctctgccaagaggaggagcaggcagagactcccatggcccctgtgcccctgggcccgctgggagaaacttactgcgaggagcacggcgagaagatctacttcttctgcgagaacgatgccgagttcctctgtgtgttctgcagggagggtcccacgcaccaggcgcacaccgtggggttcctggacgaggccattcagccctaccgggatcgtctcaggagtcgactggaagctctgagcacggagagagatgagattgaggatgtaaagtgtcaagaagaccagaagcttcaagtgctgctgactcagatcgaaagcaagaagcatcaggtggaaacagcttttgagaggctgcagcaggagctggagcagcagcgatgtctcctgctggccaggctgagggagctggagcagcagatttggaaggagagggatgaatatatcacaaaggtctctgaggaagtcacccggcttggagcccaggtcaaggagctggaggagaagtgtcagcagccagcaagtgagcttctacaagatgtcagagtcaaccagagcaggtgtgagatgaagacttttgtgagtcctgaggccatttctcctgaccttgtcaagaagatccgtgatttccacaggaaaatactcaccctcccagagatgatgaggatgttctcagaaaacttggcgcatcatctggaaatagattcaggggtcatcactctggaccctcagaccgccagccggagcctggttctctcggaagacaggaagtcagtgaggtacacccggcagaagaagagcctgccagacagccccctgcgcttcgacggcctcccggcggttctgggcttcccgggcttctcctccgggcgccaccgctggcaggttgacctgcagctgggcgacggcggcggctgcacggtgggggtggccggggagggggtgaggaggaagggagagatgggactcagcgccgaggacggcgtctgggccgtgatcatctcgcaccagcagtgctgggccagcacctccccgggcaccgacctgccgctgagcgagatcccgcgcggcgtgagagtcgccctggactacgaggcggggcaggtgaccctccacaacgcccagacccaggagcccatcttcaccttcactgcctctttctccggcaaagtcttccctttctttgccgtctggaaaaaaggttcctgccttacgctgaaaggctgaagtggggcgcgcgaagggcggcgaagcggagacggcggctctccgggatccagctccgcccctggccagtgtgcggcccgggggctccctgtgcccgcgtgaggcgagagaacaggggacttgagtctcgaacagcggttgtttttactttatttatcttaggccctcagctccctgacgtcctgagcctccctgtgacgctctggccttctctgtacctcagagtgcagaaccacagacggcttcggctgtgcctagggcaacagccaacctaggagccagcgggctttcggggaaaaaaaagaaaaagacatctaaaataaaatgtttaaactgtttcaaaataa

SEQ ID NO: 227917 - DNA, 2217 bp, Artificial Sequence
  derived and/or modified sequence
actttgatgctgtgggcacgcctcagagccagaagtttatggctcccacctgctcaatctgacaggaagcttctgctccccagttctccccagccactgtggtctacagattccaggaaacccatccccctgtgacctcatggtgtgctctgttctccaccctagggaccagaaggagccaggagtaaagaactggcttacttggccgccactgggaaattctgggtaattcgagacgccctggaatttggacccactccgctgataggtggtggccagggttctagggaacacaagaggcggagccaggtggcttccctgtgctggcattcttgcctctctctctctttctctctctctgtctcttagccttgcagccgtttccctctgcgattcatgtaagtgtgactcgatttcagggaaagggaactcgcgtgggctgaggagaccggagtggacgggctggggaaggcaccgtgatgcccgcaaccccgtccctgaaggtggtccatgagctgcctgcctgtaccctctgtgcggggccgctggaggatgcggtgaccattccctgtggacacaccttctgccggctctgcctccccgcgctctcccagatgggggcccaatcctcgggcaagatcctgctctgcccgctctgccaagaggaggagcaggcagagactcccatggcccctgtgcccctgggcccgctgggagaaacttactgcgaggagcacggcgagaagatctacttcttctgcgagaacgatgccgagttcctctgtgtgttctgcagggagggtcccacgcaccaggcgcacaccgtggggttcctggacgaggccattcagccctaccgggatcgtctcaggagtcgactggaagctctgagcacggagagagatgagattgaggatgtaaagtgtcaagaagaccagaagcttcaagtgctgctgactcagatcgaaagcaagaagcatcaggtggaaacagcttttgagaggctgcagcaggagctggagcagcagcgatgtctcctgctggccaggctgagggagctggagcagcagatttggaaggagagggatgaatatatcacaaaggtctctgaggaagtcacccggcttggagcccaggtcaaggagctggaggagaagtgtcagcagccagcaagtgagcttctacaagtgataagagagggactccacgggtgtgagatgaagacttttgtgagtcctgaggccatttctcctgaccttgtcaagaagatccgtgatttccacaggaaaatactcaccctcccagagatgatgaggatgttctcagaaaacttggcgcatcatctggaaatagattcaggggtcatcactctggaccctcagaccgccagccggagcctggttctctcggaagacaggaagtcagtgaggtacacccggcagaagaagagcctgccagacagccccctgcgcttcgacggcctcccggcggttctgggcttcccgggcttctcctccgggcgccaccgctggcaggttgacctgcagctgggcgacggcggcggctgcacggtgggggtggccggggagggggtgaggaggaagggagagatgggactcagcgccgaggacggcgtctgggccgtgatcatctcgcaccagcagtgctgggccagcacctccccgggcaccgacctgccgctgagcgagatcccgcgcggcgtgagagtcgccctggactacgaggcggggcaggtgaccctccacaacgcccagacccaggagcccatcttcaccttcactgcctctttctccggcaaagtcttccctttctttgccgtctggaaaaaaggttcctgccttacgctgaaaggctgaagtggggcgcgcgaagggcggcgaagcggagacggcggctctccgggatccagctccgcccctggccagtgtgcggcccgggggctccctgtgcccgcgtgaggcgagagaacaggggacttgagtctcgaacagcggttgtttttactttatttatcttaggccctcagctccctgacgtcctgagcctccctgtgacgctctggccttctctgtacctcagagtgcagaaccacagacggcttcggctgtgcctagggcaacagccaacctaggagccagcgggctttcggggaaaaaaaagaaaaagacatctaaaataaaatgtttaaactgtttc

SEQ ID NO: 227918 - DNA, 2214 bp, Artificial Sequence
  derived and/or modified sequence
tgtgggcacgcctcagagccagaagtttatggctcccacctgctcaatctgacaggaagcttctgctccccagttctccccagccactgtggtctacagattccaggaaacccatccccctgtgacctcatggtgtgctctgttctccaccctagggaccagaaggagccaggagtaaagaactggcttacttggccgccactgggaaattctgggtaattcgagacgccctggaatttggacccactccgctgataggtggtggccagggttctagggaacacaagaggcggagccaggtggcttccctgtgctggcattcttgcctctctctctctttctctctctctgtctctcagccttgcagccgtttccctctgcgattcatgtaagtgtgactcgatttcagggaaagggaactcgcgtgggctgaggagaccggagtggacgggctggggaaggcaccgtgatgcccgcaaccccgtccctgaaggtggtccatgagctgcctgcctgtaccctatgtgcggggccgctggaggatgcggtgaccattccctgtggacacaccttctgccggctctgcctccccgcgctctcccagatgggggcccaatcctcgggcaagatcctgctctgcccgctctgccaagaggaggagcaggcagagactcccatggcccctgtgcccctgggcccgctgggagaaacttactgcgaggagcacggcgagaagatctacttcttctgcgagaacgatgccgagttcctctgtgtgttctgcagggagggtcccacgcaccaggcgcacaccgtggggttcctggacgaggccattcagccctaccgggatcgtctcaggagtcgactggaagctctgagcacggagagagatgagattgaggatgtaaagtgtcaagaagaccagaagcttcaagtgctgctgactcagatcgaaagcaagaagcatcaggtggaaacagcttttgagaggctgcagcaggagctggagcagcagcgatgtctcctgctggccaggctgagggagctggagcagcagatttggaaggagagggatgaatatatcacaaaggtctctgaggaagtcacccggcttggagcccaggtcaaggagctggaggagaagtgtcagcagccagcaagtgagcttctacaagatgtcagagtcaaccagagcaggtgtgagatgaagacttttgtgagtcctgaggccatttctcctgaccttgtcaagaagatccgtgatttccacaggaaaatactcaccctcccagagatgatgaggatgttctcagaaaacttggcgcatcatctggaaatagattcaggggtcatcactctggaccctcagaccgccagccggagcctggttctctcggaagacaggaagtcagtgaggtacacccggcagaagaagagcctgccagacagccccctgcgcttcgacggcctcccggcggttctgggcttcccgggcttctcctccgggcgccaccgctggcaggttgacctgcagctgggcgacggcggcggctgcacggtgggggtggccggggagggggtgaggaggaagggagagatgggactcagcgccgaggacggcgtctgggccgtgatcatctcgcaccagcagtgctgggccagcacctccccgggcaccgacctgccgctgagcgagatcccgcgcggcgtgagagtcgccctggactacgaggcggggcaggtgaccctccacaacgcccagacccaggagcccatcttcaccttcactgcctctttctccggcaaagtcttccctttctttgccgtctggaaaaaaggttcctgccttacgctgaaaggctgaagtggggcgcgcgaagggcggcgaagcggagacggcggctctccgggatccagctccgcccctggccagtgtgcggcccgggggctccctgtgcccgcgtgaggcgagagaacaggggacttgagtctcgaacagcggttgtttttactttatttatcttaggccctcagctccctgacgtcctgagcctccctgtgacgctctggccttctctgcacctcagagtgcagaaccacagacggcttcggctgtgcctagggcaacagccaacctaggagccagcgggctttcggggaaaaaaaagaaaaagacatctaaaataaaatgtttaaactgtttcaaaataa

SEQ ID NO: 227919 - DNA, 491 bp, Artificial Sequence
  derived and/or modified sequence
gcaagaagcatcaggtggaaacagcttttgagaggctgcagcaggagctggagcagcagcgatgtctcctgctggccaggctgagggagctggagcagcagatttggaaggagagggatgaatatatcacaaaggtctctgaggaagtcacccggcttggagcccaggtcaaggagctggaggagaagtgtcagcagccagcaagtgagcttctacaagatgtcagagtcaaccagagcaggtgtgagatgaagacttttgtgagtcctgaggccatttctcctgaccttgtcaagaagatccgtgatttccacaggaaaatactcaccctcccagagatgatgaggatgttctcagaaaacttggcgcatcatctggaaatagattcagaccgccagccggagcctggttctctcggaagacaggaagtcagtgaggtacacccggcagaagaagagcctgccagacagccccctgcgcttcgacggcct

SEQ ID NO: 227920 - DNA, 491 bp, Artificial Sequence
  derived and/or modified sequence
gcaagaagcatcaggtggaaacagcttttgagaggctgcagcaggagctggagcagcagcgatgtctcctgctggccaggctgagggagctggagcagcagatttggaaggagagggatgaatatatcacaaaggtctctgaggaagtcacccggcttggagcccaggtcaaggagctggaggagaagtgtcagcagccagcaagtgagcttctacaagatgtcagagtcaaccagagcaggtgtgagatgaagacttttgtgagtcctgaggccatttctcctgaccttgtcaagaagatccgtgatttccacaggaaaatactcaccctcccagagatgatgaggatgttctcagaaaacttggcgcatcatctggaaatagattcagaccgccagccggagcctggttctctcggaagacaggaagtcagtgaggtacacccggcagaagaagaacctgccagacagccccctgcgcttcgacggcct

SEQ ID NO: 227921 - DNA, 2214 bp, Artificial Sequence
  derived and/or modified sequence
tgtgggcacgcctcagagccagaagtttatggctcccacctgctcaatctgacaggaagcttctgctccccagttctccccagccactgtggtctacagattccaggaaacccatccccctgtgacctcatggtgtgctctgttctccaccctagggaccagaaggagccaggagtaaagaactggcttacttggccgccactgggaaattctgggtaattcgagacgccctggaatttggacccactccgctgataggtggtggccagggttctagggaacacaagaggcggagccaggtggcttccctgtgctggcattcttgcctctctctctctttctctctctctgtctctcagccttgcagccgtttccctctgcgattcatgtaagtgtgactcgatttcagggaaagggaactcgcgtgggctgaggagaccggagtggacgggctggggaaggcaccgtgatgcccgcaaccccgtccctgaaggtggtccatgagctgcctgcctgtaccctctgtgcggggccgctggaggatgcggtgaccattccctgtggacacaccttctgccggctctgcctccccgcgctctcccagatgggggcccaatcctcgggcaagatcctgctctgcccgctctgccaagaggaggagcaggcagagactcccatggcccctgtgcccctgggcccgctgggagaaacttactgcgaggagcacggcgagaagatctacttcttctgcgagaacgatgccgagttcctctgtgtgttctgcagggagggtcccacgcaccaggcgcacaccgtggggttcctggacgaggccattcagccctaccgggatcgtctcaggagtcgactggaagctctgagcacggagagagatgagattgaggatgtaaagtgtcaagaagaccagaagcttcaagtgctgctgactcagatcgaaagcaagaagcatcaggtggaaacagcttttgagaggctgcagcaggagctggagcagcagcgatgtctcctgctggccaggctgagggagctggagcagcagatttggaaggagagggatgaatatatcacaaaggtctctgaggaagtcacccggcttggagcccaggtcaaggagctggaggagaagtgtcagcagccagcaagtgagcttctacaagatgtcagagtcaaccagagcaggtgtgagatgaagacttttgtgagtcctgaggccatttctcctgaccttgtcaagaagatccgtgatttccacaggaaaatactcaccctcccagagatgatgaggatgttctcagaaaacttggcgcatcatctggaaatagattcaggggtcatcactctggaccctcagaccgccagccggagcctggttctctcggaagacaggaagtcagtgaggtacacccggcagaagaagaacctgccagacagccccctgcgcttcgacggcctcccggcggttctgggcttcccgggcttctcctccgggcgccaccgctggcaggttgacctgcagctgggcgacggcggcggctgcacggtgggggtggccggggagggggtgaggaggaagggagagatgggactcagcgccgaggacggcgtctgggccgtgatcatctcgcaccagcagtgctgggccagcacctccccgggcaccgacctgccgctgagcgagatcccgcgcggcgtgagagtcgccctggactacgaggcggggcaggtgaccctccacaacgcccagacccaggagcccatcttcaccttcactgcctctttctccggcaaagtcttccctttctttgccgtctggaaaaaaggttcctgccttacgctgaaaggctgaagtggggcgcgcgaagggcggcgaagcggagacggcggctctccgggatccagctccgcccctggccagtgtgcggcccgggggctccctgtgcccgcgtgaggcgagagaacaggggacttgagtctcgaacagcggttgtttttactttatttatcttaggccctcagctccctgacgtcctgagcctccctgtgacgctctggccttctctgcacctcagagtgcagaaccacagacggcttcggctgtgcctagggcaacagccaacctaggagccagcgggctttcggggaaaaaaaagaaaaagacatctaaaataaaatgtttaaactgtttcaaaataa

SEQ ID NO: 227922 - DNA, 2217 bp, Artificial Sequence
  derived and/or modified sequence
actttgatgctgtgggcacgcctcagagccagaagtttatggctcccacctgctcaatctgacaggaagcttctgctccccagttctccccagccactgtggtctacagattccaggaaacccatccccctgtgacctcatggtgtgctctgttctccaccctagggaccagaaggagccaggagtaaagaactggcttacttggccgccactgggaaattctgggtaattcgagacgccctggaatttggacccactccgctgataggtggtggccagggttctagggaacacaagaggcggagccaggtggcttccctgtgctggcattcttgcctctctctctctttctctctctctgtctctcagccttgcagccgtttccctctgcgattcatgtaagtgtgactcgatttcagggaaagggaactcgcgtgggctgaggagaccggagtggacgggctggggaaggcaccgtgatgcccgcaaccccgtccctgaaggtggtccatgagctgcctgcctgtaccctctgtgcggggccgctggaggatgcggtgaccattccctgtggacacaccttctgccggctctgcctccccgcgctctcccagatgggggcccaatcctcgggcaagatcctgctctgcccgctctgccaagaggaggagcaggcagagactcccatggcccctgtgcccctgggcccgctgggagaaacttactgcgaggagcacggcgagaagatctacttcttctgcgagaacgatgccgagttcctctgtgtgttctgcagggagggtcccacgcaccaggcgcacaccgtggggttcctggacgaggccattcagccctaccgggatcgtctcaggagtcgactggaagctctgagcacggagagagatgagattgaggatgtaaagtgtcaagaagaccagaagcttcaagtgctgctgactcagatcgaaagcaagaagcatcaggtggaaacagcttttgagaggctgcagcaggagctggagcagcagcgatgtctcctgctggccaggctgagggagctggagcagcagatttggaaggagagggatgaatatatcacaaaggtctctgaggaagtcacccggcttggagcccaggtcaaggagctggaggagaagtgtcagcagccagcaagtgagcttctacaagtgataagagagggactccacgggtgtgagatgaagacttttgtgagtcctgaggccatttctcctgaccttgtcaagaagatccgtgatttccacaggaaaatactcaccctcccagagatgatgaggatgttctcagaaaacttggcgcatcatctggaaatagattcaggggtcatcactctggaccctcagaccgccagccggagcctggttctctcggaagacaggaagtcagtgaggtacacccggcagaagaagaacctgccagacagccccctgcgcttcgacggcctcccggcggttctgggcttcccgggcttctcctccgggcgccaccgctggcaggttgacctgcagctgggcgacggcggcggctgcacggtgggggtggccggggagggggtgaggaggaagggagagatgggactcagcgccgaggacggcgtctgggccgtgatcatctcgcaccagcagtgctgggccagcacctccccgggcaccgacctgccgctgagcgagatcccgcgcggcgtgagagtcgccctggactacgaggcggggcaggtgaccctccacaacgcccagacccaggagcccatcttcaccttcactgcctctttctccggcaaagtcttccctttctttgccgtctggaaaaaaggttcctgccttacgctgaaaggctgaagtggggcgcgcgaagggcggcgaagcggagacggcggctctccgggatccagctccgcccctggccagtgtgcggcccgggggctccctgtgcccgcgtgaggcgagagaacaggggacttgagtctcgaacagcggttgtttttactttatttatcttaggccctcagctccctgacgtcctgagcctccctgtgacgctctggccttctctgcacctcagagtgcagaaccacagacggcttcggctgtgcctagggcaacagccaacctaggagccagcgggctttcggggaaaaaaaagaaaaagacatctaaaataaaatgtttaaactgtttc

SEQ ID NO: 227923 - DNA, 2217 bp, Artificial Sequence
  derived and/or modified sequence
actttgatgctgtgggcacgcctcagagccagaagtttatggctcccacctgctcaatctgacaggaagcttctgctccccagttctccccagccactgtggtctacagattccaggaaacccatccccctgtgacctcatggtgtgctctgttctccaccctagggaccagaaggagccaggagtaaagaactggcttacttggccgccactgggaaattctgggtaattcgagacgccctggaatttggacccactccgctgataggtggtggccagggttctagggaacacaagaggcggagccaggtggcttccctgtgctggcattcttgcctctctctctctttctctctctctgtctctcagccttgcagccgtttccctctgcgattcatgtaagtgtgactcgatttcagggaaagggaactcgcgtgggctgaggagaccggagtggacgggctggggaaggcaccgtgatgcccgcaaccccgtccctgaaggtggtccatgagctgcctgcctgtaccctatgtgcggggccgctggaggatgcggtgaccattccctgtggacacaccttctgccggctctgcctccccgcgctctcccagatgggggcccaatcctcgggcaagatcctgctctgcccgctctgccaagaggaggagcaggcagagactcccatggcccctgtgcccctgggcccgctgggagaaacttactgcgaggagcacggcgagaagatctacttcttctgcgagaacgatgccgagttcctctgtgtgttctgcagggagggtcccacgcaccaggcgcacaccgtggggttcctggacgaggccattcagccctaccgggatcgtctcaggagtcgactggaagctctgagcacggagagagatgagattgaggatgtaaagtgtcaagaagaccagaagcttcaagtgctgctgactcagatcgaaagcaagaagcatcaggtggaaacagcttttgagaggctgcagcaggagctggagcagcagcgatgtctcctgctggccaggctgagggagctggagcagcagatttggaaggagagggatgaatatatcacaaaggtctctgaggaagtcacccggcttggagcccaggtcaaggagctggaggagaagtgtcagcagccagcaagtgagcttctacaagtgataagagagggactccacgggtgtgagatgaagacttttgtgagtcctgaggccatttctcctgaccttgtcaagaagatccgtgatttccacaggaaaatactcaccctcccagagatgatgaggatgttctcagaaaacttggcgcatcatctggaaatagattcaggggtcatcactctggaccctcagaccgccagccggagcctggttctctcggaagacaggaagtcagtgaggtacacccggcagaagaagagcctgccagacagccccctgcgcttcgacggcctcccggcggttctgggcttcccgggcttctcctccgggcgccaccgctggcaggttgacctgcagctgggcgacggcggcggctgcacggtgggggtggccggggagggggtgaggaggaagggagagatgggactcagcgccgaggacggcgtctgggccgtgatcatctcgcaccagcagtgctgggccagcacctccccgggcaccgacctgccgctgagcgagatcccgcgcggcgtgagagtcgccctggactacgaggcggggcaggtgaccctccacaacgcccagacccaggagcccatcttcaccttcactgcctctttctccggcaaagtcttccctttctttgccgtctggaaaaaaggttcctgccttacgctgaaaggctgaagtggggcgcgcgaagggcggcgaagcggagacggcggctctccgggatccagctccgcccctggccagtgtgcggcccgggggctccctgtgcccgcgtgaggcgagagaacaggggacttgagtctcgaacagcggttgtttttactttatttatcttaggccctcagctccctgacgtcctgagcctccctgtgacgctctggccttctctgcacctcagagtgcagaaccacagacggcttcggctgtgcctagggcaacagccaacctaggagccagcgggctttcggggaaaaaaaagaaaaagacatctaaaataaaatgtttaaactgtttc

SEQ ID NO: 227924 - DNA, 2217 bp, Artificial Sequence
  derived and/or modified sequence
actttgatgctgtgggcacgcctcagagccagaagtttatggctcccacctgctcaatctgacaggaagcttctgctccccagttctccccagccactgtggtctacagattccaggaaacccatccccctgtgacctcatggtgtgctctgttctccaccctagggaccagaaggagccaggagtaaagaactggcttacttggccgccactgggaaattctgggtaattcgagacgccctggaatttggacccactccgctgataggtggtggccagggttctagggaacacaagaggcggagccaggtggcttccctgtgctggcattcttgcctctctctctctttctctctctctgtctctcagccttgcagccgtttccctctgcgattcatgtaagtgtgactcgatttcagggaaagggaactcgcgtgggctgaggagaccggagtggacgggctggggaaggcaccgtgatgcccgcaaccccgtccctgaaggtggtccatgagctgcctgcctgtaccctctgtgcggggccgctggaggatgcggtgaccattccctgtggacacaccttctgccggctctgcctccccgcgctctcccagatgggggcccaatcctcgggcaagatcctgctctgcccgctctgccaagaggaggagcaggcagagactcccatggcccctgtgcccctgggcccgctgggagaaacttactgcgaggagcacggcgagaagatctacttcttctgcgagaacgatgccgagttcctctgtgtgttctgcagggagggtcccacgcaccaggcgcacaccgtggggttcctggacgaggccattcagccctaccgggatcgtctcaggagtcgactggaagctctgagcacggagagagatgagattgaggatgtaaagtgtcaagaagaccagaagcttcaagtgctgctgactcagatcgaaagcaagaagcatcaggtggaaacagcttttgagaggctgcagcaggagctggagcagcagcgatgtctcctgctggccaggctgagggagctggagcagcagatttggaaggagagggatgaatatatcacaaaggtctctgaggaagtcacccggcttggagcccaggtcaaggagctggaggagaagtgtcagcagccagcaagtgagcttctacaagtgataagagagggactccacgggtgtgagatgaagacttttgtgagtcctgaggccatttctcctgaccttgtcaagaagatccgtgatttccacaggaaaatactcaccctcccagagatgatgaggatgttctcagaaaacttggcgcatcatctggaaatagattcaggggtcatcactctggaccctcagaccgccagccggagcctggttctctcggaagacaggaagtcagtgaggtacacccggcagaagaagagcctgccagacagccccctgcgcttcgacggcctcccggcggttctgggcttcccgggcttctcctccgggcgccaccgctggcaggttgacctgcagctgggcgacggcggcggctgcacggtgggggtggccggggagggggtgaggaggaagggagagatgggactcagcgccgaggacggcgtctgggccgtgatcatctcgcaccagcagtgctgggccagcacctccccgggcaccgacctgccgctgagcgagatcccgcgcggcgtgagagtcgccctggactacgaggcggggcaggtgaccctccacaacgcccagacccaggagcccatcttcaccttcactgcctctttctccggcaaagtcttccctttctttgccgtctggaaaaaaggttcctgccttacgctgaaaggctgaagtggggcgcgcgaagggcggcgaagcggagacggcggctctccgggatccagctccgcccctggccagtgtgcggcccgggggctccctgtgcccgcgtgaggcgagagaacaggggacttgagtctcgaacagcggttgtttttactttatttatcttaggccctcagctccctgacgtcctgagcctccctgtgacgctctggccttctctgcacctcagagtgcagaaccacagacggcttcggctgtgcctagggcaacagccaacctaggagccagcgggctttcggggaaaaaaaagaaaaagacatctaaaataaaatgtttaaactgtttc

SEQ ID NO: 227925 - protein, 882 aa, Artificial Sequence
  derived and/or modified sequence
MEPAPARSPRPQQDPARPQEPTMPPPETPSEGRQPSPSPSPTERAPASEEEFQFLRCQQCQAEAKCPKLLPCLHTLCSGCLEASGMQCPICQAPWPLGADTPALDNVFFESLQRRLSVYRQIVDAQAVCTRCKESADFWCFECEQLLCAKCFEAHQWFLKHEARPLAELRNQSVREFLDGTRKTNNIFCSNPNHRTPTLTSIYCRGCSKPLCCSCALLDSSHSELKCDISAEIQQRQEELDAMTQALQEQDSAFGAVHAQMHAAVGQLGRARAETEELIRERVRQVVAHVRAQERELLEAVDARYQRDYEEMASRLGRLDAVLQRIRTGSALVQRMKCYASDQEVLDMHGFLRQALCRLRQEEPQSLQAAVRTDGFDEFKVRLQDLSSCITQGKDAAVSKKASPEAASTPRDPIDVDLPEEAERVKAQVQALGLAEAQPMAVVQSVPGAHPVPVYAFSIKGPSYGEDVSNTTTAQKRKCSQTQCPRKVIKMESEEGKEARLARSSPEQPRPSTSKAVSPPHLDGPPSPRSPVIGSEVFLPNSNHVASGAGEAEERVVVISSSEDSDAENSSSRELDDSSSESSDLQLEGPSTLRVLDENLADPQAEDRPLVFFDLKIDNETQKISQLAAVNRESKFRVVIQPEAFFSIYSKAVSLEVGLQHFLSFLSSMRRPILACYKLWGPGLPNFFRALEDINRLWEFQEAISGFLAALPLIRERVPGASSFKLKNLAQTYLARNMSERSAMAAVLAMRDLCRLLEVSPGPQLAQHVYPFSSLQCFASLQPLVQAAVLPRAEARLLALHNVSFMELLSAHRRDRQGGLKKYSRYLSLQTTTLPPAQPAFNLQALGTYFEGLLEGPALARAEGVSTPLAGRGLAERASQQS

SEQ ID NO: 227926 - protein, 423 aa, Artificial Sequence
  derived and/or modified sequence
MEPAPARSPRPQQDPARPQEPTMPPPETPSEGRQPSPSPSPTERAPASEEEFQFLRCQQCQAEAKCPKLLPCLHTLCSGCLEASGMQCPICQAPWPLGADTPALDNVFFESLQRRLSVYRQIVDAQAVCTRCKESADFWCFECEQLLCAKCFEAHQWFLKHEARPLAELRNQSVREFLDGTRKTNNIFCSNPNHRTPTLTSIYCRGCSKPLCCSCALLDSSHSELKCDISAEIQQRQEELDAMTQALQEQDSAFGAVHAQMHAAVGQLGRARAETEELIRERVRQVVAHVRAQERELLEAVDARYQRDYEEMASRLGRLDAVLQRIRTGSALVQRMKCYASDQEVLDMHGFLRQALCRLRQEEPQSLQAAVRTDGFDEFKVRLQDLSSCITQGKDAAVSKKASPEAASTPRDPIDVDLRNALW

SEQ ID NO: 227927 - protein, 443 aa, Artificial Sequence
  derived and/or modified sequence
MAVVQSVPGAHPVPVYAFSIKGPSYGEDVSNTTTAQKRKCSQTQCPRKVIKMESEEGKEARLARSSPEQPRPSTSKAVSPPHLDGPPSPRSPVIGSEVFLPNSNHVASGAGEAEERVVVISSSEDSDAENSSSRELDDSSSESSDLQLEGPSTLRVLDENLADPQAEDRPLVFFDLKIDNETQKISQLAAVNRESKFRVVIQPEAFFSIYSKAVSLEVGLQHFLSFLSSMRRPILACYKLWGPGLPNFFRALEDINRLWEFQEAISGFLAALPLIRERVPGASSFKLKNLAQTYLARNMSERSAMAAVLAMRDLCRLLEVSPGPQLAQHVYPFSSLQCFASLQPLVQAAVLPRAEARLLALHNVSFMELLSAHRRDRQGGLKKYSRYLSLQTTTLPPAQPAFNLQALGTYFEGLLEGPALARAEGVSTPLAGRGLAERASQQS

SEQ ID NO: 227928 - protein, 865 aa, Artificial Sequence
  derived and/or modified sequence
MEPAPARSPRPQQDPARPQEPTMPPPETPSEGRQPSPSPSPTERAPASEEEFQFLRCQQCQAEAKCPKLLPCLHTLCSGCLEASGMQCPICQAPWPLGADTPALDNVFFESLQRRLSVYRQIVDAQAVCTRCKESADFWCFECEQLLCAKCFEAHQWFLKHEARPLAELRNQSVREFLDGTRKTNNIFCSNPNHRTPTLTSIYCRGCSKPLCCSCALLDSSHSELKCDISAEIQQRQEELDAMTQALQEQDSAFGAVHAQMHAAVGQLGRARAETEELIRERVRQVVAHVRAQERELLEAVDARYQRDYEEMASRLGRLDAVLQRIRTGSALVQRMKCYASDQEVLDMHGFLRQALCRLRQEEPQSLQAAVRTDGFDEFKVRLQDLSSCITQGKDAAVSKKASPEAASTPRDPIDVDLPEEAERVKAQVQALGLAEAQPMAVVQSVPGAHPVPVYAFSIKGPSYGEDVSNTTTAQKRKCSQTQCPRKVIKMESEEGKEARLARSSPEQPRPSTSKAVSPPHLDGPPSPRSPVIGSEVFLPNSNHVASGAGEAEERVVVISSSEDSDAENSSSRELDDSSSESSDLQLEGPSTLRVLDENLADPQAEDRPLVFFDLKIDNETQKISQLAAVNRESKFRVVIQPEAFFSFLSSMRRPILACYKLWGPGLPNFFRALEDINRLWEFQEAISGFLAALPLIRERVPGASSFKLKNLAQTYLARNMSERSAMAAVLAMRDLCRLLEVSPGPQLAQHVYPFSSLQCFASLQPLVQAAVLPRAEARLLALHNVSFMELLSAHRRDRQGGLKKYSRYLSLQTTTLPPAQPAFNLQALGTYFEGLLEGPALARAEGVSTPLAGRGLAERASQQS

SEQ ID NO: 227929 - DNA, 2649 bp, Artificial Sequence
  derived and/or modified sequence
atggagcccgcccccgccagaagccccagaccccagcaggaccccgccagaccccaggagcccaccatgcccccccccgagacccccagcgagggcagacagcccagccccagccccagccccaccgagagagcccccgccagcgaggaggagttccagttcctgagatgccagcagtgccaggccgaggccaagtgccccaagctgctgccctgcctgcacaccctgtgcagcggctgcctggaggccagcggcatgcagtgccccatctgccaggccccctggcccctgggcgccgacacccccgccctggacaacgtgttcttcgagagcctgcagagaagactgagcgtgtacagacagatcgtggacgcccaggccgtgtgcaccagatgcaaggagagcgccgacttctggtgcttcgagtgcgagcagctgctgtgcgccaagtgcttcgaggcccaccagtggttcctgaagcacgaggccagacccctggccgagctgagaaaccagagcgtgagagagttcctggacggcaccagaaagaccaacaacatcttctgcagcaaccccaaccacagaacccccaccctgaccagcatctactgcagaggctgcagcaagcccctgtgctgcagctgcgccctgctggacagcagccacagcgagctgaagtgcgacatcagcgccgagatccagcagagacaggaggagctggacgccatgacccaggccctgcaggagcaggacagcgccttcggcgccgtgcacgcccagatgcacgccgccgtgggccagctgggcagagccagagccgagaccgaggagctgatcagagagagagtgagacaggtggtggcccacgtgagagcccaggagagagagctgctggaggccgtggacgccagataccagagagactacgaggagatggccagcagactgggcagactggacgccgtgctgcagagaatcagaaccggcagcgccctggtgcagagaatgaagtgctacgccagcgaccaggaggtgctggacatgcacggcttcctgagacaggccctgtgcagactgagacaggaggagccccagagcctgcaggccgccgtgagaaccgacggcttcgacgagttcaaggtgagactgcaggacctgagcagctgcatcacccagggcaaggacgccgccgtgagcaagaaggccagccccgaggccgccagcacccccagagaccccatcgacgtggacctgcccgaggaggccgagagagtgaaggcccaggtgcaggccctgggcctggccgaggcccagcccatggccgtggtgcagagcgtgcccggcgcccaccccgtgcccgtgtacgccttcagcatcaagggccccagctacggcgaggacgtgagcaacaccaccaccgcccagaagagaaagtgcagccagacccagtgccccagaaaggtgatcaagatggagagcgaggagggcaaggaggccagactggccagaagcagccccgagcagcccagacccagcaccagcaaggccgtgagccccccccacctggacggcccccccagccccagaagccccgtgatcggcagcgaggtgttcctgcccaacagcaaccacgtggccagcggcgccggcgaggccgaggagagagtggtggtgatcagcagcagcgaggacagcgacgccgagaacagcagcagcagagagctggacgacagcagcagcgagagcagcgacctgcagctggagggccccagcaccctgagagtgctggacgagaacctggccgacccccaggccgaggacagacccctggtgttcttcgacctgaagatcgacaacgagacccagaagatcagccagctggccgccgtgaacagagagagcaagttcagagtggtgatccagcccgaggccttcttcagcatctacagcaaggccgtgagcctggaggtgggcctgcagcacttcctgagcttcctgagcagcatgagaagacccatcctggcctgctacaagctgtggggccccggcctgcccaacttcttcagagccctggaggacatcaacagactgtgggagttccaggaggccatcagcggcttcctggccgccctgcccctgatcagagagagagtgcccggcgccagcagcttcaagctgaagaacctggcccagacctacctggccagaaacatgagcgagagaagcgccatggccgccgtgctggccatgagagacctgtgcagactgctggaggtgagccccggcccccagctggcccagcacgtgtaccccttcagcagcctgcagtgcttcgccagcctgcagcccctggtgcaggccgccgtgctgcccagagccgaggccagactgctggccctgcacaacgtgagcttcatggagctgctgagcgcccacagaagagacagacagggcggcctgaagaagtacagcagatacctgagcctgcagaccaccaccctgccccccgcccagcccgccttcaacctgcaggccctgggcacctacttcgagggcctgctggagggccccgccctggccagagccgagggcgtgagcacccccctggccggcagaggcctggccgagagagccagccagcagagctag

SEQ ID NO: 227930 - DNA, 1332 bp, Artificial Sequence
  derived and/or modified sequence
atggccgtggtgcagagcgtgcccggcgcccaccccgtgcccgtgtacgccttcagcatcaagggccccagctacggcgaggacgtgagcaacaccaccaccgcccagaagagaaagtgcagccagacccagtgccccagaaaggtgatcaagatggagagcgaggagggcaaggaggccagactggccagaagcagccccgagcagcccagacccagcaccagcaaggccgtgagccccccccacctggacggcccccccagccccagaagccccgtgatcggcagcgaggtgttcctgcccaacagcaaccacgtggccagcggcgccggcgaggccgaggagagagtggtggtgatcagcagcagcgaggacagcgacgccgagaacagcagcagcagagagctggacgacagcagcagcgagagcagcgacctgcagctggagggccccagcaccctgagagtgctggacgagaacctggccgacccccaggccgaggacagacccctggtgttcttcgacctgaagatcgacaacgagacccagaagatcagccagctggccgccgtgaacagagagagcaagttcagagtggtgatccagcccgaggccttcttcagcatctacagcaaggccgtgagcctggaggtgggcctgcagcacttcctgagcttcctgagcagcatgagaagacccatcctggcctgctacaagctgtggggccccggcctgcccaacttcttcagagccctggaggacatcaacagactgtgggagttccaggaggccatcagcggcttcctggccgccctgcccctgatcagagagagagtgcccggcgccagcagcttcaagctgaagaacctggcccagacctacctggccagaaacatgagcgagagaagcgccatggccgccgtgctggccatgagagacctgtgcagactgctggaggtgagccccggcccccagctggcccagcacgtgtaccccttcagcagcctgcagtgcttcgccagcctgcagcccctggtgcaggccgccgtgctgcccagagccgaggccagactgctggccctgcacaacgtgagcttcatggagctgctgagcgcccacagaagagacagacagggcggcctgaagaagtacagcagatacctgagcctgcagaccaccaccctgccccccgcccagcccgccttcaacctgcaggccctgggcacctacttcgagggcctgctggagggccccgccctggccagagccgagggcgtgagcacccccctggccggcagaggcctggccgagagagccagccagcagagctag

SEQ ID NO: 227931 - DNA, 2598 bp, Artificial Sequence
  derived and/or modified sequence
atggagcccgcccccgccagaagccccagaccccagcaggaccccgccagaccccaggagcccaccatgcccccccccgagacccccagcgagggcagacagcccagccccagccccagccccaccgagagagcccccgccagcgaggaggagttccagttcctgagatgccagcagtgccaggccgaggccaagtgccccaagctgctgccctgcctgcacaccctgtgcagcggctgcctggaggccagcggcatgcagtgccccatctgccaggccccctggcccctgggcgccgacacccccgccctggacaacgtgttcttcgagagcctgcagagaagactgagcgtgtacagacagatcgtggacgcccaggccgtgtgcaccagatgcaaggagagcgccgacttctggtgcttcgagtgcgagcagctgctgtgcgccaagtgcttcgaggcccaccagtggttcctgaagcacgaggccagacccctggccgagctgagaaaccagagcgtgagagagttcctggacggcaccagaaagaccaacaacatcttctgcagcaaccccaaccacagaacccccaccctgaccagcatctactgcagaggctgcagcaagcccctgtgctgcagctgcgccctgctggacagcagccacagcgagctgaagtgcgacatcagcgccgagatccagcagagacaggaggagctggacgccatgacccaggccctgcaggagcaggacagcgccttcggcgccgtgcacgcccagatgcacgccgccgtgggccagctgggcagagccagagccgagaccgaggagctgatcagagagagagtgagacaggtggtggcccacgtgagagcccaggagagagagctgctggaggccgtggacgccagataccagagagactacgaggagatggccagcagactgggcagactggacgccgtgctgcagagaatcagaaccggcagcgccctggtgcagagaatgaagtgctacgccagcgaccaggaggtgctggacatgcacggcttcctgagacaggccctgtgcagactgagacaggaggagccccagagcctgcaggccgccgtgagaaccgacggcttcgacgagttcaaggtgagactgcaggacctgagcagctgcatcacccagggcaaggacgccgccgtgagcaagaaggccagccccgaggccgccagcacccccagagaccccatcgacgtggacctgcccgaggaggccgagagagtgaaggcccaggtgcaggccctgggcctggccgaggcccagcccatggccgtggtgcagagcgtgcccggcgcccaccccgtgcccgtgtacgccttcagcatcaagggccccagctacggcgaggacgtgagcaacaccaccaccgcccagaagagaaagtgcagccagacccagtgccccagaaaggtgatcaagatggagagcgaggagggcaaggaggccagactggccagaagcagccccgagcagcccagacccagcaccagcaaggccgtgagccccccccacctggacggcccccccagccccagaagccccgtgatcggcagcgaggtgttcctgcccaacagcaaccacgtggccagcggcgccggcgaggccgaggagagagtggtggtgatcagcagcagcgaggacagcgacgccgagaacagcagcagcagagagctggacgacagcagcagcgagagcagcgacctgcagctggagggccccagcaccctgagagtgctggacgagaacctggccgacccccaggccgaggacagacccctggtgttcttcgacctgaagatcgacaacgagacccagaagatcagccagctggccgccgtgaacagagagagcaagttcagagtggtgatccagcccgaggccttcttcagcttcctgagcagcatgagaagacccatcctggcctgctacaagctgtggggccccggcctgcccaacttcttcagagccctggaggacatcaacagactgtgggagttccaggaggccatcagcggcttcctggccgccctgcccctgatcagagagagagtgcccggcgccagcagcttcaagctgaagaacctggcccagacctacctggccagaaacatgagcgagagaagcgccatggccgccgtgctggccatgagagacctgtgcagactgctggaggtgagccccggcccccagctggcccagcacgtgtaccccttcagcagcctgcagtgcttcgccagcctgcagcccctggtgcaggccgccgtgctgcccagagccgaggccagactgctggccctgcacaacgtgagcttcatggagctgctgagcgcccacagaagagacagacagggcggcctgaagaagtacagcagatacctgagcctgcagaccaccaccctgccccccgcccagcccgccttcaacctgcaggccctgggcacctacttcgagggcctgctggagggccccgccctggccagagccgagggcgtgagcacccccctggccggcagaggcctggccgagagagccagccagcagagctag

SEQ ID NO: 227932 - DNA, 2649 bp, Artificial Sequence
  derived and/or modified sequence
atggagcctgctcctgcaaggtcccctcgcccccagcaggaccccgccagaccacaggagcccactatgcctccgcctgaaactccttcggaaggtcgccagccctcaccgtccccatcacccaccgagcgcgctcctgcgtctgaagaggaatttcagtttctacggtgccagcagtgtcaggccgaggcaaagtgcccaaaactgctgccctgcttgcatactctttgcagcggctgtcttgaggcttccggaatgcagtgccccatctgtcaagccccttggcccctgggcgcagatactcccgctctcgacaatgtgttttttgagtccctgcagcgcagacttagcgtgtataggcagatagtcgatgcccaggccgtgtgtactcgatgtaaagaatccgcagatttttggtgttttgaatgtgagcagcttctgtgtgcgaagtgttttgaggcacaccaatggttccttaagcacgaggcacggccactggccgaactgcgaaatcagtctgtccgagagtttctagatgggacgagaaaaacaaacaatattttctgtagtaaccccaatcaccggacgcctactctgaccagcatttactgtagagggtgttccaaacctctctgctgcagttgcgcgctcctggattcatcccatagcgaactgaaatgtgatatttccgcagagattcagcagcgacaggaagagctggacgcaatgacacaggcgctccaggagcaggactctgccttcggcgctgtccatgcccagatgcacgctgcagtgggtcaactgggtcgtgcccgcgccgaaaccgaggagctgattcgtgagcgggtgcgacaagtcgtcgcccatgtccgtgctcaagaaagagaactgctggaggcggtggacgcgcggtaccagcgcgattatgaagaaatggctagcagattgggcaggcttgatgccgtactacaacgaattaggaccggctctgcccttgtgcagaggatgaagtgctacgcctcagatcaggaggtgctggacatgcatgggtttttgagacaggccctgtgccgattaagacaggaagagccccagtccctgcaggccgccgtcagaaccgatggcttcgatgagttcaaagtcagactgcaggacttatcttcttgcattactcagggaaaggatgctgccgtgagcaaaaaggctagcccggaggctgctagtacgcctagggatccaatagacgtcgatttgcccgaagaggccgagcgcgtaaaggctcaggttcaggccctcgggttggctgaggctcagccaatggccgtggtgcagtcagtgcctggggctcacccagtgcctgtgtacgctttttccatcaagggtcccagctatggagaagacgtctctaatacgactacagctcagaaacgaaagtgctcacagacccaatgccctcggaaggtaatcaaaatggaatcagaggaaggaaaagaggcccgattagcaagatcatcccctgaacaacccaggcccagcacttcaaaggctgtttcaccaccccatctggatggcccacctagtccccggagccctgtcatcggttccgaggtgtttctgcctaatagcaatcacgttgctagtggggccggcgaagccgaggaaagggtggtggtgatcagcagttcagaagattccgatgccgagaattcatcctccagggagctggatgacagtagttccgagtcctcagatttacagctggagggcccctccacactgcgggttctggacgaaaacttggccgatccgcaagcggaagatcgcccacttgttttcttcgaccttaagatcgataatgagacacagaagatcagtcagttggccgcggtaaaccgagaatccaaatttcgggtggtgatccagcctgaagcctttttctccatctactcaaaggctgtatcacttgaggttggcctccagcacttcctttccttcctgagttcaatgcggcggcctattttggcatgctataaactctggggccccggcctgccgaactttttcagggcattagaggatatcaacaggctatgggagttccaagaagctattagtggttttctcgccgctctccctttaatccgcgaacgcgttcccggtgcctctagtttcaaattgaaaaatctggcccagacatatttggcgagaaacatgtccgaaagatccgcaatggctgccgttctggccatgagggacctgtgccggctgctggaagtctctcccggaccacagctggcccagcacgtctacccgtttagctcactgcagtgctttgcctctttacaacctctggtgcaggctgccgtgttaccccgagcggaggcaagactgctcgctttgcacaacgtgagcttcatggagttgctgtctgcccaccgaagagatcgtcaagggggcctcaaaaagtatagtagatacctgtctctgcagacaactacactccctcccgctcagcctgcgttcaatttgcaggcgttaggcacttactttgaaggtttgctggaaggtccagccctggcccgagctgaaggagtttccacccctcttgcaggccggggcctcgcagagcgggcctcacagcagtcatag

SEQ ID NO: 227933 - DNA, 1332 bp, Artificial Sequence
  derived and/or modified sequence
atggccgtggtgcagtcagtcccaggagcccatccagtgcccgtctacgccttttcaattaagggtccctcctatggcgaagacgtttctaacaccactacagcacagaaacggaagtgtagccaaactcagtgcccgcgcaaggttattaaaatggagtccgaggaggggaaggaagcacgcttggcaagatcttctcccgaacaacctagacccagcacatccaaggcagtgtcaccgccgcatctagatggtccccctagcccccggtcgcccgttatcggctccgaagttttccttccgaatagcaatcatgtggcttcaggagccggggaggccgaggagcgggtcgtggtaatctcctcaagtgaggactcagacgccgaaaactcaagttctcgggaactggacgactcaagcagtgagagctcagacctccagctcgagggtccctccactttgcgggttctggacgaaaacctcgccgacccccaggcggaagatagaccattggtctttttcgacctgaagattgacaacgagacgcagaaaatctcccagcttgctgctgtgaatagagaaagtaagttccgcgtcgtcattcagccagaagcattttttagtatctactccaaggccgttagtttggaagtggggttgcagcactttctctcatttctgagctctatgcggcgcccaatcttggcttgctacaagctgtggggccccgggctcccgaacttctttcgcgctttagaagatatcaataggctgtgggaatttcaagaggctatcagcggattcctcgcggcattacctttgatacgagagcgcgttccaggggcctcttcgtttaagcttaagaaccttgctcagacatatctggcccgtaacatgagtgaacgatccgctatggctgcggtgctggcaatgagggacctttgtaggctgttagaagtgtcacccggacctcagctcgcccagcacgtgtacccgttttctagcctgcagtgctttgcctccctccaacctttagtgcaagctgccgtccttccaagggcggaggcccgtcttctagcattacacaacgtcagcttcatggagctgctcagcgctcacaggagggacagacaaggaggacttaagaagtacagtcggtacctttcactacagaccaccaccttgccaccagcccaacccgcatttaacctccaggccctggggacctacttcgagggcctacttgaggggcccgccctggcgagggcagaaggggtatccacgcccctggctggcaggggtttggctgaacgcgcgtcccaacaaagctag

SEQ ID NO: 227934 - DNA, 2598 bp, Artificial Sequence
  derived and/or modified sequence
atggagccagcacctgctaggagccctcgaccacagcaggaccccgcacgacctcaggaacctactatgcccccacccgagacccctagtgaagggaggcagccaagcccctctcctagcccgaccgaacgggctcctgcaagtgaggaggaattccagttcctgcggtgccagcagtgccaggcagaagccaagtgcccgaaattgctcccatgcttgcacactctgtgttctggctgtctggaggcctcaggcatgcagtgtcccatctgtcaggccccgtggcccttaggtgccgataccccagcgctagataacgtcttctttgaatcactgcagcgtcgcttgtcagtgtatcggcagatcgttgacgcacaggccgtgtgcacacgatgcaaagagagcgccgatttttggtgcttcgaatgcgagcagctactttgtgctaagtgttttgaagcccaccagtggttcctgaaacatgaggcccgcccgctcgccgagttgcgtaaccagtctgtacgcgagtttttggatggaacccgcaagacgaacaacatcttctgttctaatcctaaccacagaacccccactctgacctccatctattgccgcggctgttccaagcctctgtgttgctcttgcgcccttctggactcatcccacagcgagttaaaatgcgacatcagcgccgaaattcagcaacggcaggaggaactggatgccatgacccaggccctgcaagaacaggacagtgctttcggagcagttcacgctcagatgcatgccgcagtgggacagctgggtagggctagggccgaaaccgaagagttaattagggagcgcgtgcgccaggtggtggcccatgtccgggctcaggaaagagagctgttggaagccgtggacgccaggtaccagcgggattacgaagaaatggcttcgagactgggcagactcgatgccgtcttgcagagaatccgtacaggatcagctttagtccagcgcatgaaatgctacgcctctgatcaggaagtccttgacatgcatggcttccttaggcaggccttgtgcagactgcgacaggaggagcctcagagcctgcaggccgccgttagaacagacggtttcgacgagttcaaggtcagactgcaggatctgtcatcttgtatcacccaggggaaagatgcggccgtctcaaagaaagcaagcccggaggccgcttcgactccacgggaccctattgacgtggacctgcccgaggaggctgagagagttaaggcgcaggtccaggctctgggcttggccgaagcacagccaatggccgtggtacagagcgttccgggcgctcaccctgtccccgtgtacgcattctcaatcaagggcccctcgtacggcgaggacgtgtcgaatacgaccaccgcgcagaaacggaaatgttcccagacccagtgtccacggaaagtcattaagatggagagtgaagaaggcaaggaagctagactcgcacgcagctctcccgaacaaccaagaccaagcaccagcaaagccgtctctcccccccaccttgacgggcccccaagtccacggtcacccgtgatcggaagcgaggtgtttctccctaatagtaaccacgtggcgtccggagcaggagaggcagaggagcgtgtggtggtcatatcttcaagcgaggattctgacgctgagaatagcagtagcagagagctggatgactcaagctctgaaagttccgatctgcagctcgagggcccatccacactacgcgtactggacgaaaatctcgcagatcctcaggccgaagatcggcccctagtatttttcgatcttaaaattgacaacgagacccagaaaatctcacaactggcggctgttaaccgggagtctaagtttcgggttgtgatccaacccgaggctttcttttcgttcctgagcagtatgagacggcccattctggcatgctataagctttgggggcctggtctacctaatttttttcgagccctggaagacattaaccgcctgtgggaatttcaggaagctattagcggcttcctggctgccctgcccctgattcgggagagagttcctggagcatctagcttcaaattgaagaatttggcccagacttacctagcccgtaacatgtctgaaagatctgccatggccgccgtgctggccatgcgcgatttgtgcaggctcctggaagttagcccaggaccacagctggctcagcatgtgtatcctttttcatccctccagtgcttcgctagtcttcagccacttgtgcaggcagccgttctcccaagagcggaggcccggctccttgcactgcacaacgtttcatttatggaattactgtctgctcaccggcgggatcgccaaggtggcctgaaaaagtatagccgctacctatccttacaaaccaccaccttacccccagcacagcctgcgtttaacttacaggcattgggtacctacttcgagggactgttggaaggccctgctctagcacgcgccgagggtgtgtctacccctctggcaggacggggccttgccgagagggcctctcagcagtcctag

SEQ ID NO: 227935 - DNA, 2649 bp, Artificial Sequence
  derived and/or modified sequence
atggagcccgccccagcccggagcccccggccccagcaggaccctgcccggccccaggagcccaccatgcctcctcctgagacccccagcgagggccggcagcccagccccagccccagccccacagagcgggccccagccagcgaggaggagttccagttcctgcgctgccagcagtgccaggccgaggccaagtgccccaagctgctgccctgcctgcacaccctgtgcagcggctgcctggaggccagcggcatgcagtgccccatctgccaggccccctggcccctgggcgctgacaccccagccctggacaacgtgttctttgagagcctgcagaggcggctgtctgtgtaccggcagatcgtggatgcccaggccgtgtgcacccgctgcaaggagagcgctgacttctggtgctttgaatgtgagcagctgctgtgtgccaagtgctttgaggcccaccagtggttcctgaagcatgaggcccggcccctggccgagctgaggaaccagagcgtgcgggagttcctggatggcaccaggaagaccaacaacatcttctgcagcaaccccaaccacaggacccccaccctgaccagcatctactgccggggctgcagcaagcccctgtgctgcagctgtgccctgctggacagcagccacagcgagctgaagtgtgacatctctgctgagatccagcagaggcaggaggagctggatgccatgacccaggccctgcaggagcaggacagcgccttcggggctgtgcacgcccagatgcatgctgctgtgggccagctgggccgggcccgggcagagacagaggagctgatccgggagcgggtgcggcaggtggtggcccacgtgcgggcccaggagcgggagctgctggaggccgtggatgcccgctaccagagggactatgaggagatggccagccggctgggccgcctggatgctgtgctgcagaggatcagaacaggcagcgccctggtgcagaggatgaagtgctacgccagtgaccaggaggtgctggacatgcacggcttcctgcggcaggccctgtgccgcctgcggcaggaggagccccagagcctgcaggccgctgtgaggacagatggctttgatgagttcaaggtgcggctgcaggacctgagcagctgcatcacccagggcaaggatgctgctgtgtccaagaaggccagccctgaggccgccagcaccccccgggaccccattgatgtggacctgcctgaggaggccgagcgggtgaaggcccaggtgcaggccctgggcctggccgaggcccagcccatggctgtggtgcagagcgtgcctggggcccaccctgtgcctgtgtatgccttcagcatcaagggccccagctatggagaagatgtgagcaacaccaccacagcccagaagaggaagtgcagccagacccagtgccccaggaaggtgatcaagatggagagcgaggagggcaaggaggcccggctggcccggagcagccctgagcagccccggcccagcaccagcaaggctgtgtccccaccccacctggatggcccccccagccccaggagccctgtgattggcagcgaggtgttcctgcccaacagcaaccacgtggccagcggggccggggaggccgaggagcgggtggtggtgatcagcagcagtgaagattctgatgctgagaacagcagcagccgggagctggatgacagcagcagcgagagcagtgacctgcagctggagggccccagcaccctgcgggtgctggatgagaacctggccgacccccaggccgaggaccggcccctggtgttctttgacctgaagattgacaatgagacccagaagatcagccagctggccgctgtgaaccgggagagcaagttccgggtggtgatccagcctgaggccttcttcagcatctacagcaaggctgtgtccctggaggtgggcctgcagcacttcctgtccttcctgagctccatgaggcggcccatcctggcctgctacaagctgtggggccctggcctgcccaacttcttccgggccctggaggacatcaaccggctgtgggagttccaggaggccatcagcggcttcctggccgccctgcccctcatccgggagcgggtgcctggggccagcagcttcaagctgaagaacctggcccagacctacctggccaggaacatgtctgagaggtctgccatggctgctgtgctggccatgagggacctgtgccgcctgctggaggtgtccccaggcccccagctggcccagcacgtgtaccccttcagcagcctgcagtgctttgccagcctgcagcccctggtgcaggccgctgtgctgcccagggctgaggcccggctgctggccctgcacaacgtgtccttcatggagctgctgagcgcccacagaagagaccggcagggcggcctgaagaagtacagccgctacctgagcctgcagaccaccaccctgcccccagcccagcctgccttcaacctgcaggccctgggcacctactttgagggcctgctggagggccctgccctggcccgggcagagggcgtgtccacccccctggccggccggggcctggccgagcgggccagccagcagagctag

SEQ ID NO: 227936 - DNA, 1332 bp, Artificial Sequence
  derived and/or modified sequence
atggctgtggtgcagagcgtgcctggggcccaccctgtgcctgtgtatgccttcagcatcaagggccccagctatggagaagatgtgagcaacaccaccacagcccagaagaggaagtgcagccagacccagtgccccaggaaggtgatcaagatggagagcgaggagggcaaggaggcccggctggcccggagcagccctgagcagccccggcccagcaccagcaaggctgtgagccccccccacctggatggcccccccagccccaggagccctgtgattggcagcgaggtgttcctgcccaacagcaaccacgtggccagcggggccggggaggccgaggagcgggtggtggtgatcagcagcagcgaggacagtgatgctgagaacagcagcagccgggagctggatgacagcagcagcgagagcagtgacctgcagctggagggccccagcaccctgcgggtgctggatgagaacctggccgacccccaggctgaagatcggcccctggtgttctttgacctgaagattgacaatgagacccagaagatcagccagctggccgctgtgaaccgggagagcaagttccgggtggtgatccagcctgaggccttcttcagcatctacagcaaggctgtgtccctggaggtgggcctgcagcacttcctgtccttcctgagctccatgagaagacccatcctggcctgctacaagctgtggggccctggcctgcccaacttcttccgggccctggaggacatcaaccggctgtgggagttccaggaggccatcagcggcttcctggccgccctgcccctcatccgggagcgggtgcctggggccagcagcttcaagctgaagaacctggcccagacctacctggccaggaacatgtctgagaggtctgccatggctgctgtgctggccatgagggacctgtgccgcctgctggaggtgtccccaggcccccagctggcccagcacgtgtaccccttcagcagcctgcagtgctttgccagcctgcagcccctggtgcaggccgctgtgctgcccagggctgaggcccggctgctggccctgcacaacgtgtccttcatggagctgctgagcgcccaccggcgggaccggcagggcggcctgaagaagtacagccgctacctgagcctgcagaccaccaccctgcccccagcccagcctgccttcaacctgcaggccctgggcacctactttgagggcctgctggagggccctgccctggcccgggcagagggcgtgtccacccccctggccggccggggcctggccgagcgggccagccagcagagctag

SEQ ID NO: 227937 - DNA, 2598 bp, Artificial Sequence
  derived and/or modified sequence
atggagcccgccccagcccggagcccccggccccagcaggaccctgcccggccccaggagcccaccatgcctcctcctgagacccccagcgagggccggcagcccagccccagccccagccccacagagcgggccccagccagcgaggaggagttccagttcctgcgctgccagcagtgccaggccgaggccaagtgccccaagctgctgccctgcctgcacaccctgtgcagcggctgcctggaggccagcggcatgcagtgccccatctgccaggccccctggcccctgggcgctgacaccccagccctggacaacgtgttctttgagagcctgcagaggcggctgtctgtgtaccggcagatcgtggatgcccaggccgtgtgcacccgctgcaaggagagcgctgacttctggtgctttgaatgtgagcagctgctgtgtgccaagtgctttgaggcccaccagtggttcctgaagcatgaggcccggcccctggccgagctgaggaaccagagcgtgcgggagttcctggatggcaccaggaagaccaacaacatcttctgcagcaaccccaaccacaggacccccaccctgaccagcatctactgccggggctgcagcaagcccctgtgctgcagctgtgccctgctggacagcagccacagcgagctgaagtgtgacatctctgctgagatccagcagaggcaggaggagctggatgccatgacccaggccctgcaggagcaggacagcgccttcggggctgtgcacgcccagatgcatgctgctgtgggccagctgggccgggcccgggcagagacagaggagctgatccgggagcgggtgcggcaggtggtggcccacgtgcgggcccaggagcgggagctgctggaggccgtggatgcccgctaccagagggactatgaggagatggccagccggctgggccgcctggatgctgtgctgcagaggatcagaacaggcagcgccctggtgcagaggatgaagtgctacgccagtgaccaggaggtgctggacatgcacggcttcctgcggcaggccctgtgccgcctgcggcaggaggagccccagagcctgcaggccgctgtgaggacagatggctttgatgagttcaaggtgcggctgcaggacctgagcagctgcatcacccagggcaaggatgctgctgtgtccaagaaggccagccctgaggccgccagcaccccccgggaccccattgatgtggacctgcctgaggaggccgagcgggtgaaggcccaggtgcaggccctgggcctggccgaggcccagcccatggctgtggtgcagagcgtgcctggggcccaccctgtgcctgtgtatgccttcagcatcaagggccccagctatggagaagatgtgagcaacaccaccacagcccagaagaggaagtgcagccagacccagtgccccaggaaggtgatcaagatggagagcgaggagggcaaggaggcccggctggcccggagcagccctgagcagccccggcccagcaccagcaaggctgtgtccccaccccacctggatggcccccccagccccaggagccctgtgattggcagcgaggtgttcctgcccaacagcaaccacgtggccagcggggccggggaggccgaggagcgggtggtggtgatcagcagcagtgaagattctgatgctgagaacagcagcagccgggagctggatgacagcagcagcgagagcagtgacctgcagctggagggccccagcaccctgcgggtgctggatgagaacctggccgacccccaggccgaggaccggcccctggtgttctttgacctgaagattgacaatgagacccagaagatcagccagctggccgctgtgaaccgggagagcaagttccgggtggtgatccagcctgaggccttcttctccttcctgagctccatgagaagacccatcctggcctgctacaagctgtggggccctggcctgcccaacttcttccgggccctggaggacatcaaccggctgtgggagttccaggaggccatcagcggcttcctggccgccctgcccctcatccgggagcgggtgcctggggccagcagcttcaagctgaagaacctggcccagacctacctggccaggaacatgtctgagaggtctgccatggctgctgtgctggccatgagggacctgtgccgcctgctggaggtgtccccaggcccccagctggcccagcacgtgtaccccttcagcagcctgcagtgctttgccagcctgcagcccctggtgcaggccgctgtgctgcccagggctgaggcccggctgctggccctgcacaacgtgtccttcatggagctgctgagcgcccaccggcgggaccggcagggcggcctgaagaagtacagccgctacctgagcctgcagaccaccaccctgcccccagcccagcctgccttcaacctgcaggccctgggcacctactttgagggcctgctggagggccctgccctggcccgggcagagggcgtgtccacccccctggccggccggggcctggccgagcgggccagccagcagagctag

SEQ ID NO: 227938 - DNA, 2649 bp, Artificial Sequence
  derived and/or modified sequence
atggagcccgcccccgcccggagcccccggccccagcaggaccccgcacggcctcaggagccaaccatgccacctcccgagactcccagtgaagggcgccaaccttcgccatctccaagcccaaccgaacgagcccctgcctcagaagaagagtttcagttcctcagatgtcaacagtgtcaggctgaggcaaagtgccctaagctgctaccctgcctgcacacactttgtagcggctgcttagaagcttccggtatgcagtgcccgatttgtcaggcaccttggcccctgggcgccgatactccagcactggataacgtcttctttgaatctctccagaggcgactgtcagtctaccggcagattgtggacgcccaggctgtgtgtaccaggtgcaaagagtcagctgatttttggtgtttcgagtgcgaacaattactgtgcgcgaagtgtttcgaggcacatcagtggtttctgaaacatgaggcccggcccctggctgagcttagaaaccagtcagtgcgcgagtttctggacgggaccagaaaaacaaataacattttctgttccaacccgaatcaccggacacctacgttaacatctatctactgtcggggctgcagcaagcccctttgctgttcatgcgcgctcctagactctagtcattccgaactgaagtgcgacatctccgcagaaatccagcaacgacaagaagaactggatgctatgacccaggcgctgcaagaacaggatagcgctttcggcgccgtgcatgcacagatgcacgcagctgtgggccaactggggagagctcgagccgaaactgaagagttgatccgagagcgggtaagacaagtcgtggcccacgtgagagctcaagagcgggaattgctcgaggccgttgacgctaggtaccagcgcgactatgaggagatggcttcaaggttgggccggcttgatgccgtcctgcaaaggatccgcaccggctcagctctcgtacagcgcatgaagtgttacgcgagtgatcaggaagtgttggacatgcacggtttcctgcggcaggctttgtgccgccttcgacaggaggaaccccagagcttgcaggctgcagtccgtactgacggattcgatgaattcaaggtgcggctgcaagacctcagctcatgcatcactcaggggaaagacgcagccgtaagtaagaaggcgagccctgaagctgcttctactcctagagaccccattgacgttgacctaccagaggaggccgagagagtcaaagcccaagtgcaggcattagggctggccgaggcccaacccatggccgtcgtccaaagcgttcctggagctcatccggtccccgtgtacgccttttctattaagggcccttcttacggtgaggacgttagcaatacaacgacagcccagaaacgcaagtgctctcaaactcagtgtccgcggaaggtcattaaaatggaaagtgaggaggggaaagaagcccgcttggcaagaagctctcccgagcagcctcggcctagcactagtaaagctgtctcaccacctcacctggacggacctcccagccctaggagccccgtgattggcagcgaggtatttctccccaattccaatcatgtcgcatccggtgccggcgaagccgaagagagagtggtcgtgatctcgagcagcgaagactccgatgccgaaaactctagctctcgggagctcgatgactcttcgtctgaaagctccgacctgcagctggagggccctagcactctgagagtactcgacgagaatctcgcagacccccaggcggaggacagacccctggtgttttttgatctgaaaatagataacgagacgcagaaaatcagtcaacttgctgctgtcaatcgagaatcgaagttcagagtggtgatccagcctgaagccttcttttcaatatactccaaggctgtgagcttagaagtcgggctacagcactttttgtcatttctgtcctccatgcgacgtcccatcctggcctgttacaaattatggggccctggcctgcctaattttttccgcgccctggaggatattaaccgcctttgggaatttcaggaggccatttccgggtttctcgcagccctcccgttaatccgtgaaagagttcccggtgcttcgagttttaaactgaagaatttggcccagacttatctggcccgcaacatgagtgagcggtccgccatggcggccgtgcttgcaatgagggacctctgtagactgctagaggtgtcaccaggcccccagctggcacaacacgtgtacccattcagtagtctacagtgttttgcgagcctgcagccactggtgcaggcagccgtgctccccagggcggaggcccgcctcttggctctgcacaacgtgagcttcatggagctgctgtctgcacacaggcgggatcggcaaggcggccttaagaaatatagcaggtacctttctcttcagactactaccctgcccccagcgcagcccgctttcaatttgcaggcactgggtacctacttcgaggggctgctcgaaggaccagcactggcaagagccgaaggagtgagtaccccactcgcgggccgcggattggctgaaagggcctctcaacagtcctag

SEQ ID NO: 227939 - DNA, 1332 bp, Artificial Sequence
  derived and/or modified sequence
atggccgtggtgcagagcgtgcccggcgcccaccccgtgcccgtgtacgccttctctatcaagggccccagctacggtgaagatgtgtctaacacaacaacggcacaaaagcgcaagtgcagtcagacccaatgtcctagaaaagtcatcaagatggagagtgaggaaggcaaagaagcgagactcgctagatcctcacccgaacagcctaggccatctacatcaaaagccgtcagcccgccccatcttgatggtccgccatcccctcgatctccagtcattggatccgaggtctttctgcccaattcaaatcacgtggcctcaggagccggtgaggctgaggagcgtgtagtagtgatcagcagtagtgaagacagcgatgcagagaacagctcctccagagagctcgatgactccagttcagagtcctcagatctgcagctagagggccccagcacattgagggtgttggatgagaacttagcagatccacaagcagaggatcggcccctggtgtttttcgacctgaaaatagacaacgaaacacagaagattagtcagctggcggctgttaacagagagtcaaagtttcgcgtggtcatccagccagaggccttctttagcatttattccaaggcagtgtcactggaagtgggattgcagcactttctgagttttctctccagtatgcggcgacctatccttgcctgctataagctgtgggggcccggcttgcctaacttcttcagggctttggaagacattaaccgcctttgggagttccaggaggccatctcgggatttctggccgcactccccctaatccgggagcgggtgcccggcgcctccagctttaagctgaagaatctcgctcaaacttatctggcccgcaacatgagcgaacgctccgcgatggctgcggtgcttgccatgagagatctttgccgactgctcgaggtgagtcctgggccccagctggcccaacacgtgtaccccttctccagtctgcagtgcttcgcaagcctccagccgcttgtccaggcagctgtcctccctcgcgctgaggctcgactgctagcgctgcacaatgtgtcattcatggagctcctgtccgcccatagaagggaccggcagggcgggctgaagaaatactcaagatatctgtccctgcaaactacgactttaccgccagcccagcctgcttttaacctccaggcccttggcacttactttgaaggcctccttgaagggcccgccttagccagggccgagggagtttccacccccctggctggacgcggacttgctgagagggcttctcaacagagttag

SEQ ID NO: 227940 - DNA, 2598 bp, Artificial Sequence
  derived and/or modified sequence
atggagcccgcccccgcccggagcccccggccccagcaggaccccgctaggcctcaagaacccactatgcctcctccagagacaccaagcgagggcaggcagccgagtcccagcccgagccccactgagagggcacccgcatcagaagaagagttccagttcctacggtgccagcaatgtcaagccgaagctaagtgtccaaagctactcccatgtctccacacactctgtagcggctgtttagaggcctccggtatgcagtgtcctatctgccaggcaccctggccccttggtgcggacactccggcccttgacaacgtcttctttgagtctttgcaacgcaggctaagtgtgtacagacaaatcgtggatgctcaagcagtctgcactcgctgtaaagagagtgccgacttttggtgcttcgaatgcgagcagctgttatgtgccaagtgttttgaggctcaccaatggtttctgaagcacgaagctaggcctctagctgaattacgaaaccaaagcgtcagggagttcctagacggaactcgaaagacaaacaacattttttgttctaaccccaatcaccggacccccacactgaccagcatttattgcagagggtgctccaagcctctttgttgttcatgcgccctgctggacagctcacatagcgagctgaaatgtgatatctcggccgagatccaacagcggcaagaagaactggatgccatgacgcaagccctgcaggagcaggattcagctttcggggctgtccatgctcaaatgcatgccgccgtcggccagttgggcagagcccgcgccgaaactgaggaacttatccgcgagagagtcaggcaggtggtcgcccacgtgcgagcccaggagagggaactgcttgaggctgtggacgcaaggtatcaacgggattatgaggagatggctagcagactagggcggctcgatgccgtgctccaaaggatccggaccggatcagccctggttcaaaggatgaagtgctatgcatcagaccaggaagtcttggacatgcacgggtttctacggcaggcactgtgtcggctccggcaggaagaaccccagtcattgcaagccgctgtgcgcactgacggattcgacgagttcaaggtgcgattgcaggatctgtctagttgcatcacacagggaaaggacgcagcagtgtcaaagaaggccagccccgaagccgcctcgactcctcgggaccctattgacgtggacctgcccgaggaggctgagcgagtgaaagcgcaggtgcaggctctcggcttagccgaagctcaaccgatggccgtggttcagtctgtacctggagcccacccagtaccggtctatgcctttagcatcaaagggccctcctacggcgaggacgtctctaacacaactactgcgcagaagaggaaatgctctcagacgcaatgtccgcgcaaggtcattaaaatggagtctgaggaggggaaagaggcacgcctcgcaaggagctctcctgaacagcctaggccaagtacaagcaaggcagtcagtcctccacacctcgatgggccaccctcccctaggtcccctgtgattgggtcagaagtattcctgcctaactcaaaccacgtggccagtggcgcgggtgaagccgaagaacgagtggtggtgatatctagctctgaggacagcgacgcagaaaattcatcctcacgagaactggacgatagttcttccgaaagctcagacctgcagctggagggccccagtacacttcgggtgttggacgaaaatttggcagacccccaggctgaggacagaccgcttgttttctttgatctgaaaatcgataacgaaactcagaagataagtcagctggctgccgtaaatcgcgaaagcaagttcagagtcgtgatccaaccggaggccttttttagcttcctgtcctctatgcgtcggccaatcctggcttgttacaaactatggggcccaggcctcccgaacttttttcgggctttggaggacatcaaccggctctgggaatttcaggaagccatcagcgggtttctcgccgccctccccctgataagagagcgagtacctggcgcttcctcctttaaattaaaaaatctcgcacagacttatctggctcggaacatgtctgagaggtcagcaatggcggccgtactggctatgagagatctttgccgactgctggaggtttcccccggcccccaactagcccagcacgtgtatccattttcctccctgcagtgttttgcctcactgcagccattggtacaggctgcggtgctcccccgggccgaggctaggctgcttgcccttcacaacgtgtcattcatggagttgctctccgcccatcgaagagatcggcagggcggcctgaagaagtattcccgctacctttctctgcagacaacaacactgcctccagctcagcccgccttcaacctccaagccctgggcacatacttcgagggtctccttgagggcccagctttggcaagggccgagggggtgagcacccccctggccggcaggggcctcgccgagcgggccagccagcagagttag

SEQ ID NO: 227941 - DNA, 2649 bp, Artificial Sequence
  derived and/or modified sequence
atggagcccgcaccggcaagatcacctaggccccagcaggacccagctcgacctcaagagccaacaatgcctccgcctgaaactccctccgagggcagacagcctagtccatctccatcacctacagagagggcacccgcatcagaagaagagttccagttcctgcggtgccaacaatgccaggcagaggcgaaatgccctaagctgctgccctgcctccacaccctgtgctctgggtgcctcgaagcgtcgggcatgcaatgccccatatgccaggctccttggcctctaggggcagacactccggcactcgataacgtatttttcgagtccctgcaacgcagactaagcgtttaccggcagattgtagacgcacaggcggtctgtactcgttgtaaggagagtgccgatttctggtgctttgagtgtgaacaactgctctgcgcgaagtgctttgaggcacatcagtggttcttgaaacacgaagctcgccctctggctgagcttcgaaaccaatccgtccgggaattcctcgacggtacaaggaaaacgaacaatattttttgctcaaatccaaatcataggacaccaacacttacttctatttattgcaggggttgctccaagccactgtgttgtagttgcgcattactggacagctctcactccgagttgaaatgtgatataagtgctgaaatacagcaaagacaggaagagttggatgccatgactcaggctttgcaggagcaagacagtgcgttcggggcagttcacgcgcagatgcacgccgcagttggacaactgggacgagctcgtgccgaaacagaggagctgattcgggagcgggttcgtcaggttgttgcccacgttcgcgcacaggaaagagagctgttagaggctgtggacgcgcgttatcagcgggactacgaagaaatggccagtagactaggaagactggacgcagttctgcaacgaatacgaactggtagcgcactggttcagaggatgaaatgctacgctagcgaccaagaagtcctagatatgcacgggttcttaaggcaggccctctgtaggctcagacaggaggagccccaaagcctgcaggctgccgtgcggactgatggcttcgatgagtttaaggtgcgcctacaggatctgtcttcctgtatcacacagggaaaggacgctgccgtctccaagaaagccagcccagaggctgcttccacgcccagagacccaatcgacgtggatctgccggaagaagcagagcgcgtgaaagcacaggtccaagccctcggtctggcggaggcacagcctatggccgtagtgcagtcggtacccggtgcccaccctgtccccgtctacgcattctctatcaaaggaccttcatacggcgaagatgtgtcaaataccactactgcccagaaacgcaaatgcagtcaaacacagtgccctaggaaggtgatcaagatggagtctgaggaggggaaggaggccagactggcccgatctagccccgagcagcccagaccatctacaagtaaagccgtgagtccccctcaccttgatggcccaccgagtcctcggagtcccgtaatcggaagcgaggtattcttgccaaattcaaaccatgtggccagtggcgcaggcgaggcggaggaacgagtagtggtaattagcagtagtgaagattcagatgcggaaaattcttcaagcagggagctcgatgactcttcaagcgagagcagtgacctgcagctggagggaccatccactctcagggttttagatgagaacctcgcagatccacaagctgaggacaggcccctggtctttttcgatttgaaaatcgataatgaaacgcaaaaaattagccagttggcagccgtgaatcgagaatccaaattcagagtagttatacagcccgaggccttctttagcatatatagcaaggcagtatcccttgaggtcgggttgcaacactttttgtcttttctaagctctatgagacgtccaatcctggcatgctacaagctgtgggggccaggtctgccgaactttttccgtgccctcgaggatataaaccgcctttgggaattccaggaggcaatctctggctttctcgctgccttgccactaattcgcgagcgagtgccaggggcaagttcctttaagctgaagaacctcgcccaaacatatttagccagaaacatgtctgaaagaagcgcaatggctgcagtgctggccatgcgggatctctgtcgcctgctggaggtgtcacctggccctcagctcgcacaacacgtctaccctttcagtagtctccagtgctttgctagtctgcagcctttggtgcaggcagcggtcctgcccagggccgaggccaggcttttagccctacataacgtgtccttcatggagcttcttagcgcccatagacgagatcgacaggggggactaaagaaatatagtcggtatctgagcctgcaaacaacaacgctccccccagcacagcctgccttcaatctccaggcgctgggaacttattttgagggactgctggaaggacccgctttggcacgagccgagggcgtcagcacgcctttagccggtaggggtctcgctgaaagggcgtcccagcagtcctag

SEQ ID NO: 227942 - DNA, 1332 bp, Artificial Sequence
  derived and/or modified sequence
atggccgtagtgcagtcagttccaggcgctcaccccgtgccggtttatgctttcagtatcaagggcccttcctacggggaggacgtgtccaataccaccacagcccagaaacggaagtgttctcagacacagtgtccgagaaaagtgattaagatggagagcgaagaaggcaaagaagctcgcctcgcccgtagctcgcccgaacagcctagaccttccacctcaaaagccgtgtcacctccacacctggatggccctcccagcccaagaagccctgtcattggtagtgaagtgttcttacccaattcaaaccacgtagcctcgggagcgggagaggcggaggagcgggtcgtcgtgatttcaagtagcgaagactcagacgctgagaatagtagttcacgggagctcgatgactcatcgagcgaaagcagtgatctgcagctggaggggccatccaccctcagggttcttgacgagaatctagctgacccacaggcggaggaccggcctttggttttttttgatctgaagattgacaatgaaactcagaaaatctctcaattggcagctgtgaaccgcgagtccaagttccgcgtcgttatccagccagaggcctttttttccatctatagcaaggccgtcagcctggaggtgggactgcaacatttcctatctttcctgagcagcatgagaagacccatcctggcctgctacaaattgtggggccctggtctgcccaatttcttccgtgccctcgaggacataaatcggctgtgggagttccaggaggccattagtggattcctcgcagccctgccactgatccgtgaaagggtgcccggtgcctcatccttcaagttgaaaaatctagctcagacttatctggctaggaatatgagcgagcgaagcgccatggccgcagtgttagccatgcgggatctgtgtcggcttttggaggtgtcccctggccctcagctggcacagcatgtgtaccccttttccagcctgcaatgtttcgcatcactccaacctttagtgcaggctgccgtgcttccgcgagctgaggcccgacttcttgctctccacaatgtttcgtttatggagcttctgtccgcccatcgacgagatagacaaggaggattgaaaaagtacagcagatatttatccctccagactacgaccttgccgcctgctcagcccgcttttaacctccaggctttaggcacctacttcgagggactactcgagggcccagccttagccagggctgaaggggtgtctacccctcttgccggacgcggattggccgagcgcgctagccagcagagctag

SEQ ID NO: 227943 - DNA, 2598 bp, Artificial Sequence
  derived and/or modified sequence
atggagcccgcacctgctaggtcacccagaccgcaacaggaccccgcaaggcctcaagaacccaccatgcctccaccggagaccccaagtgagggtcgccaaccaagcccttcccctagtcccacggaacgggctccagcgtctgaggaagagtttcagtttctcagatgccaacagtgtcaggcggaagccaagtgtccgaaactgctcccatgtctgcacaccctgtgcagtggatgcctggaggccagcggcatgcagtgtccaatctgccaggctccttggcccctcggggctgatacccccgctctggataatgtgttcttcgagtcactgcagcgacgcctcagcgtgtatagacagattgtggatgctcaagccgtttgcactcgatgtaaggagagcgctgatttttggtgcttcgagtgtgagcaattgttgtgcgcaaaatgttttgaggcgcatcagtggtttctcaaacatgaggccaggcccttggcagagttgcggaaccagtctgttcgggaattcctcgacgggactcgtaagaccaacaatatcttctgctctaatccaaatcaccgtacacctacacttacctcgatctattgcagagggtgctcaaagcccctgtgttgctcgtgcgccttattggattcatcccactctgagttgaagtgcgatatatcagccgagatccagcaacgacaggaagagctggacgctatgactcaggccctgcaggagcaggatagtgcttttggcgcagtacatgctcaaatgcacgcagccgtgggccagctggggcgagctcgtgcagaaacagaggaactcattagggagcgggtgcgacaggtagttgcgcacgttagggcgcaggaacgtgagctgctcgaggctgtggacgccaggtatcagcgcgattacgaagaaatggcctcacgcctggggaggttggatgccgtcctccaaaggattcgcaccggatctgcattggtgcagcggatgaagtgttacgcttctgaccaggaggtactggacatgcacggcttcctgagacaggccttgtgtagacttcgtcaggaggagcctcagtctctccaggccgcagtccggacagatggattcgatgaattcaaagttagactccaggacctgtcctcctgtattactcagggcaaggatgcagctgtgtccaagaaggcttcacctgaggctgctagcactccaagagacccgattgacgtggacttacctgaagaagctgaaagagtcaaggcacaagtgcaagccctggggctggcggaggcacagcccatggctgtagtgcaatcagttcctggcgcacacccggttcccgtgtatgctttctctatcaaaggccctagttacggagaagacgttagcaacaccacgaccgctcagaagaggaaatgttcccagacccagtgtccacggaaggtcatcaagatggaatcggaggaaggtaaggaggcaagactcgccaggtcttcccccgaacagcctcggccaagtactagcaaggctgtgtccccaccacacctcgatggacccccttcacccagatctccagtgataggttcggaagtgttccttccaaattccaatcatgtggcttccggagcaggtgaggccgaagagagggtggtggtgatcagctctagcgaggacagtgatgctgagaactcgagctcacgcgaactggatgatagcagctccgagtcctcggatctacaactggaaggcccatctacacttagggtattagatgagaacctcgctgacccccaggccgaagatcgtcccctggtcttcttcgatctgaagatcgacaacgagactcagaagataagtcaactggccgcagtaaacagggagtctaagttcagggtggtcatccaacccgaagcgtttttttcttttctgagctctatgagacgacctattctcgcttgctataaactgtggggtcccggacttccaaattttttcagggccctggaggacattaatcgactttgggagtttcaggaggctatctccgggttcctcgctgccctgccactcatccgtgaaagggtgcctggcgcttcaagttttaagctgaagaatctggcgcagacttatttggctcggaacatgagcgaacggtcggctatggccgcagtccttgcgatgcgggacctttgccggctgctagaggttagtccgggaccacagttggcacagcacgtatatccattttccagtctgcaatgctttgctagtctgcagccactggttcaagccgctgtcctgccccgtgccgaggcaaggttgttagcgctgcacaacgtgagctttatggagttgcttagtgctcatcggagagaccgccaaggtggtctgaagaagtactctcgctatcttagcctacagaccaccacactgccgccagcacagcccgcatttaatctgcaggctctcgggacgtacttcgagggcctgctggaggggcctgctctagctcgcgctgagggggtctccactccccttgcaggacgcggactcgcagagcgggcttctcagcagtcttag

SEQ ID NO: 227944 - DNA, 4508 bp, Artificial Sequence
  derived and/or modified sequence
gctcaagggactcagccaactggctcacgcctccccttcagcttctcttcacgcactccaagatctaaaccgagaatcgaaactaagctggggtccatggagcctgcacccgcccgatctccgaggccccagcaggaccccgcccggccccaggagcccaccatgcctccccccgagaccccctctgaaggccgccagcccagccccagccccagccctacagagcgagcccccgcttcggaggaggagttccagtttctgcgctgccagcaatgccaggcggaagccaagtgcccgaagctgctgccttgtctgcacacgctgtgctcaggatgcctggaggcgtcgggcatgcagtgccccatctgccaggcgccctggcccctaggtgcagacacacccgccctggataacgtctttttcgagagtctgcagcggcgcctgtcggtgtaccggcagattgtggatgcgcaggctgtgtgcacccgctgcaaagagtcggccgacttctggtgctttgagtgcgagcagctcctctgcgccaagtgcttcgaggcacaccagtggttcctcaagcacgaggcccggcccctagcagagctgcgcaaccagtcggtgcgtgagttcctggacggcacccgcaagaccaacaacatcttctgctccaaccccaaccaccgcacccctacgctgaccagcatctactgccgaggatgttccaagccgctgtgctgctcgtgcgcgctccttgacagcagccacagtgagctcaagtgcgacatcagcgcagagatccagcagcgacaggaggagctggacgccatgacgcaggcgctgcaggagcaggatagtgcctttggcgcggttcacgcgcagatgcacgcggccgtcggccagctgggccgcgcgcgtgccgagaccgaggagctgatccgcgagcgcgtgcgccaggtggtagctcacgtgcgggctcaggagcgcgagctgctggaggctgtggacgcgcggtaccagcgcgactacgaggagatggccagtcggctgggccgcctggatgctgtgctgcagcgcatccgcacgggcagcgcgctggtgcagaggatgaagtgctacgcctcggaccaggaggtgctggacatgcacggtttcctgcgccaggcgctctgccgcctgcgccaggaggagccccagagcctgcaagctgccgtgcgcaccgatggcttcgacgagttcaaggtgcgcctgcaggacctcagctcttgcatcacccaggggaaagatgcagctgtatccaagaaagccagcccagaggctgccagcactcccagggaccctattgacgttgacctgcccgaggaggcagagagagtgaaggcccaggttcaggccctggggctggctgaagcccagcctatggctgtggtacagtcagtgcccggggcacaccccgtgccagtgtacgccttctccatcaaaggcccttcctatggagaggatgtctccaatacaacgacagcccagaagaggaagtgcagccagacccagtgccccaggaaggtcatcaagatggagtctgaggaggggaaggaggcaaggttggctcggagctccccggagcagcccaggcccagcacctccaaggcagtctcaccaccccacctggatggaccgcctagccccaggagccccgtcataggaagtgaggtcttcctgcccaacagcaaccacgtggccagtggcgccggggaggcagaggaacgcgttgtggtgatcagcagctcggaagactcagatgccgaaaactcgtcctcccgagagctggatgacagcagcagtgagtccagtgacctccagctggaaggccccagcaccctcagggtcctggacgagaaccttgctgacccccaagcagaagacagacctctggttttctttgacctcaagattgacaatgaaacccagaagattagccagctggctgcggtgaaccgggaaagcaagttccgcgtggtcatccagcctgaagccttcttcagcatctactccaaggccgtgtccctggaggtggggctgcagcacttcctcagctttctgagctccatgcgccgccctatcttggcctgctacaagctgtgggggcctggcctcccaaacttcttccgggccctggaggacattaacaggctgtgggaattccaggaggccatctcgggcttcctggctgccctgcctctcatccgggagcgtgtgcccggggccagcagcttcaaactcaagaacctggcccagacctacctggcgagaaacatgagcgagcgcagcgccatggctgccgtgctggccatgcgtgacctgtgccgcctcctcgaggtctccccgggcccccagctggcccagcatgtctaccccttcagtagcctgcagtgctttgcctccctgcagcccctggtgcaggcagctgtgctgccccgggctgaggcccgcctcctggccctacacaacgtgagcttcatggagctgctgagtgcacaccgccgtgaccggcaggggggcctgaagaagtacagccgctatctaagcctgcagaccaccacgttgccccctgcccagcctgctttcaacctgcaggctctgggcacctactttgaaggcctgttggagggtccggcgctggcacgggcagaaggagtctccaccccacttgctggccgtggcttggcagagagggcctcccagcagagctgagaggagggggtgaccagcttggagtctctggtgggcagagagggatggggtccctgagccaggccccacccatcacagcattcccaggtcctggtacccagccctcagttgtcatttggttcagaatcagttccctttctctgggaccaaatttcccttctctaaacatcctacagagaaggttccaaagctgagcacccatcaccctaggtgtgcaccagactcctattagcccctccttccaggagctagaaccagggaggtcctgagtgaggaaggcatgacctctgggctctctaggtggccctggtcttgccccatccatcccacctgccactaccttgggtgtccttacagctctgccctgaccccagcccctgcccctggacacctgctgacagctcccacacagaacagtctgaggtgatgctggctacagccctggcagcccatggcaactcaaagtgccttccaaaccaaactgcccctcatgaggttagggtcccccaccctccacctgcccagaggccaactctgttcccttctcctttcatcccagaggggcctcatcagcaaagacagaaactgatgttccatgcatgtccctgcttccaaagcctgaccttccaaagcttgcttccttcctcctggctgcacagacacctctgcttggccacagctttgctctttggtcctcaggccaccagacccctcacagcatggcccttggctcttcctgcactgccctcaccctcagccgtcccaaggagtgcccagcactactcagcatgtagtccaggacctgcggcatcagcatcccctgggagcttcttagaaatgcagacctgtgggctctaccacaggcctctggaatcagaatcttcagggtggggcccagcagtctgtgttttaacaggttctcccggtgatgctggtgcatgctcaagtttgagaaccgctgctctcatagactgctcctccaaggggaagcagtgtggaacagcagagaaagtcccgtccctatctctgactgtgcagtgagtgtggcctaggaacaggtcccttcctaagctctagtgtccccatctgtaaaatgggctgattggcctccacggtcagagcggccatctggctgtgccatcctgcatttttaggaatggaaagcaggcctctgaggcagtggacaggaagacttctcatccttgaattctagctcccattccaaactgttagtccccaaccttgtggtcacatcagaggtcaacagcagaacagaggcaggtcagggttgtccgctctgattagcagaacgacagccccttcctcctcctccctccttcccatccctactcattagctccctgctcctgggatgcttcccaagcagcccaggcctctagcctccatggctgatgacctcagctttcacactggtgaagtctgtgtacccatactgcagccccatcccatggggcccctgaagacccactgaggaattccgtagggtcttgttcccacgaccggagtgctggctctcacagtgaattttgatgcatttaaaataagattctgatgccagactgttaaaacaggcgctggttctgaagcaccgatggaaacagattgatgcagatggaaggaggaagggagactgggcccactgatttccagccccaccatgtgtgctgttttcagatgtgattgaggggtgttctgccctgcctccactgtcacagcctttaataaagatgtgaatcttgaaa

SEQ ID NO: 227945 - DNA, 1590 bp, Artificial Sequence
  derived and/or modified sequence
agaatcgaaactaagctggggtccatggagcctgcacccgcccgatctccgaggccccagcaggaccccgcccggccccaggagcccaccatgcctccccccgagaccccctctgaaggccgccagcccagcctatggctgtggtacagtcagtgcccggggcacaccccgtgccagtgtacgccttctccatcaaaggcccttcctatggagaggatgtctccaatacaacgacagcccagaagaggaagtgcagccagacccagtgccccaggaaggtcatcaagatggagtctgaggaggggaaggaggcaaggttggctcggagctccccggagcagcccaggcccagcacctccaaggcagtctcaccaccccacctggatggaccgcctagccccaggagccccgtcataggaagtgaggtcttcctgcccaacagcaaccacgtggccagtggcgccggggaggcagaggaacgcgttgtggtgatcagcagctcggaagactcagatgccgaaaactcgtcctcccgagagctggatgacagcagcagtgagtccagtgacctccagctggaaggccccagcaccctcagggtcctggacgagaaccttgctgacccccaagcagaagacagacctctggttttctttgacctcaagattgacaatgaaacccagaagattagccagctggctgcggtgaaccgggaaagcaagttccgcgtggtcatccagcctgaagccttcttcagcatctactccaaggccgtgtccctggaggtggggctgcagcacttcctcagctttctgagctccatgcgccgccctatcttggcctgctacaagctgtgggggcctggcctcccaaacttcttccgggccctggaggacattaacaggctgtgggaattccaggaggccatctcgggcttcctggctgccctgcctctcatccgggagcgtgtgcccggggccagcagcttcaaactcaagaacctggcccagacctacctggcgagaaacatgagcgagcgcagcgccatggctgccgtgctggccatgcgtgacctgtgccgcctcctcgaggtctccccgggcccccagctggcccagcatgtctaccccttcagtagcctgcagtgctttgcctccctgcagcccctggtgcaggcagctgtgctgccccgggctgaggcccgcctcctggccctacacaacgtgagcttcatggagctgctgagtgcacaccgccgtgaccggcaggggggcctgaagaagtacagccgctatctaagcctgcagaccaccacgttgccccctgcccagcctgctttcaacctgcaggctctgggcacctactttgaaggcctgttggagggtccggcgctggcacgggcagaaggagtctccaccccacttgctggccgtggcttggcagagagggcctcccagcagagctgagaggagggggtgaccagcttggagtctctggtgggcagagagggatggggtccctgagccaggccccacccatcacagcattcccaggtcctggtacccagccctcagttgtcatttggttcag

SEQ ID NO: 227946 - DNA, 2608 bp, Artificial Sequence
  derived and/or modified sequence
gctggggtccatggagcctgcacccgcccgatctccgaggccccagcaggaccccgcccggccccaggagcccaccatgcctccccccgagaccccctctgaaggccgccagcccagccccagccccagccctacagagcgagcccccgcttcggaggaggagttccagtttctgcgctgccagcaatgccaggcggaagccaagtgcccgaagctgctgccttgtctgcacacgctgtgctcaggatgcctggaggcgtcgggcatgcagtgccccatctgccaggcgccctggcccctaggtgcagacacacccgccctggataacgtctttttcgagagtctgcagcggcgcctgtcggtgtaccggcagattgtggatgcgcaggctgtgtgcacccgctgcaaagagtcggccgacttctggtgctttgagtgcgagcagctcctctgcgccaagtgcttcgaggcacaccagtggttcctcaagcacgaggcccggcccctagcagagctgcgcaaccagtcggtgcgtgagttcctggacggcacccgcaagaccaacaacatcttctgctccaaccccaaccaccgcacccctacgctgaccagcatctactgccgaggatgttccaagccgctgtgctgctcgtgcgcgctccttgacagcagccacagtgagctcaagtgcgacatcagcgcagagatccagcagcgacaggaggagctggacgccatgacgcaggcgctgcaggagcaggatagtgcctttggcgcggttcacgcgcagatgcacgcggccgtcggccagctgggccgcgcgcgtgccgagaccgaggagctgatccgcgagcgcgtgcgccaggtggtagctcacgtgcgggctcaggagcgcgagctgctggaggctgtggacgcgcggtaccagcgcgactacgaggagatggccagtcggctgggccgcctggatgctgtgctgcagcgcatccgcacgggcagcgcgctggtgcagaggatgaagtgctacgcctcggaccaggaggtgctggacatgcacggtttcctgcgccaggcgctctgccgcctgcgccaggaggagccccagagcctgcaagctgccgtgcgcaccgatggcttcgacgagttcaaggtgcgcctgcaggacctcagctcttgcatcacccaggggaaagatgcagctgtatccaagaaagccagcccagaggctgccagcactcccagggaccctattgacgttgacctgcccgaggaggcagagagagtgaaggcccaggttcaggccctggggctggctgaagcccagcctatggctgtggtacagtcagtgcccggggcacaccccgtgccagtgtacgccttctccatcaaaggcccttcctatggagaggatgtctccaatacaacgacagcccagaagaggaagtgcagccagacccagtgccccaggaaggtcatcaagatggagtctgaggaggggaaggaggcaaggttggctcggagctccccggagcagcccaggcccagcacctccaaggcagtctcaccaccccacctggatggaccgcctagccccaggagccccgtcataggaagtgaggtcttcctgcccaacagcaaccacgtggccagtggcgccggggaggcagaggaacgcgttgtggtgatcagcagctcggaagactcagatgccgaaaactcgtcctcccgagagctggatgacagcagcagtgagtccagtgacctccagctggaaggccccagcaccctcagggtcctggacgagaaccttgctgacccccaagcagaagacagacctctggttttctttgacctcaagattgacaatgaaacccagaagattagccagctggctgcggtgaaccgggaaagcaagttccgcgtggtcatccagcctgaagccttcttcagctttctgagctccatgcgccgccctatcttggcctgctacaagctgtgggggcctggcctcccaaacttcttccgggccctggaggacattaacaggctgtgggaattccaggaggccatctcgggcttcctggctgccctgcctctcatccgggagcgtgtgcccggggccagcagcttcaaactcaagaacctggcccagacctacctggcgagaaacatgagcgagcgcagcgccatggctgccgtgctggccatgcgtgacctgtgccgcctcctcgaggtctccccgggcccccagctggcccagcatgtctaccccttcagtagcctgcagtgctttgcctccctgcagcccctggtgcaggcagctgtgctgccccgggctgaggcccgcctcctggccctacacaacgtgagcttcatggagctgctgagtgcacaccgccgtgaccggcaggggggcctgaagaagtacagccgctatctaagcctgcagaccaccacgttgccccctgcccagcctgctttcaacctgcaggctctgggcacctactttgaaggcctgttggagggtccggcgctggcacgggcagaaggagtctccaccccacttgctggccgtggcttggcagagagggcctcccagcagagctga

SEQ ID NO: 227947 - protein, 829 aa, Artificial Sequence
  derived and/or modified sequence
MEPAPARSPRPQQDPARPQEPTMPPPETPSEGRQPSPSPSPTERAPASEEEFQFLRCQQCQAEAKCPKLLPCLHTLCSGCLEASGMQCPICQAPWPLGADTPALDNVFFESLQRRLSVYRQIVDAQAVCTRCKESADFWCFECEQLLCAKCFEAHQWFLKHEARPLAELRNQSVREFLDGTRKTNNIFCSNPNHRTPTLTSIYCRGCSKPLCCSCALLDSSHSELKCDISAEIQQRQEELDAMTQALQEQDSAFGAVHAQMHAAVGQLGRARAETEELIRERVRQVVAHVRAQERELLEAVDARYQRDYEEMASRLGRLDAVLQRIRTGSALVQRMKCYASDQEVLDMHGFLRQALCRLRQEEPQSLQAAVRTDGFDEFKVRLQDLSSCITQGKDAAVSKKASPEAASTPRDPIDVDLPEEAERVKAQVQALGLAEAQPMAVVQSVPGAHPVPVYAFSIKGPSYGEDVSNTTTAQKRKCSQTQCPRKVIKMESEEGKEARLARSSPEQPRPSTSKAVSPPHLDGPPSPRSPVIGSEVFLPNSNHVASGAGEAEERVVVISSSEDSDAENSCMEPMETAEPQSSPAHSSPAHSSPAHSSPVQSLLRAQGASSLPCGTYHPPAWPPHQPAEQAATPDAEPHSEPPDHQERPAVHRGIRYLLYRAQRAIRLRHALRLHPQLHRAPIRTWSPHVVQASTPAITGPLNHPANAQEHPAQLQRGISPPHRIRGAVRSRSRSLRGSSHLSQWLNNFFALPFSSMASQLDMSSVVGAGESRAQTLGAGVPPGDSVRGSMEASQVQVPLEASPITFPPPCAPERPPISPVPGARQAGL

SEQ ID NO: 227948 - DNA, 2490 bp, Artificial Sequence
  derived and/or modified sequence
atggagcccgcccccgccagaagccccagaccccagcaggaccccgccagaccccaggagcccaccatgcccccccccgagacccccagcgagggcagacagcccagccccagccccagccccaccgagagagcccccgccagcgaggaggagttccagttcctgagatgccagcagtgccaggccgaggccaagtgccccaagctgctgccctgcctgcacaccctgtgcagcggctgcctggaggccagcggcatgcagtgccccatctgccaggccccctggcccctgggcgccgacacccccgccctggacaacgtgttcttcgagagcctgcagagaagactgagcgtgtacagacagatcgtggacgcccaggccgtgtgcaccagatgcaaggagagcgccgacttctggtgcttcgagtgcgagcagctgctgtgcgccaagtgcttcgaggcccaccagtggttcctgaagcacgaggccagacccctggccgagctgagaaaccagagcgtgagagagttcctggacggcaccagaaagaccaacaacatcttctgcagcaaccccaaccacagaacccccaccctgaccagcatctactgcagaggctgcagcaagcccctgtgctgcagctgcgccctgctggacagcagccacagcgagctgaagtgcgacatcagcgccgagatccagcagagacaggaggagctggacgccatgacccaggccctgcaggagcaggacagcgccttcggcgccgtgcacgcccagatgcacgccgccgtgggccagctgggcagagccagagccgagaccgaggagctgatcagagagagagtgagacaggtggtggcccacgtgagagcccaggagagagagctgctggaggccgtggacgccagataccagagagactacgaggagatggccagcagactgggcagactggacgccgtgctgcagagaatcagaaccggcagcgccctggtgcagagaatgaagtgctacgccagcgaccaggaggtgctggacatgcacggcttcctgagacaggccctgtgcagactgagacaggaggagccccagagcctgcaggccgccgtgagaaccgacggcttcgacgagttcaaggtgagactgcaggacctgagcagctgcatcacccagggcaaggacgccgccgtgagcaagaaggccagccccgaggccgccagcacccccagagaccccatcgacgtggacctgcccgaggaggccgagagagtgaaggcccaggtgcaggccctgggcctggccgaggcccagcccatggccgtggtgcagagcgtgcccggcgcccaccccgtgcccgtgtacgccttcagcatcaagggccccagctacggcgaggacgtgagcaacaccaccaccgcccagaagagaaagtgcagccagacccagtgccccagaaaggtgatcaagatggagagcgaggagggcaaggaggccagactggccagaagcagccccgagcagcccagacccagcaccagcaaggccgtgagccccccccacctggacggcccccccagccccagaagccccgtgatcggcagcgaggtgttcctgcccaacagcaaccacgtggccagcggcgccggcgaggccgaggagagagtggtggtgatcagcagcagcgaggacagcgacgccgagaacagctgcatggagcccatggagaccgccgagccccagagcagccccgcccacagcagccccgcccacagcagccccgcccacagcagccccgtgcagagcctgctgagagcccagggcgccagcagcctgccctgcggcacctaccacccccccgcctggcccccccaccagcccgccgagcaggccgccacccccgacgccgagccccacagcgagccccccgaccaccaggagagacccgccgtgcacagaggcatcagatacctgctgtacagagcccagagagccatcagactgagacacgccctgagactgcacccccagctgcacagagcccccatcagaacctggagcccccacgtggtgcaggccagcacccccgccatcaccggccccctgaaccaccccgccaacgcccaggagcaccccgcccagctgcagagaggcatcagccccccccacagaatcagaggcgccgtgagaagcagaagcagaagcctgagaggcagcagccacctgagccagtggctgaacaacttcttcgccctgcccttcagcagcatggccagccagctggacatgagcagcgtggtgggcgccggcgagagcagagcccagaccctgggcgccggcgtgccccccggcgacagcgtgagaggcagcatggaggccagccaggtgcaggtgcccctggaggccagccccatcaccttcccccccccctgcgcccccgagagaccccccatcagccccgtgcccggcgccagacaggccggcctgtag

SEQ ID NO: 227949 - DNA, 2490 bp, Artificial Sequence
  derived and/or modified sequence
atggagcccgctcctgccagaagcccccggccgcagcaggatccagcccggcctcaggagcccaccatgcctcctccagagactccatccgaggggcgccagccgtccccctccccctctcccaccgaacgagctcctgctagcgaagaggaatttcagttcttgcggtgccagcaatgccaggctgaggccaaatgccccaagctcctgccttgcctgcacacgctctgctctggctgcttggaagcctcgggcatgcaatgccccatctgtcaggcgccctggccactgggagccgacactcctgcacttgacaacgtgttcttcgagtcactccaaagacgactgagcgtttaccgccagatagtggacgcacaggctgtgtgtaccaggtgtaaagaatctgcagatttttggtgtttcgagtgcgaacagctgctctgtgcaaaatgttttgaggcccaccagtggttccttaagcacgaagctcgcccacttgcagaactcagaaaccagagtgttagggaatttttagatggcactcggaaaactaataacattttctgttctaacccaaatcatagaacaccaaccctcacttctatctattgcaggggctgctctaaacctctgtgttgtagttgtgcattgctggactcctcgcacagcgaactcaaatgcgacattagcgccgaaatccagcaaaggcaggaagagctggatgcaatgacccaagccctccaggagcaggatagtgccttcggcgctgtccacgctcagatgcatgcggccgttgggcaactcggtagggccagagcagagacggaggagctaattcgcgagagagtgagacaggttgtggcgcacgtcagggcccaggagcgcgaacttttggaggctgtggatgccaggtatcagcgtgactacgaagagatggcatcgaggctgggacggctcgatgccgtgttgcagaggatcaggaccggctccgctcttgtgcaaaggatgaagtgctatgcctccgatcaagaagtgctagatatgcatggatttcttaggcaggccctgtgtcggctgaggcaggaagagccccagtcattgcaggctgcagtccggaccgatggctttgacgagttcaaggttcgcttacaagatttgagctcgtgtatcacgcagggcaaggatgccgccgtatcaaaaaaagcctcccctgaagcagcaagcacccctcgcgatccgattgacgtagatttaccagaggaagcagaacgggtgaaggcccaggtgcaagccttgggcctcgccgaagcccagccgatggccgtcgtccagtcggttcccggagcacacccagtccccgtctatgcattctctatcaaagggccctcttacggcgaagatgtcagtaatacaacaaccgcccaaaaacgaaaatgctcccagacacaatgcccaagaaaggtaataaaaatggagagcgaggaaggaaaggaggctaggttggccagatcatcgccggagcagccacgtcctagtaccagtaaagcggtgagtcctccccatctggacggacctccaagccctcgaagccccgtgattggcagcgaagtatttttacctaatagcaatcatgtcgcctccggcgccggtgaagcagaagaacgagtggtcgtgatttcaagttcagaagatagcgacgccgaaaatagttgtatggaaccaatggagaccgctgaaccacaatcctcaccagcgcactcctccccagcccacagctcaccggcacactcatcaccagtgcagtcacttctgagggctcagggtgcatcgtcattgccatgcgggacctaccatcctcccgcctggcctccccatcagcccgccgaacaagctgccacacctgacgcagaaccacactctgagcctcctgatcatcaagagaggccagctgtgcacagaggcattcgctacctgctctatagggcccagcgggccattcggctgcgccatgccttgagactgcacccacagctacaccgggccccgatacgcacatggtcaccccacgtcgtccaggccagcactcccgccattactgggcccctgaaccaccccgctaacgcacaggagcaccccgcacaactgcagagaggaatcagcccaccccaccgcattaggggagcagttcgcagtcgctcccgctcacttaggggatcctctcacctctcccaatggttaaataattttttcgcacttccatttagttccatggccagtcagctggatatgtctagcgtggtgggcgcgggggaaagtagggcccagacattgggggccggcgtccccccaggcgactcagtccgcggcagcatggaggctagtcaagtccaggtcccactggaagcctcccccataacctttcctccaccatgcgctcccgaacgaccaccaattagtcccgttcctggcgctcgccaggccggactttag

SEQ ID NO: 227950 - DNA, 2490 bp, Artificial Sequence
  derived and/or modified sequence
atggagcccgccccagcccggagcccccggccccagcaggaccctgcccggccccaggagcccaccatgcctcctcctgagacccccagcgagggccggcagcccagccccagccccagccccacagagcgggccccagccagcgaggaggagttccagttcctgcgctgccagcagtgccaggccgaggccaagtgccccaagctgctgccctgcctgcacaccctgtgcagcggctgcctggaggccagcggcatgcagtgccccatctgccaggccccctggcccctgggcgctgacaccccagccctggacaacgtgttctttgagagcctgcagaggcggctgtctgtgtaccggcagatcgtggatgcccaggccgtgtgcacccgctgcaaggagagcgctgacttctggtgctttgaatgtgagcagctgctgtgtgccaagtgctttgaggcccaccagtggttcctgaagcatgaggcccggcccctggccgagctgaggaaccagagcgtgcgggagttcctggatggcaccaggaagaccaacaacatcttctgcagcaaccccaaccacaggacccccaccctgaccagcatctactgccggggctgcagcaagcccctgtgctgcagctgtgccctgctggacagcagccacagcgagctgaagtgtgacatctctgctgagatccagcagaggcaggaggagctggatgccatgacccaggccctgcaggagcaggacagcgccttcggggctgtgcacgcccagatgcatgctgctgtgggccagctgggccgggcccgggcagagacagaggagctgatccgggagcgggtgcggcaggtggtggcccacgtgcgggcccaggagcgggagctgctggaggccgtggatgcccgctaccagagggactatgaggagatggccagccggctgggccgcctggatgctgtgctgcagaggatcagaacaggcagcgccctggtgcagaggatgaagtgctacgccagtgaccaggaggtgctggacatgcacggcttcctgcggcaggccctgtgccgcctgcggcaggaggagccccagagcctgcaggccgctgtgaggacagatggctttgatgagttcaaggtgcggctgcaggacctgagcagctgcatcacccagggcaaggatgctgctgtgtccaagaaggccagccctgaggccgccagcaccccccgggaccccattgatgtggacctgcctgaggaggccgagcgggtgaaggcccaggtgcaggccctgggcctggccgaggcccagcccatggctgtggtgcagagcgtgcctggggcccaccctgtgcctgtgtatgccttcagcatcaagggccccagctatggagaagatgtgagcaacaccaccacagcccagaagaggaagtgcagccagacccagtgccccaggaaggtgatcaagatggagagcgaggagggcaaggaggcccggctggcccggagcagccctgagcagccccggcccagcaccagcaaggctgtgtccccaccccacctggatggcccccccagccccaggagccctgtgattggcagcgaggtgttcctgcccaacagcaaccacgtggccagcggggccggggaggccgaggagcgggtggtggtgatcagcagcagtgaagattctgatgctgagaacagctgcatggagcccatggagacagctgagccccagagcagccctgcccacagcagccctgcccacagcagccctgcccacagcagccctgtgcagagcctgctgcgggcccagggcgccagcagcctgccctgtggcacctaccaccccccagcctggccaccccaccagcctgctgagcaggccgccaccccagatgctgagccccacagcgagcccccagaccaccaggagaggcctgctgtgcaccggggcatccgctacctgctgtaccgggcccagagggccatccggctgcggcatgccctgcggctgcacccccagctgcaccgggcccccatccgcacctggagcccccacgtggtgcaggccagcaccccagccatcaccggccccctgaaccacccagccaatgcccaggagcacccagcccagctgcagaggggcatcagccccccccaccgcatcagaggagctgtgcgcagccgcagccgcagcctgcggggcagcagccacctgagccagtggctgaacaacttctttgccctgcccttcagctccatggccagccagctggacatgagctctgtggtgggcgctggggagagccgggcccagaccctgggcgccggcgtgcccccaggggacagcgtgcggggctccatggaggccagccaggtgcaggtgcccctggaggccagccccatcaccttccccccaccctgtgcccctgagcggccccccatcagccctgtgcctggggcccggcaggccggcctgtag

SEQ ID NO: 227951 - DNA, 2490 bp, Artificial Sequence
  derived and/or modified sequence
atggagcccgcccccgcccggagcccccggccccagcaggaccccgctagaccacaggagcccaccatgcctcctcccgagactccaagcgaggggcgccaaccttcccccagtcccagcccaactgagagggctccagcttcagaagaggagttccagttccttagatgccagcagtgccaggcagaggccaaatgtccaaagttgttgccttgcctgcatacactatgcagcggctgtcttgaggccagcggaatgcagtgtccaatctgccaggccccctggcccctgggggcagacacccccgcactcgacaacgtgttcttcgagagtctgcagaggcgcctgtccgtctacagacagatcgtggacgcccaggccgtatgtaccagatgcaaagagtccgcagacttttggtgctttgaatgtgagcaactactatgtgccaaatgctttgaggctcaccagtggtttctgaaacatgaggcccgtccgctcgctgagctccgaaaccagagtgtcagggagttcctggatggcacgcggaaaaccaacaacattttctgcagcaatcctaatcaccgcacccctaccttgacatctatctactgccgaggctgctccaagcctttgtgttgctcttgtgcactgctagactcctcccacagtgaactgaaatgcgatatttcagccgaaatccaacagagacaggaggagctggacgcaatgacccaggccctgcaggagcaggattccgcctttggagccgtgcatgctcaaatgcatgctgcagttgggcagctgggccgagcgagagcagagactgaggagctcatccgagagcgtgtgcggcaggttgttgcgcatgtcagggcccaagagcgagagttgctggaagcagtggatgccagataccaacgggattatgaggaaatggcttcaagactgggcagactcgacgccgttctccagagaattcgaaccgggagcgcacttgtacaacggatgaagtgctatgctagcgatcaggaagtccttgatatgcacggttttctgcggcaggcgctctgccgactgcgccaggaggagccccagtctctgcaggccgccgtacgaaccgacgggtttgatgagtttaaggtcagactgcaagatctgagcagctgtattacccaaggcaaagacgcggctgtttccaaaaaggcctcacctgaggccgcttccaccccacgggacccgatcgacgttgacttgcctgaggaggccgagcgcgttaaggcccaagtgcaagccttgggcttagctgaggcgcaacctatggcagtcgtccaatccgttccgggtgcacaccctgtccccgtctacgccttttcaatcaagggtccctcgtacggtgaggatgtgtccaataccactaccgcacagaaacgcaagtgcagccagactcagtgcccacggaaagtcataaaaatggagagcgaagaaggtaaagaggctcggctggcacgatccagccccgagcaaccacggccgtctacctccaaggccgtgagtcctccccacttggatggacccccatcaccccgctcccccgtgattgggagcgaagtctttttgcccaacagtaaccacgtggcctcaggcgcaggagaggcagaagagcgagtggtagtgatttcctcctccgaagattctgacgcggagaatagctgcatggagcccatggagaccgccgagcctcagagttccccggcccatagtagcccagcccactcgtcacctgcacacagctcacctgtgcagagtttgctcagagcacaaggtgctagttcccttccatgtggtacctatcatccccctgcttggccaccgcatcagccggccgagcaggctgctacaccggatgccgagccacattctgaaccgccagatcaccaagaacggccggcagtgcaccgaggaattaggtacttactgtatcgtgcccagcgcgctatcagactcaggcacgccctgagactccaccctcagctgcacagggcccccatccgaacttggtcaccacacgtagtgcaagcctcaacccccgcaattaccggacctctaaatcatccagctaacgctcaagaacacccggctcagctgcagaggggcatttccccgccccacaggattcgtggggccgtccggagccgcagcaggagtttacggggctccagtcacctcagtcagtggctgaataacttctttgctctgcctttctcaagcatggcttctcagcttgacatgtccagtgtcgttggggccggggaatcacgggcccagacacttggtgcaggtgtacctccaggtgactcagtccgcggctctatggaggcttcccaggtgcaagttcccctcgaggcgtcacccataacctttcctcccccttgtgcacccgagcgtccacccatctctcctgtgccgggagctcggcaggctggtttgtag

SEQ ID NO: 227952 - DNA, 2490 bp, Artificial Sequence
  derived and/or modified sequence
atggagccagcccctgctagatcgcccaggccccagcaggaccccgctcggcctcaggagcctaccatgccccctcctgagacaccatctgagggcagacaacctagccccagtccctcgcctaccgaacgtgcgccagcatcagaagaagagtttcaatttctgaggtgtcaacagtgccaagcggaggctaaatgccccaagttgctgccatgtctgcacaccctatgtagcggctgtctcgaggcttccgggatgcaatgtcctatctgccaggccccatggccactgggggctgacacccctgcattagataacgtcttctttgaatcattgcagcggagactctcagtgtaccgtcagatcgtggatgctcaggccgtctgcacccgctgcaaggagagcgcggacttttggtgctttgagtgtgagcagctactgtgcgcaaaatgctttgaagctcaccaatggttcttaaaacacgaggcacggccactggccgagctcaggaatcagagcgtgagggagtttctggacggcactcgcaaaacaaacaacattttctgtagcaatccaaaccacagaacccccacactgactagcatttactgtagagggtgctcgaaacccctgtgttgctcctgtgcgctgttagattcttctcactccgagctaaagtgtgatatatccgccgagatccaacaacgtcaggaagaattggatgccatgactcaggccctgcaggagcaggacagcgccttcggagcagtgcatgctcagatgcacgctgctgtgggccagctggggcgagccagagccgaaacagaggaactaatccgcgagcgggtgcggcaggtggtagcccacgtcagggcacaggagcgggagttgttggaggctgttgacgctcggtatcagagggattacgaggaaatggcatcacgactcggcaggttggatgctgtcttacaacgcatcagaaccggctccgccctggtgcaacggatgaaatgttatgcatcggatcaggaggtgctcgacatgcacggatttcttaggcaggcattatgtcggttacgacaagaggagccacagagtctgcaggcggctgtgaggaccgacggcttcgacgaatttaaagtgcgcctgcaggaccttagcagctgtattacacaaggtaaggacgctgcagtgagtaaaaaggcgagtccggaagcagcttcgactcctagagaccctattgatgttgacttgccagaggaagctgagagggttaaagcccaggtgcaggcactgggcctggcagaagcgcaacctatggccgtggtgcagagtgttcctggggctcaccctgttcctgtttatgccttttccatcaaagggccatcctacggagaggatgtatctaataccactaccgctcaaaaaaggaaatgtagccagacccagtgtccgcgtaaggtgatcaagatggaatccgaggagggaaaggaggctcgattggccagatccagtcctgaacaacccaggccatccacctcgaaagccgtgtcccctccacacctggatgggccaccttcgccccgtagtccagtcatcggatctgaagtgtttctacctaatagtaaccatgtggcgtccggcgctggcgaggccgaggaacgggttgtggtcatttcctcatctgaggatagcgatgcggagaacagttgtatggagcctatggaaactgccgaaccacagtcttcccccgctcattcctccccagcccactcctctcccgctcactcttctccagtgcagtctctcctgagagcgcaaggggcaagctccttgccttgcggaacctatcaccctccagcatggccccctcaccaaccagcagaacaagcagcaacccctgacgcagagcctcacagtgaacctcctgaccaccaggagagaccagcggtacatagaggtattcggtacctgttgtaccgcgcacaaagagctataaggttgaggcatgcccttcgtctacatccccagcttcaccgtgccccaattagaacctggtcaccccacgtggtgcaagctagcaccccagcgataacagggcctctgaaccaccccgctaacgcacaagagcatccagctcagttacaacgcggaatctctccaccacacagaattcggggagctgttcgcagccggagccggtcccttcggggtagcagccatttaagtcagtggcttaataatttcttcgccctacccttttccagtatggcgtcccaattagacatgagtagtgtggtgggagctggggagtcacgcgcacaaactttgggcgcaggcgtccctcccggtgattccgtacggggatccatggaggcttcccaggtacaggtgccgttagaagcaagcccaattacttttcctcctccatgcgcaccagagagaccccctatctctcccgtgccaggcgctagacaggccggactctag

SEQ ID NO: 227953 - DNA, 3029 bp, Artificial Sequence
  derived and/or modified sequence
gctcaagggactcagccaactggctcacgcctccccttcagcttctcttcacgcactccaagatctaaaccgagaatcgaaactaagctggggtccatggagcctgcacccgcccgatctccgaggccccagcaggaccccgcccggccccaggagcccaccatgcctccccccgagaccccctctgaaggccgccagcccagccccagccccagccctacagagcgagcccccgcttcggaggaggagttccagtttctgcgctgccagcaatgccaggcggaagccaagtgcccgaagctgctgccttgtctgcacacgctgtgctcaggatgcctggaggcgtcgggcatgcagtgccccatctgccaggcgccctggcccctaggtgcagacacacccgccctggataacgtctttttcgagagtctgcagcggcgcctgtcggtgtaccggcagattgtggatgcgcaggctgtgtgcacccgctgcaaagagtcggccgacttctggtgctttgagtgcgagcagctcctctgcgccaagtgcttcgaggcacaccagtggttcctcaagcacgaggcccggcccctagcagagctgcgcaaccagtcggtgcgtgagttcctggacggcacccgcaagaccaacaacatcttctgctccaaccccaaccaccgcacccctacgctgaccagcatctactgccgaggatgttccaagccgctgtgctgctcgtgcgcgctccttgacagcagccacagtgagctcaagtgcgacatcagcgcagagatccagcagcgacaggaggagctggacgccatgacgcaggcgctgcaggagcaggatagtgcctttggcgcggttcacgcgcagatgcacgcggccgtcggccagctgggccgcgcgcgtgccgagaccgaggagctgatccgcgagcgcgtgcgccaggtggtagctcacgtgcgggctcaggagcgcgagctgctggaggctgtggacgcgcggtaccagcgcgactacgaggagatggccagtcggctgggccgcctggatgctgtgctgcagcgcatccgcacgggcagcgcgctggtgcagaggatgaagtgctacgcctcggaccaggaggtgctggacatgcacggtttcctgcgccaggcgctctgccgcctgcgccaggaggagccccagagcctgcaagctgccgtgcgcaccgatggcttcgacgagttcaaggtgcgcctgcaggacctcagctcttgcatcacccaggggaaagatgcagctgtatccaagaaagccagcccagaggctgccagcactcccagggaccctattgacgttgacctgcccgaggaggcagagagagtgaaggcccaggttcaggccctggggctggctgaagcccagcctatggctgtggtacagtcagtgcccggggcacaccccgtgccagtgtacgccttctccatcaaaggcccttcctatggagaggatgtctccaatacaacgacagcccagaagaggaagtgcagccagacccagtgccccaggaaggtcatcaagatggagtctgaggaggggaaggaggcaaggttggctcggagctccccggagcagcccaggcccagcacctccaaggcagtctcaccaccccacctggatggaccgcctagccccaggagccccgtcataggaagtgaggtcttcctgcccaacagcaaccacgtggccagtggcgccggggaggcagaggaacgcgttgtggtgatcagcagctcggaagactcagatgccgaaaactcgtgcatggagcccatggagaccgccgagccacagtcctcgccagcccactcctcgccagcccactcctcgccagcccactcctcgccagtccagtctctgctgagagcacaaggagcctccagcctgccctgtggcacataccaccccccagcttggcctccccaccagcccgctgagcaggctgccacccccgatgctgagcctcacagcgagcctcctgatcaccaggagcgccctgccgtccaccgtgggatccgctacctgttgtacagagcacagagagccatccgccttcgccatgccctccgcttgcaccctcaattgcatcgggcccctattcggacttggtctccccatgtggtccaagccagcactcctgccatcacagggcccctcaaccatcctgccaatgcccaggaacatcctgcccagctgcaaaggggcatcagcccaccccaccggatacgaggggctgtgcgatcccgcagccgctccctccggggctcctcccatttatcccagtggctcaacaacttttttgccctccccttctcctccatggcttcccagcttgacatgtcttccgtggtgggggcaggggaaagcagagcccagactcttggagcaggtgttccccctggggactctgtcagaggctccatggaggcctctcaagtccaagtgcctctggaagcctctccaattacattcccaccaccctgtgccccagaaaggccccccatcagcccagtcccaggcgcccgtcaagcaggcctctgagagtgctacccttctcttgtaaccttgcagccaacacccctgcccggcccctgagctgcctcctccagcccatgctcttacaggccctgcacagagtagcactcattaattcttggttaaggaatgaatcaacgaatgaatggctatgcatggacctctgggcagggagacctgggtcttctctggctgagaggggaaggctaaggcatggctgagattcaagccaccattccaggcctctttgcccaagaaagaaacttctgtcacccttgcactctcctgtattctgagtccctggccaatagcacagccttccatgccccgacccccaccccaagcctctccactaggcctctgccaggatctaagcccatgagcacagggactggctatcccaagacctggcagatgtggctgctcaataaacacttgttgaaccatca

SEQ ID NO: 227954 - DNA, 110 bp, Artificial Sequence
  derived and/or modified sequence
gaaaggaatagaatggaatggatcgttatggaaagacatcgaatgggatggaattgactcgaatggattggactggaatggaacggactcgaatggaatggactggaatg

SEQ ID NO: 227955 - DNA, 94 bp, Artificial Sequence
  derived and/or modified sequence
aatggaatcgaaaggaatagaatggaatggatcgttatggaaagatatcgaatggaatggaattgactcgaatggaatggactggaatggaacg

SEQ ID NO: 227956 - DNA, 84 bp, Artificial Sequence
  derived and/or modified sequence
attggaatggaacggaacagaacggaatggaatggaatagaatggaatggaatggaatggtatggaatggaatggaatggtacg

SEQ ID NO: 227957 - DNA, 82 bp, Artificial Sequence
  derived and/or modified sequence
ggaacgaaatcgaatggaacggaatagaatagactcgaatgtaatggattgctatgtaattgattcgaatggaatggaatcg

SEQ ID NO: 227958 - DNA, 75 bp, Artificial Sequence
  derived and/or modified sequence
aacccgaatagaatggaatggaatggaatggaacggaacggaatggaatggaatggattggaatggaatggaatg

SEQ ID NO: 227959 - DNA, 82 bp, Artificial Sequence
  derived and/or modified sequence
gcaataaaatcgactcagatagagaagaatgcaatggaatggaatggaatggaatggaatgggatggaatggtatggaatgg

SEQ ID NO: 227960 - DNA, 79 bp, Artificial Sequence
  derived and/or modified sequence
agttaatccgaatagaatggaatggaatgcaatggaacggaatggaacggaatggaatggaatggaatggaatggaatg

SEQ ID NO: 227961 - DNA, 78 bp, Artificial Sequence
  derived and/or modified sequence
attaacccgaatagaatggaatggaatggaatggaacggaacggaatggaatggaatggaatggaatggaatggatcg

SEQ ID NO: 227962 - DNA, 95 bp, Artificial Sequence
  derived and/or modified sequence
gaatggaatcgaaaggaatagaatggaatggatcgttatggaaagacatcgaatggaatggaattgactcgaatggaatggactggaatggaacg

SEQ ID NO: 227963 - protein, 611 aa, Artificial Sequence
  derived and/or modified sequence
MEPAPARSPRPQQDPARPQEPTMPPPETPSEGRQPSPSPSPTERAPASEEEFQFLRCQQCQAEAKCPKLLPCLHTLCSGCLEASGMQCPICQAPWPLGADTPALDNVFFESLQRRLSVYRQIVDAQAVCTRCKESADFWCFECEQLLCAKCFEAHQWFLKHEARPLAELRNQSVREFLDGTRKTNNIFCSNPNHRTPTLTSIYCRGCSKPLCCSCALLDSSHSELKCDISAEIQQRQEELDAMTQALQEQDSAFGAVHAQMHAAVGQLGRARAETEELIRERVRQVVAHVRAQERELLEAVDARYQRDYEEMASRLGRLDAVLQRIRTGSALVQRMKCYASDQEVLDMHGFLRQALCRLRQEEPQSLQAAVRTDGFDEFKVRLQDLSSCITQGKDAAVSKKASPEAASTPRDPIDVDLPEEAERVKAQVQALGLAEAQPMAVVQSVPGAHPVPVYAFSIKGPSYGEDVSNTTTAQKRKCSQTQCPRKVIKMESEEGKEARLARSSPEQPRPSTSKAVSPPHLDGPPSPRSPVIGSEVFLPNSNHVASGAGEAEERVVVISSSEDSDAENSVSGPEVQPRTPASPHFRSQGAQPQQVTLRLALRLGNFPVRH

SEQ ID NO: 227964 - DNA, 1836 bp, Artificial Sequence
  derived and/or modified sequence
atggagcccgcccccgccagaagccccagaccccagcaggaccccgccagaccccaggagcccaccatgcccccccccgagacccccagcgagggcagacagcccagccccagccccagccccaccgagagagcccccgccagcgaggaggagttccagttcctgagatgccagcagtgccaggccgaggccaagtgccccaagctgctgccctgcctgcacaccctgtgcagcggctgcctggaggccagcggcatgcagtgccccatctgccaggccccctggcccctgggcgccgacacccccgccctggacaacgtgttcttcgagagcctgcagagaagactgagcgtgtacagacagatcgtggacgcccaggccgtgtgcaccagatgcaaggagagcgccgacttctggtgcttcgagtgcgagcagctgctgtgcgccaagtgcttcgaggcccaccagtggttcctgaagcacgaggccagacccctggccgagctgagaaaccagagcgtgagagagttcctggacggcaccagaaagaccaacaacatcttctgcagcaaccccaaccacagaacccccaccctgaccagcatctactgcagaggctgcagcaagcccctgtgctgcagctgcgccctgctggacagcagccacagcgagctgaagtgcgacatcagcgccgagatccagcagagacaggaggagctggacgccatgacccaggccctgcaggagcaggacagcgccttcggcgccgtgcacgcccagatgcacgccgccgtgggccagctgggcagagccagagccgagaccgaggagctgatcagagagagagtgagacaggtggtggcccacgtgagagcccaggagagagagctgctggaggccgtggacgccagataccagagagactacgaggagatggccagcagactgggcagactggacgccgtgctgcagagaatcagaaccggcagcgccctggtgcagagaatgaagtgctacgccagcgaccaggaggtgctggacatgcacggcttcctgagacaggccctgtgcagactgagacaggaggagccccagagcctgcaggccgccgtgagaaccgacggcttcgacgagttcaaggtgagactgcaggacctgagcagctgcatcacccagggcaaggacgccgccgtgagcaagaaggccagccccgaggccgccagcacccccagagaccccatcgacgtggacctgcccgaggaggccgagagagtgaaggcccaggtgcaggccctgggcctggccgaggcccagcccatggccgtggtgcagagcgtgcccggcgcccaccccgtgcccgtgtacgccttcagcatcaagggccccagctacggcgaggacgtgagcaacaccaccaccgcccagaagagaaagtgcagccagacccagtgccccagaaaggtgatcaagatggagagcgaggagggcaaggaggccagactggccagaagcagccccgagcagcccagacccagcaccagcaaggccgtgagccccccccacctggacggcccccccagccccagaagccccgtgatcggcagcgaggtgttcctgcccaacagcaaccacgtggccagcggcgccggcgaggccgaggagagagtggtggtgatcagcagcagcgaggacagcgacgccgagaacagcgtgagcggccccgaggtgcagcccagaacccccgccagcccccacttcagaagccagggcgcccagccccagcaggtgaccctgagactggccctgagactgggcaacttccccgtgagacactag

SEQ ID NO: 227965 - DNA, 1836 bp, Artificial Sequence
  derived and/or modified sequence
atggagcctgcaccagccaggtcgcctcgcccacagcaggatccagctcggccccaggagcctacaatgcctccccccgagactcctagtgaaggtagacaaccaagtcccagcccatccccgactgaaagagctccggcatctgaagaagagttccagttcctgcgatgtcaacagtgtcaagcagaggcaaagtgcccaaaattgctcccatgtctccataccttgtgcagcggctgcctggaggcaagcggcatgcagtgccctatatgtcaagcaccctggcctctcggagcggacacacctgcactggacaacgtgttctttgagagtttgcagaggcgcctgtctgtgtatcgacaaattgtggacgcgcaggcagtctgcactagatgcaaagagtcagctgacttttggtgcttcgaatgtgaacagttgctttgtgctaaatgcttcgaagcacaccagtggttcctgaagcacgaagcccggcctctggccgagctgagaaaccaatcagtgcgcgagttcctcgatggcacaaggaaaactaataacattttctgttctaaccccaatcatcgaacgcccaccctaacctcaatctattgtagaggctgttccaaacctctctgttgtagctgtgctctgctcgattccagtcattccgagcttaaatgtgacatcagcgctgagatacagcagagacaggaagagctggatgcaatgacgcaggccctgcaagagcaagactcagccttcggggctgtgcatgcgcagatgcatgcggccgttggccagctgggacgcgcccgggctgagactgaagagctcatcagggaaagagtgaggcaagtggtggcccacgtgcgagcacaggaaagggaactgctcgaagcagtggatgcccgttaccagcgcgactacgaagagatggcgtctcgattggggcggctggatgccgtgctgcagcgcatcaggaccgggagcgcgctggtacaacggatgaaatgctacgcaagtgaccaggaggtgctggatatgcatggcttcctaaggcaggctctgtgtcggttgaggcaggaggagccgcaatcactgcaggccgcagtccgaacggacggcttcgatgagttcaaggtgagacttcaagatttgtcctcatgtattactcagggcaaggacgcggccgtgtccaagaaagccagccctgaagcagcgagcacaccgcgcgatcctatagacgtggacctcccagaggaggctgagagagtgaaagcacaggtgcaagccctaggcttggctgaggcccagcctatggctgttgttcagtcagtgcctggtgctcaccctgtccctgtgtatgctttctcgatcaaaggtccctcttatggcgaggacgtctccaatacgaccaccgcacagaagcgaaagtgcagccaaactcaatgtcctcgaaaggtcattaagatggagagcgaggaggggaaggaagctcgactcgcaagaagttctcccgaacagccaaggccttcgacatcaaaggctgtgtcacccccacacctcgacggcccgccatcccctcgttctcctgtcattgggtcagaggtattcctccctaactccaaccatgttgcaagcggggccggcgaggccgaggaacgggtggtggtgatctctagttcggaagactctgatgccgagaactccgtctcagggcccgaggtacagccccgcactcccgcctcgccacactttagaagtcagggagctcagccccagcaggttacactccgtctcgccttaagactcggtaacttccccgtgcgccattag

SEQ ID NO: 227966 - DNA, 1836 bp, Artificial Sequence
  derived and/or modified sequence
atggagcccgccccagcccggagcccccggccccagcaggaccctgcccggccccaggagcccaccatgcctcctcctgagacccccagcgagggccggcagcccagccccagccccagccccacagagcgggccccagccagcgaggaggagttccagttcctgcgctgccagcagtgccaggccgaggccaagtgccccaagctgctgccctgcctgcacaccctgtgcagcggctgcctggaggccagcggcatgcagtgccccatctgccaggccccctggcccctgggcgctgacaccccagccctggacaacgtgttctttgagagcctgcagaggcggctgtctgtgtaccggcagatcgtggatgcccaggccgtgtgcacccgctgcaaggagagcgctgacttctggtgctttgaatgtgagcagctgctgtgtgccaagtgctttgaggcccaccagtggttcctgaagcatgaggcccggcccctggccgagctgaggaaccagagcgtgcgggagttcctggatggcaccaggaagaccaacaacatcttctgcagcaaccccaaccacaggacccccaccctgaccagcatctactgccggggctgcagcaagcccctgtgctgcagctgtgccctgctggacagcagccacagcgagctgaagtgtgacatctctgctgagatccagcagaggcaggaggagctggatgccatgacccaggccctgcaggagcaggacagcgccttcggggctgtgcacgcccagatgcatgctgctgtgggccagctgggccgggcccgggcagagacagaggagctgatccgggagcgggtgcggcaggtggtggcccacgtgcgggcccaggagcgggagctgctggaggccgtggatgcccgctaccagagggactatgaggagatggccagccggctgggccgcctggatgctgtgctgcagaggatcagaacaggcagcgccctggtgcagaggatgaagtgctacgccagtgaccaggaggtgctggacatgcacggcttcctgcggcaggccctgtgccgcctgcggcaggaggagccccagagcctgcaggccgctgtgaggacagatggctttgatgagttcaaggtgcggctgcaggacctgagcagctgcatcacccagggcaaggatgctgctgtgtccaagaaggccagccctgaggccgccagcaccccccgggaccccattgatgtggacctgcctgaggaggccgagcgggtgaaggcccaggtgcaggccctgggcctggccgaggcccagcccatggctgtggtgcagagcgtgcctggggcccaccctgtgcctgtgtatgccttcagcatcaagggccccagctatggagaagatgtgagcaacaccaccacagcccagaagaggaagtgcagccagacccagtgccccaggaaggtgatcaagatggagagcgaggagggcaaggaggcccggctggcccggagcagccctgagcagccccggcccagcaccagcaaggctgtgtccccaccccacctggatggcccccccagccccaggagccctgtgattggcagcgaggtgttcctgcccaacagcaaccacgtggccagcggggccggggaggccgaggagcgggtggtggtgatcagcagcagtgaagattctgatgctgagaacagcgtgtctggccctgaggtgcagcccaggaccccagccagcccccacttccgcagccagggcgcccagccccagcaggtgaccctgcggctggccctgcggctgggcaacttccctgtgcgccactag

SEQ ID NO: 227967 - DNA, 1836 bp, Artificial Sequence
  derived and/or modified sequence
atggagcccgcccccgcccggagcccccggccccagcaggaccccgcccggccccaggagccgactatgcctcctcctgagactccgtccgaggggagacagcctagcccatctccgagtccaactgagagggcccctgcctcggaggaggagttccaatttctgcgctgccagcagtgtcaggctgaggcaaagtgtcctaaactgctgccatgtctgcacaccttgtgttctggttgcctggaggcgtctgggatgcagtgccccatctgccaggcaccatggcccctgggagccgacacgccagcgctcgataacgtctttttcgagtcgttgcagaggcggttgtccgtgtatagacagattgttgatgcgcaggccgtatgtactcgatgtaaagagtctgccgacttttggtgcttcgaatgcgagcagctcctctgtgctaagtgcttcgaggcccaccagtggtttttgaagcacgaggccagacccctggccgagctgcggaaccagtctgtgcgcgaatttttggatgggaccaggaagacgaataacatattctgctctaatcctaatcatcggactcctacactgacttcaatctactgtcgtggttgcagcaagccactatgctgctcatgtgccctcctggactcaagtcattcagaactaaaatgcgacatatctgccgagattcagcaacggcaggaagaactcgatgctatgacccaggctctgcaggaacaagattcagctttcggggctgtccatgcccagatgcacgctgccgtcggccagttggggagggcccgggctgagaccgaggagttgataagagagagggtgcgacaagtggttgcccacgtgagggcccaggaaagagagcttctggaagcggtggacgccagatatcagcgggattacgaggaaatggccagtcgattgggaagactggacgctgtgctgcaacgaataaggacagggtcagctctggtacagcgcatgaagtgttacgcatccgatcaggaggtcttggatatgcacggcttccttagacaagctctgtgcagactgcgtcaggaggaaccccagtcactccaggctgctgtacgaacagatggtttcgatgaattcaaagtccgcctgcaggatctttctagctgtataacccagggcaaagacgctgcagtgtccaaaaaagcctcccctgaggccgcatccacacctcgtgatccgattgatgtggacctacccgaggaagccgagagggttaaggctcaggttcaggctctgggcctggccgaggcccaacccatggcagtggttcaatcagtaccgggagctcatcccgttccggtgtatgcgttcagcataaaaggtccctcttacggtgaggatgtgtcaaatacaaccacagcgcagaaaagaaagtgtagtcagacgcagtgtcctcgtaaagtcatcaaaatggaaagtgaggaagggaaggaggctcgtctagcccgcagctctccagagcagccccgtccttccacctcgaaggcggttagtccaccacacttggatggtcccccatcccccaggtcacctgtcatcggatctgaagtgttcctgccaaactccaaccacgtggcgagtggagccggcgaggctgaggaacgcgtcgtggttatttcatcttcggaagactccgatgcggagaactctgtttctggacctgaggtacagccacggactccagcttcacctcacttccgctcccagggagcgcagccgcaacaagtgacccttaggcttgcactgaggctcggaaactttccagtgcgccactag

SEQ ID NO: 227968 - DNA, 1836 bp, Artificial Sequence
  derived and/or modified sequence
atggagccagccccagcgagaagccctagaccacaacaggaccctgcaaggcctcaggagcctactatgcctccaccggagaccccctcagagggtagacagccatcccctagtccaagcccaaccgaacgggctcctgcgtccgaggaagaattccagttcctgaggtgccagcaatgccaggcggaggcaaagtgtcctaagctgctcccgtgccttcacactctgtgctcaggctgcttagaagcgtccggtatgcagtgccccatttgccaggctccctggccgttaggagctgatacacccgctctggacaacgtattctttgagtccctccaacggcgactctccgtctacagacagatagtcgatgcacaggctgtctgcacccggtgtaaagagagtgccgatttctggtgcttcgagtgtgagcagctcttgtgtgctaagtgtttcgaggcacatcaatggtttctcaaacatgaggcgcgtcccctggctgagctgcgcaaccagagcgtcagagaattcctggacggcaccaggaagacgaacaacattttttgctcgaatcctaaccatcgcactccaacgttgacgtctatttattgtcggggatgcagtaaacctctctgctgttcatgtgcattgttggactcttctcactctgagttgaagtgcgacatttcggcagaaattcagcagaggcaggaggaattggacgccatgacgcaagcgctccaggagcaggactccgcattcggtgctgtacacgctcaaatgcacgcggctgtagggcagctgggcagggcaagagccgaaacggaggaactgattagagaaagagtccgacaggtggtcgctcacgtccgcgcacaggagagagaattactagaggctgtggacgcacggtaccagagggactacgaagaaatggcctcacggctaggcaggctagatgcggtcctgcagcgcattcggactggatcggccttggtccagagaatgaagtgctacgcctctgatcaggaggttttggacatgcacgggtttttgcgccaggccctgtgtaggctgaggcaggaagagcctcagtcactgcaggctgccgtgcgcacagacggattcgatgaattcaaagtgagattgcaggacctgtcctcatgcataactcagggcaaagacgccgcagtctccaagaaggcttctcccgaagccgcatctacaccaagagacccaatagatgtggatctgccagaagaagccgagcgggtgaaagcacaagtgcaggcactgggcctggcagaagcccagccgatggctgtagtccagtctgtaccaggggctcaccccgtgccagtgtatgcgttctccatcaaggggccatcgtacggcgaagacgtgtccaacacaactacagcacagaagcggaaatgttctcagacgcagtgccctcggaaggttattaagatggaatcagaagagggaaaggaggcccgactggctcggtcatctccggagcagcctaggccatctacctctaaggctgtatctccacctcatcttgatgggccaccttcacctaggtcgcccgtgatcggctctgaagtgttcctcccaaactccaatcacgtggcaagcggggcaggagaggccgaggagcgcgtggttgtgatctctagcagtgaggacagtgacgcagaaaactcagtgtccggcccagaggtgcaaccccgaacccctgcaagccctcactttcgttctcagggcgcacagccacagcaggtgaccctgcgtttagccctgaggctgggtaatttccccgtgcgtcactag

SEQ ID NO: 227969 - DNA, 3713 bp, Artificial Sequence
  derived and/or modified sequence
ctctccagaggcgggccctgagccggcacctcccctttcggacagctcaagggactcagccaactggctcacgcctccccttcagcttctcttcacgcactccaagatctaaaccgagaatcgaaactaagctggggtccatggagcctgcacccgcccgatctccgaggccccagcaggaccccgcccggccccaggagcccaccatgcctccccccgagaccccctctgaaggccgccagcccagccccagccccagccctacagagcgagcccccgcttcggaggaggagttccagtttctgcgctgccagcaatgccaggcggaagccaagtgcccgaagctgctgccttgtctgcacacgctgtgctcaggatgcctggaggcgtcgggcatgcagtgccccatctgccaggcgccctggcccctaggtgcagacacacccgccctggataacgtctttttcgagagtctgcagcggcgcctgtcggtgtaccggcagattgtggatgcgcaggctgtgtgcacccgctgcaaagagtcggccgacttctggtgctttgagtgcgagcagctcctctgcgccaagtgcttcgaggcacaccagtggttcctcaagcacgaggcccggcccctagcagagctgcgcaaccagtcggtgcgtgagttcctggacggcacccgcaagaccaacaacatcttctgctccaaccccaaccaccgcacccctacgctgaccagcatctactgccgaggatgttccaagccgctgtgctgctcgtgcgcgctccttgacagcagccacagtgagctcaagtgcgacatcagcgcagagatccagcagcgacaggaggagctggacgccatgacgcaggcgctgcaggagcaggatagtgcctttggcgcggttcacgcgcagatgcacgcggccgtcggccagctgggccgcgcgcgtgccgagaccgaggagctgatccgcgagcgcgtgcgccaggtggtagctcacgtgcgggctcaggagcgcgagctgctggaggctgtggacgcgcggtaccagcgcgactacgaggagatggccagtcggctgggccgcctggatgctgtgctgcagcgcatccgcacgggcagcgcgctggtgcagaggatgaagtgctacgcctcggaccaggaggtgctggacatgcacggtttcctgcgccaggcgctctgccgcctgcgccaggaggagccccagagcctgcaagctgccgtgcgcaccgatggcttcgacgagttcaaggtgcgcctgcaggacctcagctcttgcatcacccaggggaaagatgcagctgtatccaagaaagccagcccagaggctgccagcactcccagggaccctattgacgttgacctgcccgaggaggcagagagagtgaaggcccaggttcaggccctggggctggctgaagcccagcctatggctgtggtacagtcagtgcccggggcacaccccgtgccagtgtacgccttctccatcaaaggcccttcctatggagaggatgtctccaatacaacgacagcccagaagaggaagtgcagccagacccagtgccccaggaaggtcatcaagatggagtctgaggaggggaaggaggcaaggttggctcggagctccccggagcagcccaggcccagcacctccaaggcagtctcaccaccccacctggatggaccgcctagccccaggagccccgtcataggaagtgaggtcttcctgcccaacagcaaccacgtggccagtggcgccggggaggcagaggaacgcgttgtggtgatcagcagctcggaagactcagatgccgaaaactcggtgagtggcccagaagttcagcccaggactcctgcctccccccatttcaggtcccagggggcacagccacagcaggtgactctcagacttgccttgcgcctggggaattttccagtgaggcattgagtcccaagctgtgctgaggacagtctccaaatgacagctgcatgcctggaccaccccagccctcccactacaccagggccaggagctcttctgaaatgctgatagcatgtgtccagagccctgtctcttttctggaatgtccaagacctttgtctggagcttccttatgcattttctgtcctctaagtcctcagtgaggagggctggacaagaatccattccttggtttattacagccagtgggggccagtgaaggggtgtcaggccacagggcagctatataggggccaaacaagtgaggtttgactccatccatgtagaaagatatataaatccattccacagtgaaacaggtggcctcgtgggtagtgacccttctgtccctagaggtttattactagaggctggactatcacctgtccaggggaaaaggggatctgaatagagtgaaaggttggactgggtggcccctgaggtctcttccagccctcagtctgaggttctgtattggaaagtgcatggagcccatggagaccgccgagccacagtcctcgccagcccactcctcgccagcccactcctcgccagcccactcctcgccagtccagtctctgctgagagcacaaggagcctccagcctgccctgtggcacataccaccccccagcttggcctccccaccagcccgctgagcaggctgccacccccgatgctgagcctcacagcgagcctcctgatcaccaggagcgccctgccgtccaccgtgggatccgctacctgttgtacagagcacagagagccatccgccttcgccatgccctccgcttgcaccctcaattgcatcgggcccctattcggacttggtctccccatgtggtccaagccagcactcctgccatcacagggcccctcaaccatcctgccaatgcccaggaacatcctgcccagctgcaaaggggcatcagcccaccccaccggatacgaggggctgtgcgatcccgcagccgctccctccggggctcctcccatttatcccagtggctcaacaacttttttgccctccccttctcctccatggcttcccagcttgacatgtcttccgtggtgggggcaggggaaagcagagcccagactcttggagcaggtgttccccctggggactctgtcagaggctccatggaggcctctcaagtccaagtgcctctggaagcctctccaattacattcccaccaccctgtgccccagaaaggccccccatcagcccagtcccaggcgcccgtcaagcaggcctctgagagtgctacccttctcttgtaaccttgcagccaacacccctgcccggcccctgagctgcctcctccagcccatgctcttacaggccctgcacagagtagcactcattaattcttggttaaggaatgaatcaacgaatgaatggctatgcatggacctctgggcagggagacctgggtcttctctggctgagaggggaaggctaaggcatggctgagattcaagccaccattccaggcctctttgcccaagaaagaaacttctgtcacccttgcactctcctgtattctgagtccctggccaatagcacagccttccatgccccgacccccaccccaagcctctccactaggcctctgccaggatctaagcccatgagcacagggactggctatcccaagacctggcagatgtggctgctcaataaacacttgttgaaccatc

SEQ ID NO: 227970 - protein, 560 aa, Artificial Sequence
  derived and/or modified sequence
MEPAPARSPRPQQDPARPQEPTMPPPETPSEGRQPSPSPSPTERAPASEEEFQFLRCQQCQAEAKCPKLLPCLHTLCSGCLEASGMQCPICQAPWPLGADTPALDNVFFESLQRRLSVYRQIVDAQAVCTRCKESADFWCFECEQLLCAKCFEAHQWFLKHEARPLAELRNQSVREFLDGTRKTNNIFCSNPNHRTPTLTSIYCRGCSKPLCCSCALLDSSHSELKCDISAEIQQRQEELDAMTQALQEQDSAFGAVHAQMHAAVGQLGRARAETEELIRERVRQVVAHVRAQERELLEAVDARYQRDYEEMASRLGRLDAVLQRIRTGSALVQRMKCYASDQEVLDMHGFLRQALCRLRQEEPQSLQAAVRTDGFDEFKVRLQDLSSCITQGKDAAVSKKASPEAASTPRDPIDVDLPEEAERVKAQVQALGLAEAQPMAVVQSVPGAHPVPVYAFSIKGPSYGEDVSNTTTAQKRKCSQTQCPRKVIKMESEEGKEARLARSSPEQPRPSTSKAVSPPHLDGPPSPRSPVIGSEVFLPNSNHVASGAGEAGRERNALW

SEQ ID NO: 227971 - DNA, 1683 bp, Artificial Sequence
  derived and/or modified sequence
atggagcccgcccccgccagaagccccagaccccagcaggaccccgccagaccccaggagcccaccatgcccccccccgagacccccagcgagggcagacagcccagccccagccccagccccaccgagagagcccccgccagcgaggaggagttccagttcctgagatgccagcagtgccaggccgaggccaagtgccccaagctgctgccctgcctgcacaccctgtgcagcggctgcctggaggccagcggcatgcagtgccccatctgccaggccccctggcccctgggcgccgacacccccgccctggacaacgtgttcttcgagagcctgcagagaagactgagcgtgtacagacagatcgtggacgcccaggccgtgtgcaccagatgcaaggagagcgccgacttctggtgcttcgagtgcgagcagctgctgtgcgccaagtgcttcgaggcccaccagtggttcctgaagcacgaggccagacccctggccgagctgagaaaccagagcgtgagagagttcctggacggcaccagaaagaccaacaacatcttctgcagcaaccccaaccacagaacccccaccctgaccagcatctactgcagaggctgcagcaagcccctgtgctgcagctgcgccctgctggacagcagccacagcgagctgaagtgcgacatcagcgccgagatccagcagagacaggaggagctggacgccatgacccaggccctgcaggagcaggacagcgccttcggcgccgtgcacgcccagatgcacgccgccgtgggccagctgggcagagccagagccgagaccgaggagctgatcagagagagagtgagacaggtggtggcccacgtgagagcccaggagagagagctgctggaggccgtggacgccagataccagagagactacgaggagatggccagcagactgggcagactggacgccgtgctgcagagaatcagaaccggcagcgccctggtgcagagaatgaagtgctacgccagcgaccaggaggtgctggacatgcacggcttcctgagacaggccctgtgcagactgagacaggaggagccccagagcctgcaggccgccgtgagaaccgacggcttcgacgagttcaaggtgagactgcaggacctgagcagctgcatcacccagggcaaggacgccgccgtgagcaagaaggccagccccgaggccgccagcacccccagagaccccatcgacgtggacctgcccgaggaggccgagagagtgaaggcccaggtgcaggccctgggcctggccgaggcccagcccatggccgtggtgcagagcgtgcccggcgcccaccccgtgcccgtgtacgccttcagcatcaagggccccagctacggcgaggacgtgagcaacaccaccaccgcccagaagagaaagtgcagccagacccagtgccccagaaaggtgatcaagatggagagcgaggagggcaaggaggccagactggccagaagcagccccgagcagcccagacccagcaccagcaaggccgtgagccccccccacctggacggcccccccagccccagaagccccgtgatcggcagcgaggtgttcctgcccaacagcaaccacgtggccagcggcgccggcgaggccggcagagagagaaacgccctgtggtag

SEQ ID NO: 227972 - DNA, 1683 bp, Artificial Sequence
  derived and/or modified sequence
atggaacccgcgccagcacggagtcctcggccccagcaggatccagctaggccacaggagcctaccatgcctcctcccgagacgccaagtgaaggaagacagccatccccttctccctcgccaacagaaagggcccctgcaagcgaggaggagtttcagttcttgcgctgtcagcagtgccaggctgaagcaaaatgcccaaagctcttgccatgtctccacaccttgtgctccggatgcctagaagcatccggaatgcagtgcccaatctgccaggctccttggcccctgggcgcggatacccccgccctcgataatgtgtttttcgagagtctccaaaggagactgtctgtttacagacagattgtagatgcccaggcggtttgtacccgatgcaaagaatccgcagacttctggtgtttcgagtgtgaacagttgctgtgcgccaagtgcttcgaggcccaccaatggttcctgaagcatgaggccagacctctggctgaactgcgcaatcagtcggtgcgcgaattcctcgatggcacccggaaaaccaataacattttctgtagcaatccaaaccatcggacccccacactgacatctatctattgtaggggatgttctaaaccactctgttgcagctgtgccctgttggattcttcacatagtgagttgaagtgcgacatttcggcagagatacaacagagacaggaagaattggacgcaatgactcaggctttacaggaacaggattccgcctttggcgctgtgcatgctcagatgcacgccgcagtgggacagctcggaagggccagagcggaaaccgaagagctgatacgagagagggtgcgtcaggttgtcgcccatgtcagagcacaagaacgggagctactagaagccgttgatgctcgctaccaacgtgactacgaggagatggcgtccagactgggacggctcgacgccgtgcttcagcgaattcgcactggcagtgccctcgttcagcgcatgaagtgttacgcctccgaccaggaggtgctagatatgcacggatttctgagacaggcactgtgcagactgcggcaggaagagcctcaaagcttgcaagctgccgtgcgcaccgatggattcgatgaattcaaagtacggctgcaggatttgtccagctgcataacgcagggcaaagacgctgctgttagcaagaaggcctcccctgaagcggccagtacacctagagatcctattgacgtagatctgcctgaggaagctgaacgcgttaaggctcaagttcaggccctcggactcgccgaggcccagccaatggctgtagtccagtcagtccccggggcgcacccagttcccgtgtatgcgttctccatcaaaggccccagttacggagaagacgtttctaacactacaacggcccagaaacggaaatgttcccagacccagtgtccccgtaaggtgattaaaatggaaagtgaggagggcaaagaagctcgtcttgcacgtagcagccctgagcagccccggccctccaccagcaaggcagtgagtccaccgcacttagatggcccaccatcacctcgaagtcctgtgataggctcggaggtctttctgccgaattccaaccatgtggcctccggagctggggaagcgggtcgcgagaggaacgcactctggtag

SEQ ID NO: 227973 - DNA, 1683 bp, Artificial Sequence
  derived and/or modified sequence
atggagcccgccccagcccggagcccccggccccagcaggaccctgcccggccccaggagcccaccatgcctcctcctgagacccccagcgagggccggcagcccagccccagccccagccccacagagcgggccccagccagcgaggaggagttccagttcctgcgctgccagcagtgccaggccgaggccaagtgccccaagctgctgccctgcctgcacaccctgtgcagcggctgcctggaggccagcggcatgcagtgccccatctgccaggccccctggcccctgggcgctgacaccccagccctggacaacgtgttctttgagagcctgcagaggcggctgtctgtgtaccggcagatcgtggatgcccaggccgtgtgcacccgctgcaaggagagcgctgacttctggtgctttgaatgtgagcagctgctgtgtgccaagtgctttgaggcccaccagtggttcctgaagcatgaggcccggcccctggccgagctgaggaaccagagcgtgcgggagttcctggatggcaccaggaagaccaacaacatcttctgcagcaaccccaaccacaggacccccaccctgaccagcatctactgccggggctgcagcaagcccctgtgctgcagctgtgccctgctggacagcagccacagcgagctgaagtgtgacatctctgctgagatccagcagaggcaggaggagctggatgccatgacccaggccctgcaggagcaggacagcgccttcggggctgtgcacgcccagatgcatgctgctgtgggccagctgggccgggcccgggcagagacagaggagctgatccgggagcgggtgcggcaggtggtggcccacgtgcgggcccaggagcgggagctgctggaggccgtggatgcccgctaccagagggactatgaggagatggccagccggctgggccgcctggatgctgtgctgcagaggatcagaacaggcagcgccctggtgcagaggatgaagtgctacgccagtgaccaggaggtgctggacatgcacggcttcctgcggcaggccctgtgccgcctgcggcaggaggagccccagagcctgcaggccgctgtgaggacagatggctttgatgagttcaaggtgcggctgcaggacctgagcagctgcatcacccagggcaaggatgctgctgtgtccaagaaggccagccctgaggccgccagcaccccccgggaccccattgatgtggacctgcctgaggaggccgagcgggtgaaggcccaggtgcaggccctgggcctggccgaggcccagcccatggctgtggtgcagagcgtgcctggggcccaccctgtgcctgtgtatgccttcagcatcaagggccccagctatggagaagatgtgagcaacaccaccacagcccagaagaggaagtgcagccagacccagtgccccaggaaggtgatcaagatggagagcgaggagggcaaggaggcccggctggcccggagcagccctgagcagccccggcccagcaccagcaaggctgtgtccccaccccacctggatggcccccccagccccaggagccctgtgattggcagcgaggtgttcctgcccaacagcaaccacgtggccagcggggccggggaggccggccgggagagaaatgccctgtggtag

SEQ ID NO: 227974 - DNA, 1683 bp, Artificial Sequence
  derived and/or modified sequence
atggagcccgcccccgcccggagcccccggccccagcaggaccccgccaggccccaggagcctaccatgcctcctccagagaccccttccgaagggagacagccatccccaagcccatcccctacagagagggcacctgctagcgaggaggaatttcaattcttgcgctgtcagcaatgtcaggcggaggctaaatgcccaaagttgctgccctgccttcatactctatgttccggatgcctggaggcatctggcatgcagtgtcctatttgccaggcaccttggccactgggcgcagatactccagccctggacaacgtcttcttcgagagtctacaacgtcggctcagtgtgtatcgacaaattgtcgacgcacaggcagtgtgtaccaggtgcaaagagagcgccgatttttggtgcttcgaatgtgagcagctcctgtgcgcgaaatgcttcgaagctcaccagtggtttctgaagcacgaggcccgccctcttgccgaactgcgtaatcagtcagttagggagtttcttgatggaacccgtaaaacaaacaacatcttctgctcaaaccctaatcaccggacacctacgctgactagtatctactgccgcggctgctctaagcctttatgttgctcctgcgccctgcttgatagctcacactcggaattaaaatgcgatatcagtgccgaaattcaacagaggcaggaggagctggatgccatgacgcaagctttgcaggaacaagattcggcattcggcgcagtgcacgcgcagatgcatgctgccgtgggccagcttggccgtgcacgggctgagacagaggagctgattcgcgagagagtgcgtcaagtagtcgcccatgtgcgcgcacaggaaagggagcttctggaggcagtggacgcacgttaccaaagagattatgaggaaatggctagcaggctgggtcggttagatgccgtgctgcagagaatccggactgggtccgctcttgtgcaacgaatgaagtgttatgcttctgatcaggaggttctggacatgcatggtttcctgcgccaagccctgtgtcggttgcggcaggaagaaccacaatcattacaggcagcggtaagaactgacggatttgacgaatttaaagttaggctccaggacctctcctcatgcattacccagggaaaagacgcggccgtgtccaagaaggccagccccgaagccgcatctactccaagggatcctatcgacgtggatttaccagaggaagcggagagggtgaaagcacaggtccaggccctcggactggccgaagcacagccgatggcagtagtccagagcgtgcccggagctcatccagttccagtttatgctttttcaatcaagggaccaagctacggcgaggatgtgagtaataccaccacggctcagaaacggaaatgcagccaaacacagtgtcctcgaaaggttatcaagatggaatccgaggaagggaaagaagcgaggttggcgcggagctctcccgagcagccacgaccaagtacctccaaggcagtctctcctccccatctggacggcccacctagccccagaagcccggtaattgggagcgaggttttcctgcctaactccaatcacgtggcctctggcgccggggaggccgggagggaacggaatgcactctggtag

SEQ ID NO: 227975 - DNA, 1683 bp, Artificial Sequence
  derived and/or modified sequence
atggagcccgctcccgctaggagtccacgtccccagcaggaccccgctcggcctcaggagccaaccatgccccctccagagacccctagcgagggcaggcagccgtcgcccagtccttctcccactgagagggcccctgcctctgaagaggagttccaatttttgcgctgccagcagtgccaggctgaagctaagtgccctaagctgctcccctgtctacatacactgtgtagtggttgcctggaagcaagcggcatgcagtgccccatttgtcaggctccgtggcccctgggagccgacacacccgcactggacaacgtattctttgagtcactccagcggaggctttccgtgtataggcagattgtcgatgcgcaggccgtgtgcacccgatgtaaagagagcgccgacttttggtgtttcgaatgcgagcagttgctgtgcgccaagtgctttgaggcgcatcagtggtttctgaagcacgaagctcgccctttggcagagctgaggaaccagagcgttcgggagttcctagatggtacacgtaagacaaataacatcttctgttcaaatccgaaccaccggacacccaccctcacctccatttactgtaggggatgcagtaaacctctttgctgttcttgcgccctgcttgattcttcgcactccgaattaaaatgcgacatctctgccgagatccagcagcggcaggaagagctggacgctatgacacaggcccttcaggagcaggacagtgcatttggagccgtacatgcccagatgcacgctgctgtggggcaactcggccgtgctagggcagaaaccgaggaactcatccgcgagagagtgaggcaagtggtagctcacgtgcgagcccaagaaagagaactccttgaggccgtggatgctcggtatcagcgcgattatgaggagatggcatcacggctgggacgcctggacgccgtgctgcaacggatcagaaccggtagcgcgttagtccaaagaatgaaatgctatgcttcagaccaggaggtcctggatatgcacggcttcctgcggcaggccctgtgccgcttgcgtcaggaggagccgcaatcactacaggctgcagtgcgaactgatggattcgacgagttcaaggtcagacttcaggatcttagttcttgtatcacccagggtaaggatgccgctgtgagtaagaaggcctcccccgaagcagcaagtacaccccgagacccaattgacgtggacctacctgaagaagcagaaagagtgaaagctcaagtgcaggcattggggcttgcagaagcccagcccatggccgtggtgcagagcgtccccggtgcccaccctgtcccagtttacgccttctccattaaaggcccaagttacggtgaagacgtgagcaatacaactacagcccagaaacgaaaatgctctcagacccagtgcccacgcaaggtgattaaaatggagagcgaggaaggcaaagaggcgaggttggcacggtcttcccccgagcagcccagaccctcaacatcaaaggccgtgagtccaccacatctcgacggcccaccatctcctcgtagccctgtaattggtagcgaggtgttcctgcctaactccaaccacgtggccagcggcgcaggcgaagcaggcagggagaggaacgcactttggtag

SEQ ID NO: 227976 - DNA, 3080 bp, Artificial Sequence
  derived and/or modified sequence
ctctccagaggcgggccctgagccggcacctcccctttcggacagctcaagggactcagccaactggctcacgcctccccttcagcttctcttcacgcactccaagatctaaaccgagaatcgaaactaagctggggtccatggagcctgcacccgcccgatctccgaggccccagcaggaccccgcccggccccaggagcccaccatgcctccccccgagaccccctctgaaggccgccagcccagccccagccccagccctacagagcgagcccccgcttcggaggaggagttccagtttctgcgctgccagcaatgccaggcggaagccaagtgcccgaagctgctgccttgtctgcacacgctgtgctcaggatgcctggaggcgtcgggcatgcagtgccccatctgccaggcgccctggcccctaggtgcagacacacccgccctggataacgtctttttcgagagtctgcagcggcgcctgtcggtgtaccggcagattgtggatgcgcaggctgtgtgcacccgctgcaaagagtcggccgacttctggtgctttgagtgcgagcagctcctctgcgccaagtgcttcgaggcacaccagtggttcctcaagcacgaggcccggcccctagcagagctgcgcaaccagtcggtgcgtgagttcctggacggcacccgcaagaccaacaacatcttctgctccaaccccaaccaccgcacccctacgctgaccagcatctactgccgaggatgttccaagccgctgtgctgctcgtgcgcgctccttgacagcagccacagtgagctcaagtgcgacatcagcgcagagatccagcagcgacaggaggagctggacgccatgacgcaggcgctgcaggagcaggatagtgcctttggcgcggttcacgcgcagatgcacgcggccgtcggccagctgggccgcgcgcgtgccgagaccgaggagctgatccgcgagcgcgtgcgccaggtggtagctcacgtgcgggctcaggagcgcgagctgctggaggctgtggacgcgcggtaccagcgcgactacgaggagatggccagtcggctgggccgcctggatgctgtgctgcagcgcatccgcacgggcagcgcgctggtgcagaggatgaagtgctacgcctcggaccaggaggtgctggacatgcacggtttcctgcgccaggcgctctgccgcctgcgccaggaggagccccagagcctgcaagctgccgtgcgcaccgatggcttcgacgagttcaaggtgcgcctgcaggacctcagctcttgcatcacccaggggaaagatgcagctgtatccaagaaagccagcccagaggctgccagcactcccagggaccctattgacgttgacctgcccgaggaggcagagagagtgaaggcccaggttcaggccctggggctggctgaagcccagcctatggctgtggtacagtcagtgcccggggcacaccccgtgccagtgtacgccttctccatcaaaggcccttcctatggagaggatgtctccaatacaacgacagcccagaagaggaagtgcagccagacccagtgccccaggaaggtcatcaagatggagtctgaggaggggaaggaggcaaggttggctcggagctccccggagcagcccaggcccagcacctccaaggcagtctcaccaccccacctggatggaccgcctagccccaggagccccgtcataggaagtgaggtcttcctgcccaacagcaaccacgtggccagtggcgccggggaggcaggtagggagaggaacgcgttgtggtgatcagcagctcggaagactcagatgccgaaaactcgtgcatggagcccatggagaccgccgagccacagtcctcgccagcccactcctcgccagcccactcctcgccagcccactcctcgccagtccagtctctgctgagagcacaaggagcctccagcctgccctgtggcacataccaccccccagcttggcctccccaccagcccgctgagcaggctgccacccccgatgctgagcctcacagcgagcctcctgatcaccaggagcgccctgccgtccaccgtgggatccgctacctgttgtacagagcacagagagccatccgccttcgccatgccctccgcttgcaccctcaattgcatcgggcccctattcggacttggtctccccatgtggtccaagccagcactcctgccatcacagggcccctcaaccatcctgccaatgcccaggaacatcctgcccagctgcaaaggggcatcagcccaccccaccggatacgaggggctgtgcgatcccgcagccgctccctccggggctcctcccatttatcccagtggctcaacaacttttttgccctccccttctcctccatggcttcccagcttgacatgtcttccgtggtgggggcaggggaaagcagagcccagactcttggagcaggtgttccccctggggactctgtcagaggctccatggaggcctctcaagtccaagtgcctctggaagcctctccaattacattcccaccaccctgtgccccagaaaggccccccatcagcccagtcccaggcgcccgtcaagcaggcctctgagagtgctacccttctcttgtaaccttgcagccaacacccctgcccggcccctgagctgcctcctccagcccatgctcttacaggccctgcacagagtagcactcattaattcttggttaaggaatgaatcaacgaatgaatggctatgcatggacctctgggcagggagacctgggtcttctctggctgagaggggaaggctaaggcatggctgagattcaagccaccattccaggcctctttgcccaagaaagaaacttctgtcacccttgcactctcctgtattctgagtccctggccaatagcacagccttccatgccccgacccccaccccaagcctctccactaggcctctgccaggatctaagcccatgagcacagggactggctatcccaagacctggcagatgtggctgctcaataaacacttgttgaaccatc

SEQ ID NO: 227977 - DNA, 1272 bp, Artificial Sequence
  derived and/or modified sequence
atggagcccgcccccgccagaagccccagaccccagcaggaccccgccagaccccaggagcccaccatgcccccccccgagacccccagcgagggcagacagcccagccccagccccagccccaccgagagagcccccgccagcgaggaggagttccagttcctgagatgccagcagtgccaggccgaggccaagtgccccaagctgctgccctgcctgcacaccctgtgcagcggctgcctggaggccagcggcatgcagtgccccatctgccaggccccctggcccctgggcgccgacacccccgccctggacaacgtgttcttcgagagcctgcagagaagactgagcgtgtacagacagatcgtggacgcccaggccgtgtgcaccagatgcaaggagagcgccgacttctggtgcttcgagtgcgagcagctgctgtgcgccaagtgcttcgaggcccaccagtggttcctgaagcacgaggccagacccctggccgagctgagaaaccagagcgtgagagagttcctggacggcaccagaaagaccaacaacatcttctgcagcaaccccaaccacagaacccccaccctgaccagcatctactgcagaggctgcagcaagcccctgtgctgcagctgcgccctgctggacagcagccacagcgagctgaagtgcgacatcagcgccgagatccagcagagacaggaggagctggacgccatgacccaggccctgcaggagcaggacagcgccttcggcgccgtgcacgcccagatgcacgccgccgtgggccagctgggcagagccagagccgagaccgaggagctgatcagagagagagtgagacaggtggtggcccacgtgagagcccaggagagagagctgctggaggccgtggacgccagataccagagagactacgaggagatggccagcagactgggcagactggacgccgtgctgcagagaatcagaaccggcagcgccctggtgcagagaatgaagtgctacgccagcgaccaggaggtgctggacatgcacggcttcctgagacaggccctgtgcagactgagacaggaggagccccagagcctgcaggccgccgtgagaaccgacggcttcgacgagttcaaggtgagactgcaggacctgagcagctgcatcacccagggcaaggacgccgccgtgagcaagaaggccagccccgaggccgccagcacccccagagaccccatcgacgtggacctgagaaacgccctgtggtag

SEQ ID NO: 227978 - DNA, 1272 bp, Artificial Sequence
  derived and/or modified sequence
atggaacccgcccctgcccggtccccccggccccagcaggatccagcacgcccccaagagcctaccatgccacccccagaaaccccttcagaagggagacagccatcgccttcccccagtcccaccgagagagcaccggcttccgaggaagaattccagtttctccggtgtcagcagtgtcaagccgaagcaaagtgccctaagttgctcccctgcctccataccctttgttcgggctgcctggaggcaagcgggatgcaatgtcctatttgccaggccccatggccactaggggccgataccccggctcttgacaacgtgttctttgaatccctccaacggcgcctctctgtatacagacagattgtggatgcacaagccgtgtgtacccggtgcaaggagtcagccgatttctggtgcttcgagtgtgagcagctactgtgcgcgaaatgcttcgaggcacaccagtggtttctgaaacatgaagcccgcccactggccgaattacgcaaccagtcagtgcgcgagtttttggatggcacccgcaagactaacaacatcttctgttccaatcctaatcacaggacacctactctgaccagtatctactgtcggggatgttcaaagccactctgctgttcctgtgctctcctggattcctcccattctgaactgaaatgcgacattagcgcagagatccaacagcgacaggaagagttagacgcaatgactcaggctttgcaggaacaggactcagcattcggggccgtccatgcccagatgcacgccgcagtcgggcaactgggacgtgcacgagccgagacggaagaactcatcagggaaagggtgaggcaggtcgtggcccacgtgagggctcaggagagggagctcctggaggcagtcgatgccaggtaccagcgcgactatgaagagatggccagcagattgggtagattagacgcagtcctgcagaggattcgaacaggctcagcactcgtccagaggatgaagtgttatgcctccgatcaggaagtgctggacatgcacggattccttcgccaggcactttgtcgtctgaggcaagaagagccacagtcactgcaggctgccgttagaaccgatggctttgacgagtttaaggtacgcctacaagatctgagctcgtgtatcacccaaggtaaagacgccgccgtttctaagaaagcctcacctgaggccgctagtacgcccagagaccccatcgatgttgatttaaggaacgctctctggtag

SEQ ID NO: 227979 - DNA, 1272 bp, Artificial Sequence
  derived and/or modified sequence
atggagcccgccccagcccggagcccccggccccagcaggaccctgcccggccccaggagcccaccatgcctcctcctgagacccccagcgagggccggcagcccagccccagccccagccccacagagcgggccccagccagcgaggaggagttccagttcctgcgctgccagcagtgccaggccgaggccaagtgccccaagctgctgccctgcctgcacaccctgtgcagcggctgcctggaggccagcggcatgcagtgccccatctgccaggccccctggcccctgggcgctgacaccccagccctggacaacgtgttctttgagagcctgcagaggcggctgtctgtgtaccggcagatcgtggatgcccaggccgtgtgcacccgctgcaaggagagcgctgacttctggtgctttgaatgtgagcagctgctgtgtgccaagtgctttgaggcccaccagtggttcctgaagcatgaggcccggcccctggccgagctgaggaaccagagcgtgcgggagttcctggatggcaccaggaagaccaacaacatcttctgcagcaaccccaaccacaggacccccaccctgaccagcatctactgccggggctgcagcaagcccctgtgctgcagctgtgccctgctggacagcagccacagcgagctgaagtgtgacatctctgctgagatccagcagaggcaggaggagctggatgccatgacccaggccctgcaggagcaggacagcgccttcggggctgtgcacgcccagatgcatgctgctgtgggccagctgggccgggcccgggcagagacagaggagctgatccgggagcgggtgcggcaggtggtggcccacgtgcgggcccaggagcgggagctgctggaggccgtggatgcccgctaccagagggactatgaggagatggccagccggctgggccgcctggatgctgtgctgcagaggatcagaacaggcagcgccctggtgcagaggatgaagtgctacgccagtgaccaggaggtgctggacatgcacggcttcctgcggcaggccctgtgccgcctgcggcaggaggagccccagagcctgcaggccgctgtgaggacagatggctttgatgagttcaaggtgcggctgcaggacctgagcagctgcatcacccagggcaaggatgctgctgtgtccaagaaggccagccctgaggccgccagcaccccccgggaccccattgatgtggacctgagaaatgccctgtggtag

SEQ ID NO: 227980 - DNA, 1272 bp, Artificial Sequence
  derived and/or modified sequence
atggagcccgcccccgcccggagcccccggccccagcaggaccccgctagaccgcaggagccaacaatgccaccaccggagactccgtccgaggggcgccagccatccccttcccccagccccactgagcgggctccggcctctgaggaggaatttcaattcctccgctgtcagcagtgccaagcagaggcaaagtgccctaaactactgccctgccttcatactttgtgttccggatgcctggaagctagtggtatgcagtgccctatttgccaggcaccctggccccttggcgccgatacacccgcactggataatgtcttctttgaaagtctgcaacggagactgagtgtttaccggcaaattgtcgacgcccaggcggtgtgcacccggtgcaaagagtccgccgatttctggtgttttgagtgcgaacaattgctctgtgccaagtgctttgaggctcaccagtggttcctcaaacacgaggcacgtccactggcagaactgagaaatcagtcagtccgcgaattcctggacgggacccgcaagactaacaacattttttgttcaaatcctaaccacagaacccctacccttacctccatttactgccggggatgctctaaaccactttgctgttcctgcgctctcctggacagctctcactccgagctcaaatgtgatattagcgccgagatccagcagagacaggaggaacttgatgcgatgacccaggccctccaggaacaggacagtgcattcggagcggtgcacgcacaaatgcacgctgctgtcggccagctaggccgggctcgagcggagactgaggagttgattcgggaacgtgtgcgccaagtggtagctcacgtgcgcgcacaggaaagagagcttctggaagctgtcgacgcaagatatcaaagggactatgaagagatggcctccaggctgggtcgcctagacgccgtgcttcagagaatccgcaccggttccgcgctcgttcaaagaatgaagtgttatgcaagcgatcaggaagtccttgatatgcacgggtttcttcgacaggccctctgccgcctgagacaagaggaacctcagagcctgcaagcagcagtccgcactgatgggtttgatgagtttaaagtgcgcttgcaggatctgtcttcatgtatcacacaggggaaggacgccgctgtgtctaaaaaagcttctccggaggcagcaagtacaccacgtgacccgatcgatgtggacctcaggaacgccctgtggtag

SEQ ID NO: 227981 - DNA, 1272 bp, Artificial Sequence
  derived and/or modified sequence
atggaacctgcccctgcaaggagccctaggccccaacaggatccagcccgaccccaggagcccactatgcccccacccgaaacaccctcagaagggaggcaaccctctccgagcccgagtccaacagaaagggcacccgcttcagaggaggagtttcagttcttgcggtgtcaacagtgccaggctgaagctaagtgcccaaaattgctgccgtgtctgcataccttgtgttccggctgcctggaagcctccggcatgcaatgtcctatatgtcaggccccttggcccttgggcgcagatacacctgctctggataatgtcttttttgaaagcctgcagagacgtctaagtgtatacagacagatcgtagatgcccaggctgtctgtacccgatgtaaagagagcgcggacttctggtgttttgagtgcgaacagctgctatgtgcgaaatgttttgaagcacaccagtggtttctcaagcacgaggcacgccctttggcggagctccggaaccagtccgttagagagttcctggacgggactcggaaaaccaacaacattttttgctccaatccaaatcacaggacaccaactttaacctccatctattgtcgcggttgctcgaagccactctgttgcagttgcgccctgcttgacagtagccattccgagctgaagtgcgacatatctgctgagatccagcaacgccaggaggaactggatgctatgacccaggccttacaggaacaggatagtgcattcggggcagttcacgcacagatgcatgcagccgttggccagctgggaagagctagagctgagacagaagagctcatacgtgaaagggtacgccaggtggttgcacatgttcgtgctcaggaaagggagctgctggaggccgtggacgcacgttaccagagagattacgaggagatggcttcacgattgggaagactggatgcagtgttacaaagaatccgcaccggctcagccctggttcaaaggatgaagtgctatgcatcggatcaggaggtgctggatatgcatggatttctccgtcaggcactgtgtaggcttcgccaggaagagccccagtctcttcaggccgctgtaagaacagacggttttgatgagtttaaggtgcggttgcaggatctttcatcctgtattacacaggggaaggacgcagctgtttcgaaaaaagcctctccagaagctgcctctacacccagggaccccattgacgtagatctgcgaaacgccctgtggtag

SEQ ID NO: 227982 - DNA, 1834 bp, Artificial Sequence
  derived and/or modified sequence
ctctccagaggcgggccctgagccggcacctcccctttcggacagctcaagggactcagccaactggctcacgcctccccttcagcttctcttcacgcactccaagatctaaaccgagaatcgaaactaagctggggtccatggagcctgcacccgcccgatctccgaggccccagcaggaccccgcccggccccaggagcccaccatgcctccccccgagaccccctctgaaggccgccagcccagccccagccccagccctacagagcgagcccccgcttcggaggaggagttccagtttctgcgctgccagcaatgccaggcggaagccaagtgcccgaagctgctgccttgtctgcacacgctgtgctcaggatgcctggaggcgtcgggcatgcagtgccccatctgccaggcgccctggcccctaggtgcagacacacccgccctggataacgtctttttcgagagtctgcagcggcgcctgtcggtgtaccggcagattgtggatgcgcaggctgtgtgcacccgctgcaaagagtcggccgacttctggtgctttgagtgcgagcagctcctctgcgccaagtgcttcgaggcacaccagtggttcctcaagcacgaggcccggcccctagcagagctgcgcaaccagtcggtgcgtgagttcctggacggcacccgcaagaccaacaacatcttctgctccaaccccaaccaccgcacccctacgctgaccagcatctactgccgaggatgttccaagccgctgtgctgctcgtgcgcgctccttgacagcagccacagtgagctcaagtgcgacatcagcgcagagatccagcagcgacaggaggagctggacgccatgacgcaggcgctgcaggagcaggatagtgcctttggcgcggttcacgcgcagatgcacgcggccgtcggccagctgggccgcgcgcgtgccgagaccgaggagctgatccgcgagcgcgtgcgccaggtggtagctcacgtgcgggctcaggagcgcgagctgctggaggctgtggacgcgcggtaccagcgcgactacgaggagatggccagtcggctgggccgcctggatgctgtgctgcagcgcatccgcacgggcagcgcgctggtgcagaggatgaagtgctacgcctcggaccaggaggtgctggacatgcacggtttcctgcgccaggcgctctgccgcctgcgccaggaggagccccagagcctgcaagctgccgtgcgcaccgatggcttcgacgagttcaaggtgcgcctgcaggacctcagctcttgcatcacccaggggaaagatgcagctgtatccaagaaagccagcccagaggctgccagcactcccagggaccctattgacgttgacctgaggaacgcgttgtggtgatcagcagctcggaagactcagatgccgaaaactcgtcctcccgagagctggatgacagcagcagtgagtccagtgacctccagctggaaggccccagcaccctcagggtcctggacgagaaccttgctgacccccaagcagaagacagacctctggttttctttgacctcaagattgacaatgaaagtgggttctcctggggctacccccacccctttctaatttagtctctgagtcccaaaaagaagtgcaggcagagccatctgccaggcccaggagagctctgagctctggccaacaactgcagccaggctgggcagagcactccggctcacctgggctcctggcgtgtcatttgctggcttgaataaagatgtccgccttatccagtgcctgagtgtgcgagagaggcagatgcctcc

SEQ ID NO: 227983 - protein, 435 aa, Artificial Sequence
  derived and/or modified sequence
MEPAPARSPRPQQDPARPQEPTMPPPETPSEGRQPSPSPSPTERAPASEEEFQFLRCQQCQAEAKCPKLLPCLHTLCSGCLEASGMQCPICQAPWPLGADTPALDNVFFESLQRRLSVYRQIVDAQAVCTRCKESADFWCFECEQLLCAKCFEAHQWFLKHEARPLAELRNQSVREFLDGTRKTNNIFCSNPNHRTPTLTSIYCRGCSKPLCCSCALLDSSHSELKCDISAEIQQRQEELDAMTQALQEQDSAFGAVHAQMHAAVGQLGRARAETEELIRERVRQVVAHVRAQERELLEAVDARYQRDYEEMASRLGRLDAVLQRIRTGSALVQRMKCYASDQEVLDMHGFLRQALCRLRQEEPQSLQAAVRTDGFDEFKVRLQDLSSCITQGKDAAVSKKASPEAASTPRDPIDVDLLPPPAHALTGPAQSSTH

SEQ ID NO: 227984 - DNA, 1308 bp, Artificial Sequence
  derived and/or modified sequence
atggagcccgcccccgccagaagccccagaccccagcaggaccccgccagaccccaggagcccaccatgcccccccccgagacccccagcgagggcagacagcccagccccagccccagccccaccgagagagcccccgccagcgaggaggagttccagttcctgagatgccagcagtgccaggccgaggccaagtgccccaagctgctgccctgcctgcacaccctgtgcagcggctgcctggaggccagcggcatgcagtgccccatctgccaggccccctggcccctgggcgccgacacccccgccctggacaacgtgttcttcgagagcctgcagagaagactgagcgtgtacagacagatcgtggacgcccaggccgtgtgcaccagatgcaaggagagcgccgacttctggtgcttcgagtgcgagcagctgctgtgcgccaagtgcttcgaggcccaccagtggttcctgaagcacgaggccagacccctggccgagctgagaaaccagagcgtgagagagttcctggacggcaccagaaagaccaacaacatcttctgcagcaaccccaaccacagaacccccaccctgaccagcatctactgcagaggctgcagcaagcccctgtgctgcagctgcgccctgctggacagcagccacagcgagctgaagtgcgacatcagcgccgagatccagcagagacaggaggagctggacgccatgacccaggccctgcaggagcaggacagcgccttcggcgccgtgcacgcccagatgcacgccgccgtgggccagctgggcagagccagagccgagaccgaggagctgatcagagagagagtgagacaggtggtggcccacgtgagagcccaggagagagagctgctggaggccgtggacgccagataccagagagactacgaggagatggccagcagactgggcagactggacgccgtgctgcagagaatcagaaccggcagcgccctggtgcagagaatgaagtgctacgccagcgaccaggaggtgctggacatgcacggcttcctgagacaggccctgtgcagactgagacaggaggagccccagagcctgcaggccgccgtgagaaccgacggcttcgacgagttcaaggtgagactgcaggacctgagcagctgcatcacccagggcaaggacgccgccgtgagcaagaaggccagccccgaggccgccagcacccccagagaccccatcgacgtggacctgctgcccccccccgcccacgccctgaccggccccgcccagagcagcacccactag

SEQ ID NO: 227985 - DNA, 1308 bp, Artificial Sequence
  derived and/or modified sequence
atggaacctgcccctgcaagatccccaaggcctcagcaggaccccgctagaccacaagagcccactatgccaccaccggagactccctccgaggggcggcagcccagtccctccccatcaccaaccgaacgcgccccggccagcgaggaggagttccagtttctaaggtgccagcaatgccaggctgaagccaagtgccccaaattactcccatgtttacataccctgtgtagcggctgcctggaagcctccgggatgcaatgtccaatttgccaggctccatggcctcttggagctgacactccagccttggataatgtttttttcgaatctttacaaaggcggctgagcgtataccgacagatcgtagatgcacaggccgtgtgcactagatgtaaggaatccgccgatttctggtgcttcgaatgtgagcagctcctatgtgcaaagtgtttcgaggcccaccagtggttcttgaagcacgaggccaggcccttggcagaacttcgtaaccagtcagtgagagaattccttgatggcacacgtaaaaccaataatatattttgtagcaaccctaatcaccggacgcctaccctgacaagcatctactgtcgcggctgtagcaagcccctgtgttgcagttgtgctctacttgatagctcacattcggagttaaaatgcgatatatctgccgaaattcagcaaagacaggaggagttagatgccatgactcaggctcttcaggagcaggactctgcattcggagccgtccatgcgcagatgcatgccgccgttgggcagttaggccgggccagagctgagactgaagaacttattcgcgaacgcgtgaggcaagtcgtagcccacgtgagggctcaggaacgagaactacttgaggctgttgacgcaaggtatcaaagggattacgaggagatggcgagtagacttggaagactcgatgctgtattgcagagaatcagaaccggcagcgcgctagttcagagaatgaaatgctacgcaagtgaccaggaggtgttggacatgcacggatttcttcggcaggccctgtgtagactcaggcaggaggaacctcagtcactccaagccgccgtccgcaccgatgggtttgatgaatttaaagtgcgcctccaggatctctcaagctgtatcacacagggcaaggatgctgctgtgtcaaaaaaggcctccccggaagctgcaagcacaccacgtgaccccatcgatgtggacctgctgcccccacctgctcacgcgttgacagggcccgcgcaatcgtccactcactag

SEQ ID NO: 227986 - DNA, 1308 bp, Artificial Sequence
  derived and/or modified sequence
atggagcccgccccagcccggagcccccggccccagcaggaccctgcccggccccaggagcccaccatgcctcctcctgagacccccagcgagggccggcagcccagccccagccccagccccacagagcgggccccagccagcgaggaggagttccagttcctgcgctgccagcagtgccaggccgaggccaagtgccccaagctgctgccctgcctgcacaccctgtgcagcggctgcctggaggccagcggcatgcagtgccccatctgccaggccccctggcccctgggcgctgacaccccagccctggacaacgtgttctttgagagcctgcagaggcggctgtctgtgtaccggcagatcgtggatgcccaggccgtgtgcacccgctgcaaggagagcgctgacttctggtgctttgaatgtgagcagctgctgtgtgccaagtgctttgaggcccaccagtggttcctgaagcatgaggcccggcccctggccgagctgaggaaccagagcgtgcgggagttcctggatggcaccaggaagaccaacaacatcttctgcagcaaccccaaccacaggacccccaccctgaccagcatctactgccggggctgcagcaagcccctgtgctgcagctgtgccctgctggacagcagccacagcgagctgaagtgtgacatctctgctgagatccagcagaggcaggaggagctggatgccatgacccaggccctgcaggagcaggacagcgccttcggggctgtgcacgcccagatgcatgctgctgtgggccagctgggccgggcccgggcagagacagaggagctgatccgggagcgggtgcggcaggtggtggcccacgtgcgggcccaggagcgggagctgctggaggccgtggatgcccgctaccagagggactatgaggagatggccagccggctgggccgcctggatgctgtgctgcagaggatcagaacaggcagcgccctggtgcagaggatgaagtgctacgccagtgaccaggaggtgctggacatgcacggcttcctgcggcaggccctgtgccgcctgcggcaggaggagccccagagcctgcaggccgctgtgaggacagatggctttgatgagttcaaggtgcggctgcaggacctgagcagctgcatcacccagggcaaggatgctgctgtgtccaagaaggccagccctgaggccgccagcaccccccgggaccccattgatgtggacctgctgcccccaccagcccacgccctgactggacctgcccagagcagcacccactag

SEQ ID NO: 227987 - DNA, 1308 bp, Artificial Sequence
  derived and/or modified sequence
atggagcccgcccccgcccggagcccccggccccagcaggaccccgcacggccccaagagccaacaatgccaccacccgaaactccgagcgaggggagacagccctccccctccccatctccaaccgagcgggcaccagcaagcgaagaagagttccagtttctgaggtgtcagcagtgccaggctgaagcaaagtgccctaagctcctcccctgtcttcacacactatgttccgggtgtctggaagccagcggtatgcagtgcccaatttgtcaagcgccctggcctctcggagctgatactcccgcgctcgacaatgttttcttcgagtctctgcaacggcgcctaagcgtgtaccgtcagattgtggatgcccaggcagtatgcacacggtgtaaggaatcagccgacttttggtgctttgagtgtgagcagcttctctgcgctaagtgcttcgaagctcatcaatggtttctgaagcacgaagcgagaccactggcggagctgaggaaccaatccgtcagggaatttctggatggaaccagaaaaaccaataacattttctgctccaatcccaaccataggacccccaccctgacgtccatttattgtcgtggatgtagcaagcctctttgctgcagctgcgcactcctcgattcttcccacagcgagctcaagtgtgacatctccgctgaaatccaacaacggcaggaagagctggacgccatgacccaggccctccaggaacaggacagcgcgttcggagccgtccatgcccagatgcacgctgccgtgggtcagttaggcagggcccgcgctgagactgaagagctaattagagagagggtgaggcaagtggtggcccacgtgcgtgcccaggaacgcgaattgctggaagccgtggatgccagataccagcgggattacgaggaaatggccagccgtctgggtcgcctggacgcagtgctgcaacgtataagaactggctccgccttagttcagagaatgaagtgttatgctagtgatcaggaagtgctggacatgcacggattcttaagacaggcgctatgtcggctgcggcaagaagagccccaaagcctgcaggctgcggtgaggaccgatggttttgacgagttcaaggttagacttcaggacctgtcaagttgtattacccagggcaaggacgccgccgtgagcaaaaaggcttcccccgaagccgcctcaaccccgcgcgatcctatagatgtggatctgctgcctcccccggctcatgccttgaccggacccgcccagagcagcacccactag

SEQ ID NO: 227988 - DNA, 1308 bp, Artificial Sequence
  derived and/or modified sequence
atggagcctgcccctgctcgctccccaagaccacagcaagaccctgcacgaccacaggagcctaccatgccaccccctgagacaccatccgagggcaggcagcccagtccctctccatctcccaccgaacgggctccagctagcgaggaagaattccaattcttaagatgtcagcaatgtcaggcagaggccaagtgcccgaaattgctcccctgtctgcataccctgtgctcaggttgtctggaggccagcggaatgcaatgccctatctgtcaagccccttggccgctcggggcagataccccagctctggacaatgtgtttttcgagagcctgcaacgcaggttatccgtttaccggcagatcgtggatgcccaggctgtttgtacaaggtgtaaggagtctgctgatttctggtgcttcgagtgtgaacagcttctctgcgcaaagtgcttcgaggcacaccagtggttccttaaacatgaagcgaggccactcgctgagctccgtaatcagagcgtgcgggaatttctggacggaactagaaagactaacaacatattttgctcgaaccctaatcatcggacgccaacactgacatccatatactgcagggggtgttctaagccactgtgttgcagctgcgcattgctggactccagccattccgagctgaagtgtgacatctctgccgagatccaacagcgccaggaagaattggacgccatgacacaagcgttacaggagcaggatagcgcatttggtgctgtccacgcccagatgcatgctgccgtcgggcagctgggcagagcgagggccgagaccgaagaactcatccgggaacgcgtgaggcaggtggtcgcccacgttagagcacaagaacgtgagctgctcgaggccgtggatgcaagataccaaagggactatgaggagatggccagtcgactcggcagattggatgcagtattgcagcgcatcagaacaggttctgcccttgtgcaacgcatgaaatgttacgcctcagaccaggaagtcttagatatgcacggctttctgcgacaagccctgtgtagattgcgtcaggaggagccccaaagtttgcaggccgctgttcgtacagatggattcgacgagttcaaagtaaggttgcaagatctgtcttcctgcattacccaaggcaaggatgctgcggtgtccaaaaaagcgtcacccgaggctgcctctacacctcgagacccaatcgatgtagacctgctaccgcctcccgcacatgccctaactggcccagctcaatcgtcaacacattag

SEQ ID NO: 227989 - DNA, 1738 bp, Artificial Sequence
  derived and/or modified sequence
gctcaagggactcagccaactggctcacgcctccccttcagcttctcttcacgcactccaagatctaaaccgagaatcgaaactaagctggggtccatggagcctgcacccgcccgatctccgaggccccagcaggaccccgcccggccccaggagcccaccatgcctccccccgagaccccctctgaaggccgccagcccagccccagccccagccctacagagcgagcccccgcttcggaggaggagttccagtttctgcgctgccagcaatgccaggcggaagccaagtgcccgaagctgctgccttgtctgcacacgctgtgctcaggatgcctggaggcgtcgggcatgcagtgccccatctgccaggcgccctggcccctaggtgcagacacacccgccctggataacgtctttttcgagagtctgcagcggcgcctgtcggtgtaccggcagattgtggatgcgcaggctgtgtgcacccgctgcaaagagtcggccgacttctggtgctttgagtgcgagcagctcctctgcgccaagtgcttcgaggcacaccagtggttcctcaagcacgaggcccggcccctagcagagctgcgcaaccagtcggtgcgtgagttcctggacggcacccgcaagaccaacaacatcttctgctccaaccccaaccaccgcacccctacgctgaccagcatctactgccgaggatgttccaagccgctgtgctgctcgtgcgcgctccttgacagcagccacagtgagctcaagtgcgacatcagcgcagagatccagcagcgacaggaggagctggacgccatgacgcaggcgctgcaggagcaggatagtgcctttggcgcggttcacgcgcagatgcacgcggccgtcggccagctgggccgcgcgcgtgccgagaccgaggagctgatccgcgagcgcgtgcgccaggtggtagctcacgtgcgggctcaggagcgcgagctgctggaggctgtggacgcgcggtaccagcgcgactacgaggagatggccagtcggctgggccgcctggatgctgtgctgcagcgcatccgcacgggcagcgcgctggtgcagaggatgaagtgctacgcctcggaccaggaggtgctggacatgcacggtttcctgcgccaggcgctctgccgcctgcgccaggaggagccccagagcctgcaagctgccgtgcgcaccgatggcttcgacgagttcaaggtgcgcctgcaggacctcagctcttgcatcacccaggggaaagatgcagctgtatccaagaaagccagcccagaggctgccagcactcccagggaccctattgacgttgacctgctgcctcctccagcccatgctcttacaggccctgcacagagtagcactcattaattcttggttaaggaatgaatcaacgaatgaatggctatgcatggacctctgggcagggagacctgggtcttctctggctgagaggggaaggctaaggcatggctgagattcaagccaccattccaggcctctttgcccaagaaagaaacttctgtcacccttgcactctcctgtattctgagtccctggccaatagcacagccttccatgccccgacccccaccccaagcctctccactaggcctctgccaggatctaagcccatgagcacagggactggctatcccaagacctggcagatgtggctgctcaataaacacttgttgaaccatca

SEQ ID NO: 227990 - protein, 585 aa, Artificial Sequence
  derived and/or modified sequence
MEPAPARSPRPQQDPARPQEPTMPPPETPSEGRQPSPSPSPTERAPASEEEFQFLRCQQCQAEAKCPKLLPCLHTLCSGCLEASGMQCPICQAPWPLGADTPALDNVFFESLQRRLSVYRQIVDAQAVCTRCKESADFWCFECEQLLCAKCFEAHQWFLKHEARPLAELRNQSVREFLDGTRKTNNIFCSNPNHRTPTLTSIYCRGCSKPLCCSCALLDSSHSELKCDISAEIQQRQEELDAMTQALQEQDSAFGAVHAQMHAAVGQLGRARAETEELIRERVRQVVAHVRAQERELLEAVDARYQRDYEEMASRLGRLDAVLQRIRTGSALVQRMKCYASDQEVLDMHGFLRQALCRLRQEEPQSLQAAVRTDGFDEFKVRLQDLSSCITQGKDAAVSKKASPEAASTPRDPIDVDLDVSNTTTAQKRKCSQTQCPRKVIKMESEEGKEARLARSSPEQPRPSTSKAVSPPHLDGPPSPRSPVIGSEVFLPNSNHVASGAGEAEERVVVISSSEDSDAENSSSRELDDSSSESSDLQLEGPSTLRVLDENLADPQAEDRPLVFFDLKIDNESGFSWGYPHPFLI

SEQ ID NO: 227991 - DNA, 1758 bp, Artificial Sequence
  derived and/or modified sequence
atggagcccgcccccgccagaagccccagaccccagcaggaccccgccagaccccaggagcccaccatgcccccccccgagacccccagcgagggcagacagcccagccccagccccagccccaccgagagagcccccgccagcgaggaggagttccagttcctgagatgccagcagtgccaggccgaggccaagtgccccaagctgctgccctgcctgcacaccctgtgcagcggctgcctggaggccagcggcatgcagtgccccatctgccaggccccctggcccctgggcgccgacacccccgccctggacaacgtgttcttcgagagcctgcagagaagactgagcgtgtacagacagatcgtggacgcccaggccgtgtgcaccagatgcaaggagagcgccgacttctggtgcttcgagtgcgagcagctgctgtgcgccaagtgcttcgaggcccaccagtggttcctgaagcacgaggccagacccctggccgagctgagaaaccagagcgtgagagagttcctggacggcaccagaaagaccaacaacatcttctgcagcaaccccaaccacagaacccccaccctgaccagcatctactgcagaggctgcagcaagcccctgtgctgcagctgcgccctgctggacagcagccacagcgagctgaagtgcgacatcagcgccgagatccagcagagacaggaggagctggacgccatgacccaggccctgcaggagcaggacagcgccttcggcgccgtgcacgcccagatgcacgccgccgtgggccagctgggcagagccagagccgagaccgaggagctgatcagagagagagtgagacaggtggtggcccacgtgagagcccaggagagagagctgctggaggccgtggacgccagataccagagagactacgaggagatggccagcagactgggcagactggacgccgtgctgcagagaatcagaaccggcagcgccctggtgcagagaatgaagtgctacgccagcgaccaggaggtgctggacatgcacggcttcctgagacaggccctgtgcagactgagacaggaggagccccagagcctgcaggccgccgtgagaaccgacggcttcgacgagttcaaggtgagactgcaggacctgagcagctgcatcacccagggcaaggacgccgccgtgagcaagaaggccagccccgaggccgccagcacccccagagaccccatcgacgtggacctggacgtgagcaacaccaccaccgcccagaagagaaagtgcagccagacccagtgccccagaaaggtgatcaagatggagagcgaggagggcaaggaggccagactggccagaagcagccccgagcagcccagacccagcaccagcaaggccgtgagccccccccacctggacggcccccccagccccagaagccccgtgatcggcagcgaggtgttcctgcccaacagcaaccacgtggccagcggcgccggcgaggccgaggagagagtggtggtgatcagcagcagcgaggacagcgacgccgagaacagcagcagcagagagctggacgacagcagcagcgagagcagcgacctgcagctggagggccccagcaccctgagagtgctggacgagaacctggccgacccccaggccgaggacagacccctggtgttcttcgacctgaagatcgacaacgagagcggcttcagctggggctacccccaccccttcctgatctag

SEQ ID NO: 227992 - DNA, 1758 bp, Artificial Sequence
  derived and/or modified sequence
atggaacccgcacctgcacgctctccaaggcctcagcaagatccagcaagaccacaggagccaactatgcctcctcccgagactccaagtgaaggccggcagccctccccctcaccctctcccactgagcgggcccccgcttcagaagaggaattccagttcctccggtgtcagcagtgccaggcagaagccaagtgccccaaactgttaccctgcctccacaccctttgttctggctgcctggaagcatcgggcatgcaatgccccatctgccaggcgccttggccactcggcgctgacacacccgctctagacaacgttttctttgagtcactgcaacgcagactcagcgtgtaccgtcaaatcgtcgatgcgcaagccgtgtgtaccaggtgcaaggagtctgccgatttctggtgctttgaatgtgaacagctgctgtgtgcaaaatgcttcgaagcacaccagtggttcctcaaacatgaagcgaggccccttgcagagctcaggaaccaatccgtccgggaatttctcgatgggacccgtaagacgaataacattttttgctcaaaccctaaccacaggacccctactcttacttcaatctattgccggggatgcagtaagcccctgtgttgttcatgtgcactgctagacagctcccacagcgagttgaagtgcgacattagcgccgagatccaacaacgccaggaggagctcgatgccatgacacaggcattgcaggagcaggactctgccttcggggcagtacacgcgcagatgcacgccgcagtggggcagctcggaagagctcgcgccgagacagaggagttgatccgagagcgagtgcgccaggttgtcgctcatgtgcgcgcccaggagagggagctcctcgaagccgtagatgctaggtaccagagggactacgaggaaatggcttcaagactcgggcgccttgacgccgttctgcagagaatacgcacagggtcagccctcgtccaaaggatgaaatgttacgcatctgatcaggaggtgctcgacatgcacggtttcctccggcaggccctctgtcgtctgcgccaggaagaaccccagtccctgcaggctgctgtcaggactgacggttttgatgagttcaaggtgcggttgcaggatctatcatcctgtataacccagggaaaagacgcagccgtatccaagaaggcatcccccgaagccgctagcacgccacgtgatcctatcgatgttgacctagacgtatcgaacacgacaactgctcagaagcgaaaatgcagtcagacacagtgcccccggaaggtcatcaaaatggagagtgaagagggaaaggaggccagactggcaagatcatcccccgaacagccacggccatccacttcgaaggcggtttccccgcctcacttagatgggcctccctctcccaggtcacccgtcataggttcggaagtgtttttgcctaactcgaaccacgtcgcctcgggagcaggggaagccgaagaaagggtagttgtgatatcgagctctgaggatagcgacgccgagaattcctcatcccgggaactagatgatagtagcagtgaaagtagcgacctgcagctggagggtccttctacactgagagttctcgatgaaaacttggccgacccccaggccgaggataggccactggtattctttgatctgaagattgataatgaaagcgggtttagttggggttatcctcacccattcctcatatag

SEQ ID NO: 227993 - DNA, 1758 bp, Artificial Sequence
  derived and/or modified sequence
atggagcccgccccagcccggagcccccggccccagcaggaccctgcccggccccaggagcccaccatgcctcctcctgagacccccagcgagggccggcagcccagccccagccccagccccacagagcgggccccagccagcgaggaggagttccagttcctgcgctgccagcagtgccaggccgaggccaagtgccccaagctgctgccctgcctgcacaccctgtgcagcggctgcctggaggccagcggcatgcagtgccccatctgccaggccccctggcccctgggcgctgacaccccagccctggacaacgtgttctttgagagcctgcagaggcggctgtctgtgtaccggcagatcgtggatgcccaggccgtgtgcacccgctgcaaggagagcgctgacttctggtgctttgaatgtgagcagctgctgtgtgccaagtgctttgaggcccaccagtggttcctgaagcatgaggcccggcccctggccgagctgaggaaccagagcgtgcgggagttcctggatggcaccaggaagaccaacaacatcttctgcagcaaccccaaccacaggacccccaccctgaccagcatctactgccggggctgcagcaagcccctgtgctgcagctgtgccctgctggacagcagccacagcgagctgaagtgtgacatctctgctgagatccagcagaggcaggaggagctggatgccatgacccaggccctgcaggagcaggacagcgccttcggggctgtgcacgcccagatgcatgctgctgtgggccagctgggccgggcccgggcagagacagaggagctgatccgggagcgggtgcggcaggtggtggcccacgtgcgggcccaggagcgggagctgctggaggccgtggatgcccgctaccagagggactatgaggagatggccagccggctgggccgcctggatgctgtgctgcagaggatcagaacaggcagcgccctggtgcagaggatgaagtgctacgccagtgaccaggaggtgctggacatgcacggcttcctgcggcaggccctgtgccgcctgcggcaggaggagccccagagcctgcaggccgctgtgaggacagatggctttgatgagttcaaggtgcggctgcaggacctgagcagctgcatcacccagggcaaggatgctgctgtgtccaagaaggccagccctgaggccgccagcaccccccgggaccccattgatgtggacctggatgtgagcaacaccaccacagcccagaagaggaagtgcagccagacccagtgccccaggaaggtgatcaagatggagagcgaggagggcaaggaggcccggctggcccggagcagccctgagcagccccggcccagcaccagcaaggctgtgtccccaccccacctggatggcccccccagccccaggagccctgtgattggcagcgaggtgttcctgcccaacagcaaccacgtggccagcggggccggggaggccgaggagcgggtggtggtgatcagcagcagtgaagattctgatgctgagaacagcagcagccgggagctggatgacagcagcagcgagagcagtgacctgcagctggagggccccagcaccctgcgggtgctggatgagaacctggccgacccccaggccgaggaccggcccctggtgttctttgacctgaagattgacaatgaaagtggcttctcctggggctacccccaccccttcctgatctag

SEQ ID NO: 227994 - DNA, 1758 bp, Artificial Sequence
  derived and/or modified sequence
atggagcccgcccccgcccggagcccccggccccagcaggaccccgcaagaccacaggagcccacgatgccacctcctgaaaccccatcagaggggaggcagccttctccctccccatcccccacagaacgggctccagcatctgaggaagagtttcagtttctgcgatgtcagcaatgtcaggcagaggccaagtgtcccaaactcctgccctgcctgcataccctgtgctccggctgtctcgaggcatctggtatgcagtgtccaatttgccaggctccttggccactgggggctgacactcctgctctggacaacgtgttctttgagtctcttcagcgaagattgagcgtttacagacagattgtcgatgcacaggcagtctgtacacggtgtaaagagagcgctgacttctggtgtttcgagtgtgagcagttgctgtgtgccaagtgcttcgaggcccaccagtggttcttgaaacacgaagctcgtccactggccgaacttagaaaccaaagcgtccgtgagttcctagatgggacaagaaaaaccaataacattttttgcagtaacccgaatcatcgcacccccaccctcaccagtatatactgcaggggctgctccaagcctttgtgctgttcttgtgctctccttgattcatcgcattcagagctgaagtgcgatatctctgcagagattcagcaacgccaagaggagcttgacgccatgacgcaggctctacaggagcaagacagcgcctttggtgcggtgcatgctcagatgcatgccgcagtcggccagctcggaagagctcgggctgagacagaggagctgatccgagagagggtccgacaggtggtggcccacgtacgggctcaggaaagagaactgctcgaggccgtcgatgcgagatatcagcgggactatgaagagatggctagtcgactgggacgtctcgacgccgtcctccagcgaataaggacgggaagcgcattagtacagaggatgaagtgctatgcctctgatcaggaggtgctagatatgcatggctttttgcgccaggcactttgtcgcctccggcaggaggagcctcagagcctgcaagctgcagtgcgaacagatggcttcgacgagttcaaagtgcgccttcaggatctgtccagttgcattactcaaggaaaagacgccgcagtctctaagaaggccagtccagaggccgcgtccactccacgcgacccgatcgatgtggacctcgatgtcagcaacacaacaacggcccagaagcgaaaatgctcccagacgcagtgccctaggaaagtgatcaaaatggaaagcgaggagggtaaggaggctcggctggccagaagcagcccagagcaaccgaggccctccaccagcaaagccgtgagtccaccacacctggacggcccaccctccccacggtctccagtgatcggaagcgaagttttcctgccgaacagtaatcatgtggcgtccggtgctggcgaggctgaagaacgggtcgtcgtcattagcagttccgaggacagcgatgccgagaacagctcttcaagagagctcgacgattcatcaagcgagagcagcgacctgcagctcgaggggccaagtaccttgcgcgtcctcgatgaaaatttagccgatccacaagccgaggaccgacctctggtgttcttcgacctgaagatagataatgagagcggatttagttggggatatccacaccctttcctgatctag

SEQ ID NO: 227995 - DNA, 1758 bp, Artificial Sequence
  derived and/or modified sequence
atggagccagcgccagcccgtagtccaagaccccagcaggacccggctaggccccaggagcctacgatgccaccccctgaaacccccagcgaggggaggcagccaagcccaagtcctagccccacagaacgagctccggcatccgaggaagaattccagtttttgcgctgtcagcagtgccaggcagaagccaaatgcccaaagctcctgccgtgtttacacactttgtgttccggttgtctggaggcctcaggtatgcaatgcccaatttgccaggctccctggccgctcggggcagacactcctgccctggataacgtattcttcgagtcgctgcagaggcgtttgtccgtatacaggcaaatcgtagatgctcaggcagtgtgtacgcgatgtaaggaatccgccgatttttggtgctttgagtgtgaacagctcctatgcgccaaatgttttgaggcccatcagtggttcctcaaacacgaggccagacctcttgccgagttaaggaatcagtcggtccgagaatttctggacggtacacggaaaaccaacaacatattttgctccaaccccaatcataggactccaacccttacttctatctattgtcggggatgcagcaagcctctttgctgtagctgtgcccttctggactcttcgcactctgaactgaaatgtgatatttctgcggaaattcagcagaggcaggaagagctggacgccatgacacaagcgcttcaagagcaggattcagcatttggcgctgtgcacgcacagatgcacgccgctgttggccagttagggagggccagagcagagaccgaagaactaatcagagagagagtccggcaggtcgtagcacatgtgcgagcacaagaaagagaacttctagaggccgttgacgcacggtaccagagggactacgaggagatggcaagccgattaggcagactcgatgccgtgctgcagagaattagaacaggttctgccctcgtccagaggatgaaatgttacgcttcggaccaggaggtactggatatgcacggattcctcagacaggctctctgccgccttagacaagaagaaccccaaagcctccaggcagccgtgagaactgacggtttcgatgaatttaaggtgaggttgcaagacctgtcttcgtgcattacccaggggaaggatgccgctgtcagcaagaaagcatccccagaagcagcatcgactccgagggaccctattgacgttgatctggacgtctccaataccaccaccgcccagaaaaggaagtgctcccagacccagtgccccagaaaagttatcaagatggaatcagaggaggggaaagaagccaggcttgctcggtcgtctccagaacagcctagaccatctacttccaaagcggtctcaccccctcacctggatggcccacccagccctaggtcaccagtcatcgggagcgaggtctttttgccaaattctaaccatgtggcttcaggcgctggggaggccgaagagcgggtggtggttatatcaagcagtgaagattctgacgccgagaattcctccagccgagaattggatgactcttcttccgaatcaagtgatctgcagctggaaggaccatctacgctgcgggtgctggacgagaatctggccgatccccaggccgaggaccgccctttagtgttctttgatctaaagatcgacaacgagtccgggttttcatgggggtacccccatccttttttgatttag

SEQ ID NO: 227996 - DNA, 1985 bp, Artificial Sequence
  derived and/or modified sequence
cgcctccccttcagcttctcttcacgcactccaagatctaaaccgagaatcgaaactaagctggggtccatggagcctgcacccgcccgatctccgaggccccagcaggaccccgcccggccccaggagcccaccatgcctccccccgagaccccctctgaaggccgccagcccagccccagccccagccctacagagcgagcccccgcttcggaggaggagttccagtttctgcgctgccagcaatgccaggcggaagccaagtgcccgaagctgctgccttgtctgcacacgctgtgctcaggatgcctggaggcgtcgggcatgcagtgccccatctgccaggcgccctggcccctaggtgcagacacacccgccctggataacgtctttttcgagagtctgcagcggcgcctgtcggtgtaccggcagattgtggatgcgcaggctgtgtgcacccgctgcaaagagtcggccgacttctggtgctttgagtgcgagcagctcctctgcgccaagtgcttcgaggcacaccagtggttcctcaagcacgaggcccggcccctagcagagctgcgcaaccagtcggtgcgtgagttcctggacggcacccgcaagaccaacaacatcttctgctccaaccccaaccaccgcacccctacgctgaccagcatctactgccgaggatgttccaagccgctgtgctgctcgtgcgcgctccttgacagcagccacagtgagctcaagtgcgacatcagcgcagagatccagcagcgacaggaggagctggacgccatgacgcaggcgctgcaggagcaggatagtgcctttggcgcggttcacgcgcagatgcacgcggccgtcggccagctgggccgcgcgcgtgccgagaccgaggagctgatccgcgagcgcgtgcgccaggtggtagctcacgtgcgggctcaggagcgcgagctgctggaggctgtggacgcgcggtaccagcgcgactacgaggagatggccagtcggctgggccgcctggatgctgtgctgcagcgcatccgcacgggcagcgcgctggtgcagaggatgaagtgctacgcctcggaccaggaggtgctggacatgcacggtttcctgcgccaggcgctctgccgcctgcgccaggaggagccccagagcctgcaagctgccgtgcgcaccgatggcttcgacgagttcaaggtgcgcctgcaggacctcagctcttgcatcacccaggggaaagatgcagctgtatccaagaaagccagcccagaggctgccagcactcccagggaccctattgacgttgacctggatgtctccaatacaacgacagcccagaagaggaagtgcagccagacccagtgccccaggaaggtcatcaagatggagtctgaggaggggaaggaggcaaggttggctcggagctccccggagcagcccaggcccagcacctccaaggcagtctcaccaccccacctggatggaccgcctagccccaggagccccgtcataggaagtgaggtcttcctgcccaacagcaaccacgtggccagtggcgccggggaggcagaggaacgcgttgtggtgatcagcagctcggaagactcagatgccgaaaactcgtcctcccgagagctggatgacagcagcagtgagtccagtgacctccagctggaaggccccagcaccctcagggtcctggacgagaaccttgctgacccccaagcagaagacagacctctggttttctttgacctcaagattgacaatgaaagtgggttctcctggggctacccccacccctttctaatttagtctctgagtcccaaaaagaagtgcaggcagagccatctgccaggcccaggagagctctgagctctggccaacaactgcagccaggctgggcagagcactccggctcacctgggctcctggcgtgtcatttgctggcttgaataaagatgtccgcctta

SEQ ID NO: 227997 - protein, 781 aa, Artificial Sequence
  derived and/or modified sequence
MEPAPARSPRPQQDPARPQEPTMPPPETPSEGRQPSPSPSPTERAPASEEEFQFLRCQQCQAEAKCPKLLPCLHTLCSGCLEASGMQCPICQAPWPLGADTPALDNVFFESLQRRLSVYRQIVDAQAVCTRCKESADFWCFECEQLLCAKCFEAHQWFLKHEARPLAELRNQSVREFLDGTRKTNNIFCSNPNHRTPTLTSIYCRGCSKPLCCSCALLDSSHSELKCDISAEIQQRQEELDAMTQALQEQDSAFGAVHAQMHAAVGQLGRARAETEELIRERVRQVVAHVRAQERELLEAVDARYQRDYEEMASRLGRLDAVLQRIRTGSALVQRMKCYASDQEVLDMHGFLRQALCRLRQEEPQSLQAAVRTDGFDEFKVRLQDLSSCITQGKDAAVSKKASPEAASTPRDPIDVDLDVSNTTTAQKRKCSQTQCPRKVIKMESEEGKEARLARSSPEQPRPSTSKAVSPPHLDGPPSPRSPVIGSEVFLPNSNHVASGAGEAEERVVVISSSEDSDAENSCMEPMETAEPQSSPAHSSPAHSSPAHSSPVQSLLRAQGASSLPCGTYHPPAWPPHQPAEQAATPDAEPHSEPPDHQERPAVHRGIRYLLYRAQRAIRLRHALRLHPQLHRAPIRTWSPHVVQASTPAITGPLNHPANAQEHPAQLQRGISPPHRIRGAVRSRSRSLRGSSHLSQWLNNFFALPFSSMASQLDMSSVVGAGESRAQTLGAGVPPGDSVRGSMEASQVQVPLEASPITFPPPCAPERPPISPVPGARQAGL

SEQ ID NO: 227998 - DNA, 2346 bp, Artificial Sequence
  derived and/or modified sequence
atggagcccgcccccgccagaagccccagaccccagcaggaccccgccagaccccaggagcccaccatgcccccccccgagacccccagcgagggcagacagcccagccccagccccagccccaccgagagagcccccgccagcgaggaggagttccagttcctgagatgccagcagtgccaggccgaggccaagtgccccaagctgctgccctgcctgcacaccctgtgcagcggctgcctggaggccagcggcatgcagtgccccatctgccaggccccctggcccctgggcgccgacacccccgccctggacaacgtgttcttcgagagcctgcagagaagactgagcgtgtacagacagatcgtggacgcccaggccgtgtgcaccagatgcaaggagagcgccgacttctggtgcttcgagtgcgagcagctgctgtgcgccaagtgcttcgaggcccaccagtggttcctgaagcacgaggccagacccctggccgagctgagaaaccagagcgtgagagagttcctggacggcaccagaaagaccaacaacatcttctgcagcaaccccaaccacagaacccccaccctgaccagcatctactgcagaggctgcagcaagcccctgtgctgcagctgcgccctgctggacagcagccacagcgagctgaagtgcgacatcagcgccgagatccagcagagacaggaggagctggacgccatgacccaggccctgcaggagcaggacagcgccttcggcgccgtgcacgcccagatgcacgccgccgtgggccagctgggcagagccagagccgagaccgaggagctgatcagagagagagtgagacaggtggtggcccacgtgagagcccaggagagagagctgctggaggccgtggacgccagataccagagagactacgaggagatggccagcagactgggcagactggacgccgtgctgcagagaatcagaaccggcagcgccctggtgcagagaatgaagtgctacgccagcgaccaggaggtgctggacatgcacggcttcctgagacaggccctgtgcagactgagacaggaggagccccagagcctgcaggccgccgtgagaaccgacggcttcgacgagttcaaggtgagactgcaggacctgagcagctgcatcacccagggcaaggacgccgccgtgagcaagaaggccagccccgaggccgccagcacccccagagaccccatcgacgtggacctggacgtgagcaacaccaccaccgcccagaagagaaagtgcagccagacccagtgccccagaaaggtgatcaagatggagagcgaggagggcaaggaggccagactggccagaagcagccccgagcagcccagacccagcaccagcaaggccgtgagccccccccacctggacggcccccccagccccagaagccccgtgatcggcagcgaggtgttcctgcccaacagcaaccacgtggccagcggcgccggcgaggccgaggagagagtggtggtgatcagcagcagcgaggacagcgacgccgagaacagctgcatggagcccatggagaccgccgagccccagagcagccccgcccacagcagccccgcccacagcagccccgcccacagcagccccgtgcagagcctgctgagagcccagggcgccagcagcctgccctgcggcacctaccacccccccgcctggcccccccaccagcccgccgagcaggccgccacccccgacgccgagccccacagcgagccccccgaccaccaggagagacccgccgtgcacagaggcatcagatacctgctgtacagagcccagagagccatcagactgagacacgccctgagactgcacccccagctgcacagagcccccatcagaacctggagcccccacgtggtgcaggccagcacccccgccatcaccggccccctgaaccaccccgccaacgcccaggagcaccccgcccagctgcagagaggcatcagccccccccacagaatcagaggcgccgtgagaagcagaagcagaagcctgagaggcagcagccacctgagccagtggctgaacaacttcttcgccctgcccttcagcagcatggccagccagctggacatgagcagcgtggtgggcgccggcgagagcagagcccagaccctgggcgccggcgtgccccccggcgacagcgtgagaggcagcatggaggccagccaggtgcaggtgcccctggaggccagccccatcaccttcccccccccctgcgcccccgagagaccccccatcagccccgtgcccggcgccagacaggccggcctgtag

SEQ ID NO: 227999 - DNA, 2346 bp, Artificial Sequence
  derived and/or modified sequence
atggagcctgcacccgcgcggtcccctcgaccccagcaggatcctgccaggcctcaggaaccaacaatgccccccccagagaccccatcagagggtcggcagcctagtccatcacctagtccgacagaaagggctcctgcgtctgaagaggagtttcagtttctgcgctgtcagcaatgtcaagcagaagctaaatgccctaagctgctcccgtgccttcatacactgtgcagtggatgcctcgaagcgagcggaatgcaatgcccgatttgccaggccccttggcccttgggcgctgacacaccagcgctggacaatgtcttttttgagagtctccagaggcgtctgtccgtgtatcggcagatagtagacgctcaagcagtttgcactcggtgcaaagagagcgccgacttttggtgctttgaatgtgagcagctgctgtgcgcaaaatgcttcgaggcccatcaatggtttctaaaacatgaggcccgccccctggccgagctcagaaaccaatcagtccgggagttcttagacggcacccggaaaaccaataatattttttgcagtaatcctaaccaccgaactccaaccttaacttctatttactgccgtggctgctccaaacccctgtgctgtagttgtgctctgcttgactcatctcactcagaactgaagtgcgacatcagcgcagagatccaacaacgacaggaggagctggacgcaatgacacaggccctgcaggaacaggacagcgcattcggcgcagtgcatgcccagatgcacgccgctgtgggtcaactcggccgagctcgtgccgagacagaggagttaatacgtgagcgcgtgcgccaggtcgttgctcatgtccgggcccaggagcgggaactcctcgaggccgtggatgctcggtatcagcgcgattacgaagagatggcctcccgcctgggcaggttggatgctgtgctgcagcgtattcgtaccgggtcagcgctggtgcagcggatgaagtgttacgcatcagatcaggaggtcctagacatgcatggctttcttaggcaggccctgtgtcgcctccgacaagaagaaccgcaatctttgcaggctgccgttcgtaccgacggcttcgatgaattcaaagtgaggcttcaggatctgtctagctgcattacacaagggaaggacgccgcggtttcgaaaaaagcttctcccgaagctgcaagtactccgagggacccaatcgacgtcgatctggacgtgagcaatactaccacagcccaaaaacgaaagtgtagtcagacccagtgcccccggaaggtgataaaaatggagagcgaagaaggaaaggaggccagactcgcccgctcatctccagagcagccgaggcctagtacaagcaaagcagtctcgcccccccatcttgatggaccaccttctcccaggtctcctgtgatcggctctgaggtgtttctgcccaactctaaccacgtggccagcggcgctggggaagcggaagagcgagtagtagtgatcagctccagcgaagactctgacgctgaaaacagctgtatggagcccatggaaaccgcagagccacagagctcccctgctcactcgagtcctgcccactcatctccagcccatagttctcctgtccaatccctgttgcgcgctcaaggtgcatcatctttgccttgcggtacttaccacccaccagcttggccaccgcatcaacctgcagagcaggcagccactcctgatgcggaaccacactcggagccccccgaccaccaggagcgacctgcagtgcacaggggcattcgttatcttctgtatcgggcacagcgggccatccgactccggcacgcacttcggctacatcctcagctgcatcgggcacccattagaacgtggagcccccatgtggtccaggcctcaacccctgctattacaggacctctcaaccatcccgctaatgcccaggagcaccctgcccagctccagagaggcatatccccccctcatcgcattcgtggtgcagtccgttcccggtcaaggtccctccgcggatcaagccatttgtcacagtggctgaacaatttcttcgctcttcccttctcctctatggcatcccagctggacatgagcagcgtggtgggggctggcgagtcccgagctcaaaccttaggagcaggagtgcctcccggagacagtgttagaggctccatggaggcaagccaagtgcaggtgcctctagaggcctccccgattacatttcctcccccctgtgccccagagagaccccctatctctccagtacctggggccagacaagcaggcctgtag

SEQ ID NO: 228000 - DNA, 2346 bp, Artificial Sequence
  derived and/or modified sequence
atggagcccgccccagcccggagcccccggccccagcaggaccctgcccggccccaggagcccaccatgcctcctcctgagacccccagcgagggccggcagcccagccccagccccagccccacagagcgggccccagccagcgaggaggagttccagttcctgcgctgccagcagtgccaggccgaggccaagtgccccaagctgctgccctgcctgcacaccctgtgcagcggctgcctggaggccagcggcatgcagtgccccatctgccaggccccctggcccctgggcgctgacaccccagccctggacaacgtgttctttgagagcctgcagaggcggctgtctgtgtaccggcagatcgtggatgcccaggccgtgtgcacccgctgcaaggagagcgctgacttctggtgctttgaatgtgagcagctgctgtgtgccaagtgctttgaggcccaccagtggttcctgaagcatgaggcccggcccctggccgagctgaggaaccagagcgtgcgggagttcctggatggcaccaggaagaccaacaacatcttctgcagcaaccccaaccacaggacccccaccctgaccagcatctactgccggggctgcagcaagcccctgtgctgcagctgtgccctgctggacagcagccacagcgagctgaagtgtgacatctctgctgagatccagcagaggcaggaggagctggatgccatgacccaggccctgcaggagcaggacagcgccttcggggctgtgcacgcccagatgcatgctgctgtgggccagctgggccgggcccgggcagagacagaggagctgatccgggagcgggtgcggcaggtggtggcccacgtgcgggcccaggagcgggagctgctggaggccgtggatgcccgctaccagagggactatgaggagatggccagccggctgggccgcctggatgctgtgctgcagaggatcagaacaggcagcgccctggtgcagaggatgaagtgctacgccagtgaccaggaggtgctggacatgcacggcttcctgcggcaggccctgtgccgcctgcggcaggaggagccccagagcctgcaggccgctgtgaggacagatggctttgatgagttcaaggtgcggctgcaggacctgagcagctgcatcacccagggcaaggatgctgctgtgtccaagaaggccagccctgaggccgccagcaccccccgggaccccattgatgtggacctggatgtgagcaacaccaccacagcccagaagaggaagtgcagccagacccagtgccccaggaaggtgatcaagatggagagcgaggagggcaaggaggcccggctggcccggagcagccctgagcagccccggcccagcaccagcaaggctgtgtccccaccccacctggatggcccccccagccccaggagccctgtgattggcagcgaggtgttcctgcccaacagcaaccacgtggccagcggggccggggaggccgaggagcgggtggtggtgatcagcagcagtgaagattctgatgctgagaacagctgcatggagcccatggagacagctgagccccagagcagccctgcccacagcagccctgcccacagcagccctgcccacagcagccctgtgcagagcctgctgcgggcccagggcgccagcagcctgccctgtggcacctaccaccccccagcctggccaccccaccagcctgctgagcaggccgccaccccagatgctgagccccacagcgagcccccagaccaccaggagaggcctgctgtgcaccggggcatccgctacctgctgtaccgggcccagagggccatccggctgcggcatgccctgcggctgcacccccagctgcaccgggcccccatccgcacctggagcccccacgtggtgcaggccagcaccccagccatcaccggccccctgaaccacccagccaatgcccaggagcacccagcccagctgcagaggggcatcagccccccccaccgcatcagaggagctgtgcgcagccgcagccgcagcctgcggggcagcagccacctgagccagtggctgaacaacttctttgccctgcccttcagctccatggccagccagctggacatgagctctgtggtgggcgctggggagagccgggcccagaccctgggcgccggcgtgcccccaggggacagcgtgcggggctccatggaggccagccaggtgcaggtgcccctggaggccagccccatcaccttccccccaccctgtgcccctgagcggccccccatcagccctgtgcctggggcccggcaggccggcctgtag

SEQ ID NO: 228001 - DNA, 2346 bp, Artificial Sequence
  derived and/or modified sequence
atggagcccgcccccgcccggagcccccggccccagcaggaccccgctcgcccgcaggagccaaccatgccacctccagaaactccatcggaaggccggcaacctagcccctctcctagcccgacggagcgagctccagcgagtgaagaagaattccagttcttgcgctgccagcaatgtcaagcagaggccaaatgtccgaagttgttgccctgtctgcatacactctgctctggctgtttggaagcctctggaatgcagtgccctatctgccaggcaccctggcccttgggagccgatacacccgccttagacaacgtcttctttgaaagcttacagcggagactgtccgtgtatcgtcagattgttgatgcgcaagctgtatgcacgaggtgtaaggagtcagctgatttttggtgttttgagtgcgagcaactgctgtgtgctaaatgcttcgaagcgcatcagtggtttctgaagcacgaggccaggcctctggcagaactgcggaatcaaagcgtgagagagttccttgatggtacgaggaagacgaataacatcttttgctctaatccaaaccatagaacccctacactgaccagcatctactgtcgcggatgctccaagccattgtgttgtagttgtgccctactggatagcagtcactcagagcttaagtgcgacatctctgctgaaattcagcagaggcaggaagagctggatgccatgacacaggcacttcaggaacaggatagcgcattcggagctgttcatgcacagatgcatgcagcagtcgggcagctgggccgggctagggccgaaacagaggaactcatccgcgaaagggtgaggcaggtggttgcgcatgtgagggcacaagagcgcgagctcctagaagcagttgatgcacgataccagagggattatgaggagatggcttctcgtttgggccggctggacgcggtgctccagcggatacgcaccggaagcgcacttgtccagaggatgaagtgctacgctagcgatcaggaagtcctggatatgcatgggtttttgaggcaggctctgtgccgcctccgccaggaggagccgcaatctctgcaagccgccgtgcgcaccgatgggttcgacgaattcaaggttcggctccaggacttgagcagctgcatcacccagggcaaagatgctgccgtctctaaaaaggcttctccagaagcagctagcaccccgagagaccctatcgatgtagacctcgatgtctccaacacaactactgctcagaagcggaagtgctcccagacacagtgcccacggaaagttataaagatggaaagcgaggaggggaaagaagctcggctagctagatcctctcccgaacaaccacgcccttccacaagcaaggcggtgagcccccctcacctagacgggcctccctctccccggtcacccgtcatcggatccgaggtatttctgcccaacagtaaccatgtggcaagtggggccggagaggctgaggagagagtggtcgtgattagtagttcagaagactctgatgcagaaaattcctgtatggaacccatggagacagcagagccccagtcttcacctgcccattcttcaccagcccatagctcacctgcccatagctccccggttcagtcgctacttagagcgcaaggagcttccagccttccctgcgggacatatcaccctcctgcctggcccccccatcagcctgccgagcaggctgcaactcccgacgcagagcctcacagtgaacccccagaccaccaggagaggcccgctgtacatcggggaattagatatctgctgtacagagctcagcgcgctatccgcttgagacatgccctcagacttcatcctcagctgcatagagccccaattcgcacatggagcccacacgtcgtccaagcgtctacccctgcgatcactggccctttgaatcaccctgccaatgcacaggagcatcctgctcagcttcaacgagggatcagccccccacataggatacgcggggctgtgcgtagcagatcaagatccctacgggggagctcccacctatcccaatggctcaacaacttcttcgcactccctttctcctccatggcctcccagctggatatgtcctccgttgtgggggcaggagaaagtagagctcagacactcggggctggagtccctcctggtgattcagtgcgaggttcaatggaggcctcccaggtgcaggtgccgctggaggccagccccatcacatttccaccgccgtgcgcgcccgaaagaccccccatcagccctgttcctggcgctcggcaagccgggttgtag

SEQ ID NO: 228002 - DNA, 2346 bp, Artificial Sequence
  derived and/or modified sequence
atggagcctgctcccgctcggagcccacggcctcagcaggacccggctaggcctcaagaacctaccatgccaccacccgaaaccccgagtgaaggcaggcagccatctccctcgcccagtccaactgagcgagctccagcttccgaggaggagtttcagttcttacggtgccagcagtgtcaagccgaagccaaatgcccaaagctgctgccctgcctgcacactctgtgcagcggatgtctcgaagctagcggcatgcagtgccctatttgtcaggccccttggcccctgggtgcggatacgcccgctctggacaacgtgttttttgagagcctgcaacggagactaagcgtctatagacaaatcgtggatgcccaggctgtctgcacccgctgtaaggaaagtgcagacttctggtgttttgagtgtgagcaacttctctgcgcaaagtgcttcgaagcacaccagtggtttttaaagcatgaagctcggcctttggccgagctacgcaatcaatcagtgcgcgagtttctggacggcacaagaaagactaataacattttttgctcaaatcctaatcacaggacacctacattgaccagcatctactgccggggttgctccaaacccctgtgctgctcctgtgcccttttagactcaagccattctgagctcaagtgcgacattagcgccgagatccagcagaggcaggaagagttagatgcaatgacccaggcgctgcaagagcaagattccgcttttggagctgtgcacgcccagatgcacgccgcagtgggccaactgggtagagctcgggctgagaccgaagaactaattcgcgaaagggtgcgccaggtagtagctcacgtgcgcgcacaggagagggagctactggaagctgtggatgcaaggtaccagagagattatgaggagatggcttcccggcttggaagactggacgcggtcctccaacgcattaggactggaagcgccctggtacagcgaatgaaatgctatgcttctgatcaggaagtgctagatatgcacgggtttctcaggcaggctctatgtaggttaagacaggaggagccgcaatctctccaagctgctgttaggaccgacggcttcgacgagttcaaggttaggctgcaggacctctcctcttgcattacacagggcaaggacgccgctgtttctaaaaaggcttctcccgaggctgcaagcacccctagggatccaattgatgttgacctcgatgtatccaataccacgaccgctcaaaagagaaagtgctcgcagacccaatgtcccagaaaagtcattaaaatggaatctgaggagggtaaggaagctcgtcttgccagatcctccccagagcaacctcgaccctcaacctccaaagctgtcagcccaccacacctcgatggaccaccctcaccgaggtcacccgtgatcggctctgaggtcttcctccctaatagcaaccacgtggcctctggagccggagaagccgaagagagggtggtggtgatctcctcttccgaagattccgatgctgagaactcgtgcatggagccaatggagactgcggagcctcaatcgtcccccgctcactcctcacccgctcacagcagcccggcacatagttctcctgtacagagtcttctgcgggctcaaggggcttcctcgcttccctgcggtacttaccacccgcctgcctggccccctcatcagccagccgaacaggctgcaaccccggacgcggagccccatagcgaaccccctgatcatcaggaacggcctgctgtacaccggggtatcagatacctgctctaccgggcacaaagagccattagactgcggcacgcattgaggctgcacccccagctccacagggctccaattcggacttggagcccccatgtcgtgcaggcaagcactccggcaatcacaggcccacttaatcaccccgcaaacgcccaggagcaccccgctcagctccagcggggtatttctcctccgcatcgaatcagaggcgcagtgagatctcgtagcaggtctctccgcggatcaagtcacctcagccagtggctgaacaattttttcgctctgcctttcagctcaatggccagccagttggacatgtcatctgtggtaggggctggggagagcagagcccagactctgggtgctggcgtgcctcctggagattccgtgcgtggttctatggaggcctcacaggtgcaagtgccactggaggcttcacctattacctttcccccaccatgcgctcccgagcgcccacccatttcaccggttcccggagccagacaggctggactctag

SEQ ID NO: 228003 - DNA, 2885 bp, Artificial Sequence
  derived and/or modified sequence
gctcaagggactcagccaactggctcacgcctccccttcagcttctcttcacgcactccaagatctaaaccgagaatcgaaactaagctggggtccatggagcctgcacccgcccgatctccgaggccccagcaggaccccgcccggccccaggagcccaccatgcctccccccgagaccccctctgaaggccgccagcccagccccagccccagccctacagagcgagcccccgcttcggaggaggagttccagtttctgcgctgccagcaatgccaggcggaagccaagtgcccgaagctgctgccttgtctgcacacgctgtgctcaggatgcctggaggcgtcgggcatgcagtgccccatctgccaggcgccctggcccctaggtgcagacacacccgccctggataacgtctttttcgagagtctgcagcggcgcctgtcggtgtaccggcagattgtggatgcgcaggctgtgtgcacccgctgcaaagagtcggccgacttctggtgctttgagtgcgagcagctcctctgcgccaagtgcttcgaggcacaccagtggttcctcaagcacgaggcccggcccctagcagagctgcgcaaccagtcggtgcgtgagttcctggacggcacccgcaagaccaacaacatcttctgctccaaccccaaccaccgcacccctacgctgaccagcatctactgccgaggatgttccaagccgctgtgctgctcgtgcgcgctccttgacagcagccacagtgagctcaagtgcgacatcagcgcagagatccagcagcgacaggaggagctggacgccatgacgcaggcgctgcaggagcaggatagtgcctttggcgcggttcacgcgcagatgcacgcggccgtcggccagctgggccgcgcgcgtgccgagaccgaggagctgatccgcgagcgcgtgcgccaggtggtagctcacgtgcgggctcaggagcgcgagctgctggaggctgtggacgcgcggtaccagcgcgactacgaggagatggccagtcggctgggccgcctggatgctgtgctgcagcgcatccgcacgggcagcgcgctggtgcagaggatgaagtgctacgcctcggaccaggaggtgctggacatgcacggtttcctgcgccaggcgctctgccgcctgcgccaggaggagccccagagcctgcaagctgccgtgcgcaccgatggcttcgacgagttcaaggtgcgcctgcaggacctcagctcttgcatcacccaggggaaagatgcagctgtatccaagaaagccagcccagaggctgccagcactcccagggaccctattgacgttgacctggatgtctccaatacaacgacagcccagaagaggaagtgcagccagacccagtgccccaggaaggtcatcaagatggagtctgaggaggggaaggaggcaaggttggctcggagctccccggagcagcccaggcccagcacctccaaggcagtctcaccaccccacctggatggaccgcctagccccaggagccccgtcataggaagtgaggtcttcctgcccaacagcaaccacgtggccagtggcgccggggaggcagaggaacgcgttgtggtgatcagcagctcggaagactcagatgccgaaaactcgtgcatggagcccatggagaccgccgagccacagtcctcgccagcccactcctcgccagcccactcctcgccagcccactcctcgccagtccagtctctgctgagagcacaaggagcctccagcctgccctgtggcacataccaccccccagcttggcctccccaccagcccgctgagcaggctgccacccccgatgctgagcctcacagcgagcctcctgatcaccaggagcgccctgccgtccaccgtgggatccgctacctgttgtacagagcacagagagccatccgccttcgccatgccctccgcttgcaccctcaattgcatcgggcccctattcggacttggtctccccatgtggtccaagccagcactcctgccatcacagggcccctcaaccatcctgccaatgcccaggaacatcctgcccagctgcaaaggggcatcagcccaccccaccggatacgaggggctgtgcgatcccgcagccgctccctccggggctcctcccatttatcccagtggctcaacaacttttttgccctccccttctcctccatggcttcccagcttgacatgtcttccgtggtgggggcaggggaaagcagagcccagactcttggagcaggtgttccccctggggactctgtcagaggctccatggaggcctctcaagtccaagtgcctctggaagcctctccaattacattcccaccaccctgtgccccagaaaggccccccatcagcccagtcccaggcgcccgtcaagcaggcctctgagagtgctacccttctcttgtaaccttgcagccaacacccctgcccggcccctgagctgcctcctccagcccatgctcttacaggccctgcacagagtagcactcattaattcttggttaaggaatgaatcaacgaatgaatggctatgcatggacctctgggcagggagacctgggtcttctctggctgagaggggaaggctaaggcatggctgagattcaagccaccattccaggcctctttgcccaagaaagaaacttctgtcacccttgcactctcctgtattctgagtccctggccaatagcacagccttccatgccccgacccccaccccaagcctctccactaggcctctgccaggatctaagcccatgagcacagggactggctatcccaagacctggcagatgtggctgctcaataaacacttgttgaaccatca

SEQ ID NO: 228004 - protein, 211 aa, Artificial Sequence [sequence omitted]

SEQ ID NO: 228005 - DNA, 636 bp, Artificial Sequence
  derived and/or modified sequence
atggcacctagccggaatgggatggttttaaagcctcactttcacaaggattggcagaggcgcgtggccacttggtttaaccagccggctcggaagatccgtagacgcaaagccagacaggcgaaagcgcggagaatcgctccacgaccggcctcaggccctattcgccccattgtgaggtgtccaacagtcagatatcacaccaaggttagggccggccgaggcttctcacttgaggaactacgggtcgccggcatccacaagaaagtagctcggacaatcggaatcagtgtggatcccagaagaagaaacaagagtacagaatctctgcaagccaatgtacagagattaaaggagtaccgatccaagttgatcctgtttccgagaaagccttccgcaccaaaaaagggggattcaagtgcagaggaactgaaactggccactcagttgactggccctgtcatgcccgtccgcaatgtgtacaaaaaagaaaaagccagggtgattacggaggaggagaagaactttaaagctttcgccagcttgagaatggcgagggcaaatgcccgactgttcggaattcgggctaaacgggccaaagaggcagcagaacaagacgtcgaaaaaaaaaagtag

SEQ ID NO: 228006 - DNA, 636 bp, Artificial Sequence
  derived and/or modified sequence
atggccccaagtagaaatggcatggtcttgaagcctcacttccacaaagattggcagaggcgagtcgccacttggtttaaccagcctgcccggaagattaggcgaagaaaagcgcgccaagcgaaggctaggaggattgcccctcgcccggccagcggccccattcgaccaatagttcggtgccctaccgtccgataccataccaaggtgagagccggccgagggtttagcctggaggaactcagagtcgcgggaatccataaaaaggtcgccaggactatcggcatatctgttgatccccggcgaaggaataaatccacagagagcctacaggccaacgtgcaaagactaaaggagtacagatccaaattgattttgttcccacgaaaaccgagtgcccccaaaaagggtgattcttccgccgaggagctgaaactggcaactcagctcacaggccccgtcatgcccgtgcgcaacgtctacaaaaaggagaaggcacgagtaatcaccgaggaggaaaaaaattttaaggcatttgcaagtctgcgtatggcgagggcgaatgcccgcctgtttggtattcgggccaagagggcgaaggaggcggctgagcaagacgtggaaaagaaaaaatag

SEQ ID NO: 228007 - DNA, 636 bp, Artificial Sequence
  derived and/or modified sequence
atggcccccagcagaaatggcatggtgctgaagccccacttccacaaggactggcagaggagagtggccacctggttcaaccagcctgccaggaagatcagaagaaggaaggcccggcaggccaaggcccggcgcatcgcccccaggcctgccagcggccccatccggcccatcgtgcgctgccccaccgtgcgctaccacaccaaggtgcgggccggccggggcttcagcctggaggagctgcgggtggccggcatccacaagaaggtggcccggaccatcggcatctctgtggaccccaggagaagaaacaagagcacagagagcctgcaggccaacgtgcagaggctgaaggagtaccgcagcaagctgatcctcttccccaggaagcccagcgcccccaagaagggggacagcagcgctgaggagctgaagctggccacccagctgactggacctgtgatgcctgtgagaaatgtgtacaagaaggagaaggcccgggtcatcacagaggaggagaagaacttcaaggcctttgccagcctgaggatggcccgggccaatgcccggctgtttggcatccgggccaagagggccaaggaggccgctgagcaggatgtggagaagaagaagtag

SEQ ID NO: 228008 - DNA, 636 bp, Artificial Sequence
  derived and/or modified sequence
atggcccccagccggaacggcatggtgctgaagccccacttccacaaggattggcagaggcgtgtggctacgtggttcaatcaaccggcccggaaaattcggcgtcggaaggccaggcaagccaaagccagaagaatcgcaccgcgaccggccagcggacccatcagaccgatcgtaagatgtcctaccgttcggtatcacacgaaagtgcgtgccggacgtgggttcagtctcgaggaactgcgagtggcaggcatccataagaaggtggcccgaacgattgggataagcgtagatccgcggagaaggaataaatctacggagtctctgcaagctaacgttcagaggctgaaagaatatcggtcaaagctgatcttgtttcccaggaaaccctctgctcctaaaaaaggagatagctcggctgaggaactcaaattagctactcagctcactggcccagttatgccagtgaggaatgtctataaaaaagagaaagctcgtgtcattacagaagaggaaaagaatttcaaggccttcgcttccctgaggatggcgcgtgccaatgcccgtctgttcggtattcgcgctaaaagagcgaaagaggcagctgaacaggacgtagaaaaaaagaaatag

SEQ ID NO: 228009 - DNA, 636 bp, Artificial Sequence
  derived and/or modified sequence
atggcccccagccggaacggcatggtgctgaagccccacttccacaaagactggcagcgacgggtggccacatggtttaatcagccagccaggaaaatccgccgccgcaaagccagacaggcaaaagcccgacgcatagctccccgccctgctagtggacctataaggcctatcgtgcgctgtccaactgtgcgatatcacacgaaggtgcgtgctgggcgcggattttctctagaggaactgcgagtggctggaatccataaaaaagtcgccagaaccattggcatttctgtggatccacggagacgcaacaaaagcaccgagtcattacaggctaacgtgcagcgcctcaaagaatacagaagcaaactcattctgtttccccgtaagccctcagcccccaagaaaggtgacagcagtgccgaagaactcaagttggccacgcagctgactgggccagttatgccagtccgtaacgtatataagaaagagaaagcacgcgtgattacagaagaagaaaaaaactttaaggcgttcgcctctctccgcatggcgcgggctaatgcgcgtctcttcggtattcgcgccaagagggccaaggaggccgcggaacaggacgtcgaaaaaaagaaatag

SEQ ID NO: 228010 - DNA, 636 bp, Artificial Sequence
  derived and/or modified sequence
atggcaccctctcggaacgggatggttctaaaaccccacttccacaaggactggcaacggagagtggccacctggttcaaccagccggctcggaagattagaagaagaaaggcaaggcaggcgaaagccaggagaatcgccccacggccagcatctgggcctataaggccaattgtgcgatgccctaccgtgcgctaccacactaaggtgcgcgctggacggggattttccctggaggagctgagagtggctggtattcacaagaaggttgcacgtaccatagggatctcagtggatccaagaagacgcaacaagagcactgagagcttgcaagccaacgtgcagaggttaaaggagtatagatccaaattaatcttgttcccacgtaaacccagtgccccaaagaagggggacagctcagccgaagaactcaaactggctactcagttaactggtccggttatgcctgtcaggaacgtgtacaagaaggagaaagcacgggtaatcaccgaggaggaaaaaaacttcaaggcctttgcttccctgcgtatggcacgggcaaacgcgcgtctgttcggcatcagggcaaagagggctaaagaagcggctgaacaggatgtggaaaagaaaaaatag

SEQ ID NO: 228011 - DNA, 636 bp, Artificial Sequence
  derived and/or modified sequence
atggccccttctagaaatggtatggtgctgaagcctcatttccataaagactggcagcgcagggtagccacatggttcaatcagcctgcacgtaagataaggagacgtaaagccagacaggcaaaagcacgcaggatagcccctcggcctgccagtggacctatccgaccgattgtgcgctgtccaaccgttaggtaccacactaaggtccgggcaggcagagggttctcgcttgaagagttgcgcgtcgctggtattcacaagaaagtggcacgcacaattggcatctccgtggatccacggagacggaataagtctaccgagtctctacaggccaacgtgcaaaggctaaaagaatacagaagtaagctgatcttgttccctcgcaaaccatcggccccaaagaagggggattccagtgccgaggagctcaaactcgctacccaactgactggacctgtgatgcccgtgcgcaacgtgtataaaaaggagaaagcgagagtaatcaccgaagaagaaaaaaacttcaaagcttttgcctcccttagaatggccagggccaacgcccgtctctttggcataagggcaaagcgcgctaaggaggcagcagagcaggatgtggagaagaaaaaatag

SEQ ID NO: 228012 - DNA, 2221 bp, Artificial Sequence
  derived and/or modified sequence
gctatcatcccagagtgcattgcggggccgcttcctttccgctcggctgttttcctgcgcaggagccgcagggccgtaggcagccatggcgcccagccggaatggcatggtcttgaagccccacttccacaaggactggcagcggcgcgtggccacgtggttcaaccagccggcccgtaagatccgcagacgtaaggcccggcaagccaaggcgcgccgcatcgccccgcgccccgcgtcgggtcccatccggcccatcgtgcgctgccccacggttcggtaccacacgaaggtgcgcgccggccgcggcttcagcctggaggagctcagggtggccggcattcacaagaaggtggcccggaccatcggcatttctgtggatccgaggaggcggaacaagtccacggagtccctgcaggccaacgtgcagcggctgaaggagtaccgctccaaactcatcctcttccccaggaagccctcggcccccaagaagggagacagttctgctgaagaactgaaactggccacccagctgaccggaccggtcatgcccgtccggaacgtctataagaaggagaaagctcgagtcatcactgaggaagagaagaatttcaaagccttcgctagtctccgtatggcccgtgccaacgcccggctcttcggcatacgggcaaaaagagccaaggaagccgcagaacaggatgttgaaaagaaaaaataaagccctcctggggacttggaatcagtcggcagtcatgctgggtctccacgtggtgtgtttcgtgggaacaactgggcctgggatggggcttcactgctgtgacttcctcctgccaggggatttggggctttcttgaaagacagtccaagccctggataatgctttactttctgtgttgaagcactgttggttgtttggttagtgactgatgtaaaacggttttcttgtggggaggttacagaggctgacttcagagtggacttgtgttttttctttttaaagaggcaaggttgggctggtgctcacagctgtaatcccagcactttgaggttggctgggagttcaagaccagcctggccaacatgtcagaactactaaaaataaagaaatcagccatgcttggtgctgcacacttgtagttgcagctcctgggaggcagaggtgagggatcacttaacccaggaggcagaggctgcactgagccaggatcacgccactgcactctagcctgggcaacagtgagactgtctcaaaaaaaaaaaaagagacagggtcttcggcacccaggctggagtacagtgccacaatcatggctcactgcagtcttgaactcatggcctcaagcagtcctccctcagcctcccaagtagaggggtttataggcacgagaccctgcacccaacctagagttgccttttttaagcaaagcagtttctagttaatgtagcatcttggactttggggcgtcattcttaagcttgttgtgcccggtaaccatggtcctcttgctctgattaacccttccttcaatgggcttcttcacccagacaccaaggtatgagatggccctgccaagtgtcggcctctcctgttaaacaaaaacattctaaagccattgttcttgcttcatggacaagaggcagccagagagagtgccagggtgccctggtctgagctggcatccccatgtcttctgtgtccgagggcagcatggtttctcgtgcagtgctcagacacagcctgccctagtcctaccagctcacagcagcacctgctctccttggcagctatggccatgacaaccccagagaagcagcttcagggaccgagtcagattctgttttgtctacatgcctctgccgggtgccggtattgaggcacccagggagctgttactggcgtggaaataggtgatgctgctacctctgctgctgcactcacagccacacttgatacacgatgacaccttgcttgtttggaaacatctaaacatctagtagatgacttgcaggctgttggctaccagtttcctgtctgaggtgtatatgttaacttcgtgatcagtttgtatgtttgggactcttgtcctatgtaaagttaaggtgggccgggtgcagtggctcacgcctgtaatcctaacactgggaggccgaggcgggtggatcacctgatggtgaaacctcatctctactgaaaatacaaaaattagctgagtggtga

SEQ ID NO: 228013 - DNA, 2385 bp, Artificial Sequence
  derived and/or modified sequence
aggtgagggagactgggtcctggcctttgggcatcatccagcgccatcggcctggcgcttcagccaacgcgggagtggatgggccccttcttcttcgcagacagcgttcggccgctgcccgggctctaggcgcggccggacggcccagtctggagggttcggggcggaggcccgggggggtgcgcgcgcccggggtccggcctctcactcgctcccctctcgtccgcagccgcagggccgtaggcagccatggcgcccagccggaatggcatggtcttgaagccccacttccacaaggactggcagcggcgcgtggccacgtggttcaaccagccggcccgtaagatccgcagacgtaaggcccggcaagccaaggcgcgccgcatcgccccgcgccccgcgtcgggtcccatccggcccatcgtgcgctgccccacggttcggtaccacacgaaggtgcgcgccggccgcggcttcagcctggaggagctcagggtggccggcattcacaagaaggtggcccggaccatcggcatttctgtggatccgaggaggcggaacaagtccacggagtccctgcaggccaacgtgcagcggctgaaggagtaccgctccaaactcatcctcttccccaggaagccctcggcccccaagaagggagacagttctgctgaagaactgaaactggccacccagctgaccggaccggtcatgcccgtccggaacgtctataagaaggagaaagctcgagtcatcactgaggaagagaagaatttcaaagccttcgctagtctccgtatggcccgtgccaacgcccggctcttcggcatacgggcaaaaagagccaaggaagccgcagaacaggatgttgaaaagaaaaaataaagccctcctggggacttggaatcagtcggcagtcatgctgggtctccacgtggtgtgtttcgtgggaacaactgggcctgggatggggcttcactgctgtgacttcctcctgccaggggatttggggctttcttgaaagacagtccaagccctggataatgctttactttctgtgttgaagcactgttggttgtttggttagtgactgatgtaaaacggttttcttgtggggaggttacagaggctgacttcagagtggacttgtgttttttctttttaaagaggcaaggttgggctggtgctcacagctgtaatcccagcactttgaggttggctgggagttcaagaccagcctggccaacatgtcagaactactaaaaataaagaaatcagccatgcttggtgctgcacacttgtagttgcagctcctgggaggcagaggtgagggatcacttaacccaggaggcagaggctgcactgagccaggatcacgccactgcactctagcctgggcaacagtgagactgtctcaaaaaaaaaaaaagagacagggtcttcggcacccaggctggagtacagtgccacaatcatggctcactgcagtcttgaactcatggcctcaagcagtcctccctcagcctcccaagtagaggggtttataggcacgagaccctgcacccaacctagagttgccttttttaagcaaagcagtttctagttaatgtagcatcttggactttggggcgtcattcttaagcttgttgtgcccggtaaccatggtcctcttgctctgattaacccttccttcaatgggcttcttcacccagacaccaaggtatgagatggccctgccaagtgtcggcctctcctgttaaacaaaaacattctaaagccattgttcttgcttcatggacaagaggcagccagagagagtgccagggtgccctggtctgagctggcatccccatgtcttctgtgtccgagggcagcatggtttctcgtgcagtgctcagacacagcctgccctagtcctaccagctcacagcagcacctgctctccttggcagctatggccatgacaaccccagagaagcagcttcagggaccgagtcagattctgttttgtctacatgcctctgccgggtgccggtattgaggcacccagggagctgttactggcgtggaaataggtgatgctgctacctctgctgctgcactcacagccacacttgatacacgatgacaccttgcttgtttggaaacatctaaacatctagtagatgacttgcaggctgttggctaccagtttcctgtctgaggtgtatatgttaacttcgtgatcagtttgtatgtttgggactcttgtcctatgtaaagttaaggtgggccgggtgcagtggctcacgcctgtaatcctaacactgggaggccgaggcgggtggatcacctgatggtgaaacctcatctctactgaaaatacaaaaattagctgagtggtga

SEQ ID NO: 228014 - DNA, 636 bp, Artificial Sequence
  derived and/or modified sequence
atggcccccagcagaaacggcatggtgctgaagccccacttccacaaggactggcagagaagagtggccacctggttcaaccagcccgccagaaagatcagaagaagaaaggccagacaggccaaggccagaagaatcgcccccagacccgccagcggccccatcagacccatcgtgagatgccccaccgtgagataccacaccaaggtgagagccggcagaggcttcagcctggaggagctgagagtggccggcatccacaagaaggtggccagaaccatcggcatcagcgtggaccccagaagaagaaacaagagcaccgagagcctgcaggccaacgtgcagagactgaaggagtacagaagcaagctgatcctgttccccagaaagcccagcgcccccaagaagggcgacagcagcgccgaggagctgaagctggccacccagctgaccggccccgtgatgcccgtgagaaacgtgtacaagaaggagaaggccagagtgatcaccgaggaggagaagaacttcaaggccttcgccagcctgagaatggccagagccaacgccagactgttcggcatcagagccaagagagccaaggaggccgccgagcaggacgtggagaagaagaagtag

SEQ ID NO: 228015 - protein, 550 aa, Artificial Sequence
  derived and/or modified sequence
MSQTSLKQKKNEPGMRSSKESLEAEKRKESDKTGVRLSNQGSQESSLRKTDSRGYLVRSQWSRISRSPSTKAPSIDEPRSRNTSAKLPSSSTSSRTPSTSPSLHDSSPPPLSGQPSLQPPASPQLPRSLDSRPPTPPEPDPGSRRSTKMQENPEAWAQGIVREIRQTRDSQPLEYSRTSPTEWKSSSQRRGIYPASTQLDRNSLSEQQQQQREDEDDYEAAYWASMRSFYEKNPSCSRPWPPKPKNAITIALSSCALFNMVDGRKIYEQEGLEKYMEYQLTNENVILTPGPAFRFVKALQYVNARLRDLYPDEQDLFDIVLMTNNHAQVGVRLINSVNHYGLLIDRFCLTGGKDPIGYLKAYLTNLYIAADSEKVQEAIQEGIASATMFDGAKDMAYCDTQLRVAFDGDAVLFSDESEHFTKEHGLDKFFQYDTLCESKPLAQGPLKGFLEDLGRLQKKFYAKNERLLCPIRTYLVTARSAASSGARVLKTLRRWGLEIDEALFLAGAPKSPILVKIRPHIFFDDHMFHIEGAQRLGSIAAYGFNKKFSS

SEQ ID NO: 228016 - DNA, 1653 bp, Artificial Sequence
  derived and/or modified sequence
atgtcgcaaacttccttgaaacagaagaaaaatgagcccggtatgcgatcaagcaaagagtcattggaggcggaaaagagaaaagagagcgataaaaccggggtacggttgagtaaccaaggaagccaggagtcatcactgcggaaaacagactctaggggctacctggtgcgcagtcagtggtcacgcatatcacgatctcccagcaccaaggccccctccatcgacgaaccaagatcccgtaacacttcggccaagctgccctcatcaagcacgtcttcacggaccccttcaacgagtccatctcttcatgattcaagtcctccgccgctgtctgggcagccttccctgcagcctccagcgagtccccagcttccgagaagtctcgatagccgccccccaacgccccccgaaccagaccctggttctaggcggagcacaaaaatgcaggagaaccctgaggcatgggcccagggcatcgtcagagaaatacgacagactcgtgatagccaacccctggagtatagccggacctctccaaccgaatggaaaagctcaagccaacggaggggaatataccctgcctctacacagcttgaccggaacagcctgagtgagcagcagcaacagcagagagaagatgaagatgactatgaggcggcttactgggctagcatgcggtccttctacgagaaaaacccctcttgtagtcgtccatggcctcctaagccaaagaacgccatcaccatagcactgagttcctgcgcattgtttaacatggtggacggaagaaaaatctatgagcaagaaggcctggagaagtatatggagtaccaactcaccaacgaaaacgtgatcctgactcccggcccggcattcagattcgtgaaggcgttacagtatgtgaacgcaagattgcgcgacctgtatccagacgagcaggatctcttcgatattgtactgatgacaaacaatcatgctcaggtcggtgtcaggcttataaacagcgtcaatcattacggattactcatagatagattttgcctcacgggcggcaaggatccaattggctatcttaaagcatacttgacaaacctgtacattgccgctgacagcgagaaggtccaggaagcaattcaggagggcatcgcaagcgctactatgtttgatggcgccaaggatatggcctattgtgacacacagcttcgcgtggctttcgacggcgacgctgtgttgttcagcgacgagtcagagcacttcaccaaagagcacggactggataaattctttcaatacgacaccctctgtgagagcaaaccactggcccaggggcccctgaaaggcttcctggaggacttgggcagactgcaaaagaaattctacgccaaaaacgaaagactgttatgcccaattaggacctatctggtgaccgcaagatccgccgcatcaagtggcgcgcgggtattaaagaccctgagacgttggggtctcgagattgatgaagcccttttcctggcaggtgccccaaaaagtcctattctggtgaagatcagaccacatatctttttcgatgatcacatgtttcatattgaaggcgcccaaagactgggttctattgctgcctacggatttaacaaaaaatttagctcttag

SEQ ID NO: 228017 - DNA, 1653 bp, Artificial Sequence
  derived and/or modified sequence
atgagccagaccagcctgaagcagaagaagaatgaacctggcatgaggagcagcaaggagagcctggaggccgagaagaggaaggagagtgacaagacaggagtgcggctgagcaaccagggcagccaggagagcagcctgaggaagacagacagccggggctacctggtgcgcagccagtggagccgcatcagccgcagccccagcaccaaggcccccagcattgatgagcccaggagcaggaacaccagcgccaagctgcccagcagcagcaccagcagcaggacccccagcaccagccccagcctgcatgacagcagccccccacccctgagcggccagcccagcctgcagcccccagccagcccccagctgcccaggagcctggacagcaggcctcccaccccacctgagccagaccccggcagccgccgcagcaccaagatgcaggagaaccctgaggcctgggcccagggcatcgtgcgggagatccggcagacccgggacagccagcccctggagtacagcaggaccagccccacagagtggaagagcagcagccagaggcggggcatctacccagccagcacccagctggacaggaacagcctgtctgagcagcagcagcagcagagagaagatgaagatgattatgaggccgcctactgggcctccatgaggagcttctatgagaagaaccccagctgcagccggccctggccacccaagcccaagaatgccatcaccatcgccctgagcagctgtgccctcttcaacatggtggatggcaggaagatctatgagcaggagggcctggagaagtacatggagtaccagctgaccaatgaaaatgtcatcctgaccccaggccctgccttccgctttgtgaaggccctgcagtatgtgaatgcccggctgcgggacctgtacccagatgagcaggacctgtttgatattgtgctgatgaccaacaaccacgcccaggtgggcgtgcggctcatcaacagcgtgaaccactacggcctgctgattgaccgcttctgcctgaccggcggcaaggaccccatcggctacctgaaggcctacctgaccaacctgtacatcgctgctgacagcgagaaggtgcaggaggccatccaggagggcatcgccagcgccaccatgtttgatggagccaaggacatggcctactgtgacacccagctgcgggtggcctttgatggagatgctgtgctcttcagtgatgaaagtgagcacttcaccaaggagcacggcctggacaagttcttccagtatgacaccctgtgtgagagcaagcccctggcccagggccccctgaagggcttcctggaggacctgggccgcctgcagaagaagttctacgccaagaatgaaaggctgctgtgccccatccgcacctacctggtgacagcccggtctgctgccagcagcggggcccgggtgctgaagaccctgcggcgctggggcctggagattgatgaggccctcttcctggccggggcccccaagagccccatcctggtgaagatccggccccacatcttctttgatgaccacatgttccacatcgagggcgcccagaggctgggcagcattgctgcctacggcttcaacaagaagttcagcagctag

SEQ ID NO: 228018 - DNA, 1653 bp, Artificial Sequence
  derived and/or modified sequence
atgagccagaccagcctgaagcagaagaagaacgagcccggcatgagatcttccaaagagtccttagaggccgagaaacggaaagagtccgacaaaactggagtaagactttccaaccaaggctcacaggaatcatcactgcgcaagacagattcacgtggctacctggtaagaagccagtggtcccgcataagtcgctcacctagtacaaaagctccatctattgacgagcccaggtctcggaatacgtcggcaaagttaccatcatcctctactagcagtagaaccccaagtacatcaccaagtttgcatgattcctctccaccccctctctctggacagccctccttacagcccccagcgagtccccagctgccccggagtctggactcaaggccgcccaccccccccgagccagacccaggctctaggaggtccactaagatgcaggagaaccctgaggcttgggcccaggggatcgtccgagagattaggcagactagggactcccagcccttggaatattctagaacatcccccacagaatggaagagctcttcacagcgtcggggtatctatcccgcatccactcagctcgaccggaactctttgagtgagcagcagcaacagcagagagaagacgaagatgactatgaagctgcttattgggcctcaatgcggtcattttatgaaaaaaatccctcttgcagccgcccgtggccccccaaacccaagaacgccataaccattgccctgtcatcctgcgctctgttcaacatggtggatggcagaaaaatctatgagcaggaagggctggaaaaatatatggaataccaattaactaacgagaatgtgattctgacgccaggaccagcctttcgctttgtgaaggccctgcaatatgtgaacgccagattaagagacttataccccgacgaacaggatctcttcgatatcgtcctgatgactaataaccacgcccaggttggagtgcggctgataaatagcgtcaaccactatggtcttcttattgatagattttgtctgaccggagggaaggaccctattggctatctgaaggcctaccttacgaatctttatatcgccgcagattccgagaaagtgcaggaagcaatccaggaggggattgctagcgctaccatgttcgatggggccaaagatatggcgtactgtgacactcaactgagggttgctttcgatggagacgccgtacttttctccgacgaatccgagcatttcacgaaggaacatggactggacaagttctttcagtacgacactctgtgcgaaagtaaaccattggcacaagggcccctgaaaggtttcctagaggatctgggaaggctgcaaaaaaagttctacgcaaagaacgaaagactgctttgtcccattcgtacatatctggttacagccagatctgctgcctccagcggagcgcgggttctgaaaacattgcgacgctgggggcttgaaatcgatgaggctctttttctggcaggtgctccaaaaagtccaatcctggtcaagattagacctcatatttttttcgatgaccacatgtttcacattgaaggagctcagaggctggggtccatcgctgcgtacggcttcaacaagaaattctcgtcttag

SEQ ID NO: 228019 - DNA, 1653 bp, Artificial Sequence
  derived and/or modified sequence
atgtctcagacatctcttaagcagaagaagaatgaacccggaatgcggtcatccaaagagtcactggaggctgaaaagaggaaagagtcagataagaccggtgttcgtctttcaaatcagggtagccaagagtcgagtctacgcaagacggactcaaggggctatctcgtcagaagtcagtggagccgaatttctaggtcaccctccacaaaggcccctagcatcgatgagccgagaagccgaaacacttccgcaaagctcccctcgtcatcaacctctagccggactccgtcaactagtccttctttgcacgacagcagccctccaccattgagcggccaaccgtctctgcagcctcccgcttccccacagctgcccagatccctggattcgaggccgccaacacctccagaacccgatccagggtcccgaaggtctactaagatgcaggaaaaccctgaggcatgggcccagggcatagtaagggaaatccgtcagactcgagattctcagccactggagtatagtcgcacgagccccactgagtggaagagctcaagccagagaagaggaatctaccccgcttcaacccagttggacagaaactccctctctgagcaacagcagcaacagagggaggatgaggacgactacgaggcagcttactgggcctctatgcgatctttttatgagaagaatcccagttgttcgagaccttggcccccaaagcctaaaaatgcgataactatcgccttgtcgagctgcgcactgttcaacatggtagatggacgcaaaatttacgaacaggagggcttagaaaagtatatggagtaccaattaacaaacgaaaacgtgatcctgaccccgggacctgcattccgcttcgtcaaagcactgcagtacgttaatgcacgtctgagggacctctaccccgacgagcaagacctgtttgatatcgtgctcatgacaaataatcatgcccaggtgggagtccgcctcattaattccgtaaaccactatggtctcctaatcgaccgcttttgtttaactggcggaaaggatcctatcgggtacttgaaagcttaccttaccaatttgtatatcgctgcagatagtgagaaggtgcaggaggccatacaggagggaatcgcttctgcaactatgttcgatggggctaaggatatggcctattgtgatacccagctacgcgtcgccttcgacggcgatgctgtcctgtttagcgatgagagcgaacatttcacgaaggagcacggtctggacaaattcttccagtacgacactttatgcgaatctaagccgttggcgcaggggcctctgaaaggtttccttgaggacctcggccgtcttcagaagaaattttacgccaagaatgagcgcctcttgtgccccatccggacatacctggtgacagcacggtccgcggctagttccggcgctagggtgctgaaaacacttcggagatgggggctcgaaatagatgaggctctgttcctggctggcgcaccgaagagtccgattctggttaaaatacgcccacacattttcttcgatgatcatatgttccacatcgagggagcgcagcgactcggatcaatagcagcgtacgggtttaacaaaaaattctcttcctag

SEQ ID NO: 228020 - DNA, 2678 bp, Artificial Sequence
  derived and/or modified sequence
attctaaatgcaaagctagactgagcaagggaagtgacaggaaatggagctggggagacaaaaatgtggataacaacaaaagaatttcaacaggtaaaaaaatgagtcaaacatctctcaaacagaaaaagaatgagcctggaatgaggtcctcaaaagagagtctagaagcagaaaaaagaaaggaatctgacaaaacaggagttcgtctgagcaatcagggatcacaagaatcatcactgcggaagacagactctcgagggtaccttgtgcgcagtcaatggtctagaatatcccggagcccatccaccaaggctccatccatagatgagcctagaagcaggaacaccagtgctaagctccccagcagctccacgagctcccggactccatccacctccccaagcctgcatgactcctcaccgccgccgctgtccgggcagccctcgctccagccacccgcgtcgccccagctgccccggtcgctggactcgcggcctcccacgcccccagagcccgatcctggctcccggcgcagcaccaaaatgcaagagaatccggaggcctgggcccaaggcatcgtgcgggaaatccgccagacccgggactcgcagccgctggaatattcgcgcacgtcccccaccgagtggaagtcctccagccagcgcagggggatctaccccgcctccacccagctggaccgcaactctctgtccgagcagcagcagcagcagcgggaggacgaggacgactacgaggctgcctactgggcatccatgaggtcgttctacgagaagaacccgagctgctcgcgcccctggccgcccaaacccaagaacgccatcaccattgctctctcatcctgcgcgctcttcaacatggtggacggcaggaaaatctacgagcaagagggtctggaaaagtacatggagtatcagctcaccaatgagaacgtcatcctgaccccgggcccggcgttccgcttcgtcaaggcactacagtatgtcaatgctagactccgtgatctatatcctgatgaacaggacttatttgatattgtactgatgactaataaccatgcccaagtgggagtgcggcttataaacagcgtcaatcactacggcttactgattgaccgcttctgtctgaccgggggaaaagaccccattggctatttgaaggcatatcttaccaacttgtatattgctgcagattctgaaaaagtgcaagaggcaatacaagaaggtattgcctctgcgacaatgtttgatggagccaaagacatggcttactgtgacactcagctccgtgtagcctttgatggggatgctgtcctcttctctgatgagtctgaacattttaccaaggagcatgggctcgacaaattcttccagtatgatacattatgtgaaagtaagcctcttgctcagggtcccctaaaaggctttctggaagatttaggcagactgcaaaagaagttctatgccaaaaatgaacggttactttgtcctatcaggacctacctggttacagctaggagtgcagccagttcaggcgcccgtgtgctgaagacccttcgacgctggggtctagagatagacgaagctcttttccttgctggagcccccaaaagtcccatcttggtgaagatccggccccacatcttctttgatgaccacatgttccacattgaaggggcacagaggttaggttccatcgcagcttatggctttaataaaaaattcagtagttaggggcagggaggagaaataaagtggtgatagtctggtgttacagaagccacttcttttggctctctaggataattagataggtatttcagaaaattggaccttaaaactttgcttctttggaaaggttttctcctgattttttggaaaaccttttgaaccctcaagttaccatcaaactacttctctttgaactaccaatactgttgaatgccattacacctatctctgtgtaagtcataatgatgactctttaggataagtttagaacttgaatatttgcatgcttaaggcactgttttagaagcttacttagttttataaacactgctcatttttggatgtttgtagataacaatgaattgttacccatcagcattgtagaatagtgtcttcaaaggtagaaggagtatggttaagcacactcttgaaaactggagctttgtattctgtgactgctatggctagctttgtaaccaaagcaaaatgagaatttcactctacctgcatgagtataacaattttgatactgctcatttagaaataaatcatctggttgttcctccagggtactttctaagataagccttaaacagaaacccctaagaaaggttctctgaaaattatttggtgggttaaatgcctctgatccacagagtttcatatttgaagtctccggctttgggcctggcaggctggcacatccatatttgtatggaaaaaaaaaaaaaagaccctacgctaccacttcaaaaagtgacatgaagtgtagtatcctggcccttcattgtcattctctcatgatttttgttttgttttcaacaaaaattggttggtcattaaatatatcatatgttaggcacagtgacctggttattttcacatgttacttcattttcttatcaaattaaatgtttgtgacatagt

SEQ ID NO: 228021 - DNA, 1653 bp, Artificial Sequence
  derived and/or modified sequence
atgagccagaccagcctgaagcagaagaagaacgagcccggcatgagaagcagcaaggagagcctggaggccgagaagagaaaggagagcgacaagaccggcgtgagactgagcaaccagggcagccaggagagcagcctgagaaagaccgacagcagaggctacctggtgagaagccagtggagcagaatcagcagaagccccagcaccaaggcccccagcatcgacgagcccagaagcagaaacaccagcgccaagctgcccagcagcagcaccagcagcagaacccccagcaccagccccagcctgcacgacagcagccccccccccctgagcggccagcccagcctgcagccccccgccagcccccagctgcccagaagcctggacagcagaccccccaccccccccgagcccgaccccggcagcagaagaagcaccaagatgcaggagaaccccgaggcctgggcccagggcatcgtgagagagatcagacagaccagagacagccagcccctggagtacagcagaaccagccccaccgagtggaagagcagcagccagagaagaggcatctaccccgccagcacccagctggacagaaacagcctgagcgagcagcagcagcagcagagagaggacgaggacgactacgaggccgcctactgggccagcatgagaagcttctacgagaagaaccccagctgcagcagaccctggccccccaagcccaagaacgccatcaccatcgccctgagcagctgcgccctgttcaacatggtggacggcagaaagatctacgagcaggagggcctggagaagtacatggagtaccagctgaccaacgagaacgtgatcctgacccccggccccgccttcagattcgtgaaggccctgcagtacgtgaacgccagactgagagacctgtaccccgacgagcaggacctgttcgacatcgtgctgatgaccaacaaccacgcccaggtgggcgtgagactgatcaacagcgtgaaccactacggcctgctgatcgacagattctgcctgaccggcggcaaggaccccatcggctacctgaaggcctacctgaccaacctgtacatcgccgccgacagcgagaaggtgcaggaggccatccaggagggcatcgccagcgccaccatgttcgacggcgccaaggacatggcctactgcgacacccagctgagagtggccttcgacggcgacgccgtgctgttcagcgacgagagcgagcacttcaccaaggagcacggcctggacaagttcttccagtacgacaccctgtgcgagagcaagcccctggcccagggccccctgaagggcttcctggaggacctgggcagactgcagaagaagttctacgccaagaacgagagactgctgtgccccatcagaacctacctggtgaccgccagaagcgccgccagcagcggcgccagagtgctgaagaccctgagaagatggggcctggagatcgacgaggccctgttcctggccggcgcccccaagagccccatcctggtgaagatcagaccccacatcttcttcgacgaccacatgttccacatcgagggcgcccagagactgggcagcatcgccgcctacggcttcaacaagaagttcagcagctag

SEQ ID NO: 228022 - protein, 307 aa, Artificial Sequence
  derived and/or modified sequence
MNTRNRVVNSGLGASPASRPTRDPQDPSGRQGELSPVEDQREGLEAAPKGPSRESVVHAGQRRTSAYTLIAPNINRRNEIQRIAEQELANLEKWKEQNRAKPVHLVPRRLGGSQSETEVRQKQQLQLMQSKYKQKLKREESVRIKKEAEEAELQKMKAIQREKSNKLEEKKRLQENLRREAFREHQQYKTAEFLSKLNTESPDRSACQSAVCGPQSSTWARSWAYRDSLKAEENRKLQKMKDEQHQKSELLELKRQQQEQERAKIHQTEHRRVNNAFLDRLQGKSQPGGLEQSGGCWNMNSGNSWGI

SEQ ID NO: 228023 - DNA, 924 bp, Artificial Sequence
  derived and/or modified sequence
atgaacacccgcaaccgggtagtcaactccggactgggggccagtcctgcttcacggcctactagagaccctcaagacccatccgggagacaaggggaactgtctccggtggaggaccagagagagggactcgaagctgccccgaaggggccatcgcgagagtctgtggttcacgccggccagcgacgcacatcagcatacacgctgatcgcccctaacattaatcgtaggaacgaaatccaacgcattgccgagcaggagcttgccaatctagagaagtggaaggagcagaaccgggctaagcctgtgcacctcgttcccagacgactgggtgggtcccagagtgagactgaggtgcgacagaaacaacagctgcaactgatgcaatccaagtacaaacagaaactgaaacgtgaggaatctgtgaggatcaagaaggaggccgaagaggccgagttgcagaagatgaaagccatacagcgggaaaagtctaacaaactggaggaaaagaaacgcctacaggaaaacctaaggagagaagcctttagggaacatcagcaatacaagacagctgaatttctgagtaaactgaacacagaatcccccgaccgcagtgcctgccaatctgccgtgtgtggcccccagagttctacgtgggcccggagttgggcctacagagactcattaaaagctgaagagaatcgaaagctgcagaaaatgaaggatgagcagcaccagaagtcagagcttttagagctgaagagacaacaacaggagcaagagcgcgctaaaatccatcaaactgagcatcgaagagtgaacaatgcattcctggaccgcttgcaagggaagtcgcagccgggcggcctggagcagtccggagggtgctggaacatgaattccggcaactcctggggtatttag

SEQ ID NO: 228024 - DNA, 924 bp, Artificial Sequence
  derived and/or modified sequence
atgaacaccaggaacagagtggtgaacagcggcctgggcgccagccctgccagccggcccacccgggacccccaggaccccagcggccggcagggcgagctgagccctgtggaggaccagcgggagggcctggaggccgcccccaagggccccagccgggagagcgtggtgcatgctggccagaggaggaccagcgcctacaccctcatcgcccccaacatcaacagaagaaatgagatccagagaattgctgagcaggagctggccaacctggagaagtggaaggagcagaacagagccaagcctgtgcacctggtgccccggcggctgggcggcagccagagcgagacagaggtgcggcagaagcagcagctgcagctgatgcagagcaagtacaagcagaagctgaagcgggaggagagcgtgcgcatcaagaaggaggccgaggaggccgagctgcagaagatgaaggccatccagcgggagaagagcaacaagctggaggagaagaagaggctgcaggagaacctgcggcgggaggccttccgggagcaccagcagtacaagacagctgagttcctgagcaagctgaacacagagagcccagacagaagtgcctgccagagcgctgtgtgtggcccccagagcagcacctgggcccgctcctgggcctacagagacagcctgaaggccgaggagaacaggaagctgcagaagatgaaggatgagcagcaccagaagtctgagctgctggagctgaagaggcagcagcaggagcaggagcgggccaagatccaccagacagagcacagaagagtgaacaatgccttcctggaccggctgcagggcaagagccagcccggcggcctggagcagagcggcggctgctggaacatgaacagcggcaacagctggggcatctag

SEQ ID NO: 228025 - DNA, 924 bp, Artificial Sequence
  derived and/or modified sequence
atgaacacccggaaccgggtggtgaacagcggcctgggcgccagccccgccagcaggcctaccagagacccacaggatcctagcggcagacagggcgaactgtcacccgtcgaggatcagagggagggtcttgaagcagccccgaaaggacctagccgtgagtcagtggtgcacgcaggccagaggcgcacaagcgcatacaccctgatagcccctaacataaatagacgcaacgagatacagaggatcgcggagcaggaactcgcaaatctggaaaagtggaaggagcagaacagagccaagcctgttcatctggtgccaagacggctgggcgggtcacagagcgagaccgaagttaggcagaaacagcaactccagctaatgcaatccaagtataaacagaaactgaagagggaagagtctgtccggattaaaaaagaagccgaggaggcagagttgcagaagatgaaagcaatccagagagaaaaatctaacaagctggaagagaagaagcgactgcaggaaaatctcagacgagaagcttttcgcgagcatcagcagtataaaactgctgaattcctttctaagctgaataccgaaagtcctgatagatctgcctgccagtcggctgtgtgtggtccccagtcgagcacctgggcgagaagctgggcctaccgtgacagcctaaaagcggaggaaaatcggaaattacaaaaaatgaaagacgaacagcaccagaagagtgagctgctcgagttgaaacgccagcagcaggagcaggaacgggccaaaattcaccagaccgaacacagaagagtgaacaacgcatttcttgatcgtctgcagggaaaatcacagccaggtggcctcgagcagagtggaggatgctggaatatgaactctggaaatagttgggggatctag

SEQ ID NO: 228026 - DNA, 924 bp, Artificial Sequence
  derived and/or modified sequence
atgaataccaggaatagggtggtcaatagtgggctaggcgcttcacctgctagcagacccaccagggatcctcaggaccccagcgggaggcagggcgaactctcgccagtcgaggatcaacgggaaggcttagaagccgctccgaagggcccatcaagggaatctgttgttcacgccggacagaggcggacgtctgcctacactcttatagcccctaatatcaaccgtcgtaatgaaatccagcggattgcagagcaagagctggctaatctggagaaatggaaggaacagaaccgagctaagcccgtgcatttagtgcccagacgtttgggtggctcacagtctgagaccgaggtgcgccaaaagcagcagctacagctgatgcagtcaaagtacaagcaaaagcttaagagggaagagtccgtcagaattaaaaaggaggctgaagaggctgagctgcaaaaaatgaaagctattcaacgtgagaaatcgaacaaactggaagagaagaagaggctgcaagaaaatttacgacgcgaagcctttagggagcatcaacagtacaagactgccgagtttctgagcaaactcaacacagagtctcccgacaggtctgcctgccaaagcgcagtctgtggcccacaaagttcaacctgggccagatcatgggcatatcgcgatagcctaaaggccgaggagaatagaaagcttcaaaagatgaaggatgagcagcaccagaaatcagagttgctggagttgaaaagacagcagcaggaacaggaacgcgctaagatccaccagacagagcacagacgagtaaacaatgcttttcttgatcgtttacagggtaagagtcagcccggtggcctggagcagtcaggcggatgttggaatatgaacagcggaaactcctggggtatctag

SEQ ID NO: 228027 - DNA, 924 bp, Artificial Sequence
  derived and/or modified sequence
atgaacaccagaaacagagtggtgaacagcggcctgggcgccagccccgccagcagacccaccagagacccccaggaccccagcggcagacagggcgagctgagccccgtggaggaccagagagagggcctggaggccgcccccaagggccccagcagagagagcgtggtgcacgccggccagagaagaaccagcgcctacaccctgatcgcccccaacatcaacagaagaaacgagatccagagaatcgccgagcaggagctggccaacctggagaagtggaaggagcagaacagagccaagcccgtgcacctggtgcccagaagactgggcggcagccagagcgagaccgaggtgagacagaagcagcagctgcagctgatgcagagcaagtacaagcagaagctgaagagagaggagagcgtgagaatcaagaaggaggccgaggaggccgagctgcagaagatgaaggccatccagagagagaagagcaacaagctggaggagaagaagagactgcaggagaacctgagaagagaggccttcagagagcaccagcagtacaagaccgccgagttcctgagcaagctgaacaccgagagccccgacagaagcgcctgccagagcgccgtgtgcggcccccagagcagcacctgggccagaagctgggcctacagagacagcctgaaggccgaggagaacagaaagctgcagaagatgaaggacgagcagcaccagaagagcgagctgctggagctgaagagacagcagcaggagcaggagagagccaagatccaccagaccgagcacagaagagtgaacaacgccttcctggacagactgcagggcaagagccagcccggcggcctggagcagagcggcggctgctggaacatgaacagcggcaacagctggggcatctag

SEQ ID NO: 228028 - protein, 147 aa, Artificial Sequence
  derived and/or modified sequence
MAAQRLGKRVLSKLQSPSRARGPGGSPGGLQKRHARVTVKYDRRELQRRLDVEKWIDGRLEELYRGMEADMPDEINIDELLELESEEERSRKIQGLLKSCGKPVEDFIQELLAKLQGLHRQPGLRQPSPSHDGSLSPLQDRARTAHP

SEQ ID NO: 228029 - DNA, 444 bp, Artificial Sequence
  derived and/or modified sequence
atggccgcccagagactgggcaagagagtgctgagcaagctgcagagccccagcagagccagaggccccggcggcagccccggcggcctgcagaagagacacgccagagtgaccgtgaagtacgacagaagagagctgcagagaagactggacgtggagaagtggatcgacggcagactggaggagctgtacagaggcatggaggccgacatgcccgacgagatcaacatcgacgagctgctggagctggagagcgaggaggagagaagcagaaagatccagggcctgctgaagagctgcggcaagcccgtggaggacttcatccaggagctgctggccaagctgcagggcctgcacagacagcccggcctgagacagcccagccccagccacgacggcagcctgagccccctgcaggacagagccagaaccgcccacccctag

SEQ ID NO: 228030 - DNA, 444 bp, Artificial Sequence
  derived and/or modified sequence
atggctgcccagcgcctgggcaaacgagtcctgtcaaagctccaatcgccatctcgggcccgcgggcctgggggcagccctggcggattacagaaaagacatgcaagagtgacggtgaagtacgatcgccgggaattgcagaggcgcctcgacgtcgaaaagtggattgacgggaggctggaggaactatatcgtggaatggaggctgacatgcctgacgagatcaacatagatgagctgttggagctcgaaagcgaagaggaaagatctaggaaaattcagggactcctaaagtcgtgtgggaagcctgttgaggacttcatacaggagctgctggcgaagctgcagggactccaccgccagcctggcctgcgtcagccctccccctcacatgacggttccttgtccccattacaagaccgggctaggaccgcacacccatag

SEQ ID NO: 228031 - DNA, 444 bp, Artificial Sequence
  derived and/or modified sequence
atggccgcccagaggctgggcaagagggtgctgagcaagctgcagagccccagccgggcccggggccctgggggcagccctgggggcctgcagaagagacatgcccgggtgacagtgaagtatgacagaagagagctgcagaggcggctggatgtggagaagtggattgatggccgcctggaggagctgtaccggggcatggaggccgacatgccagatgagatcaacattgatgagctgctggagctggagagcgaggaggagaggagcaggaagatccagggcctgctgaagagctgtgggaagcctgtggaggacttcatccaggagctgctggccaagctgcagggcctgcaccggcagcccggcctgcggcagcccagccccagccatgatggcagcctgagccccctgcaggaccgggccaggacagcccacccctag

SEQ ID NO: 228032 - DNA, 444 bp, Artificial Sequence
  derived and/or modified sequence
atggccgcccagcggctgggcaagcgggtgctgagcaagctgcagagtccctcccgggcccgggggccaggcggctctcctggcgggctccagaagcggcatgcaagagtcactgtgaagtatgatcggcgcgagctgcagagacggctggacgtcgaaaagtggatcgatggtcgacttgaagagctgtataggggtatggaagccgatatgcctgacgagataaacattgatgaactgctagagttagaatcagaagaagagagaagtcgcaagatacaggggctcttaaagtcttgcggcaagccagtggaggacttcatccaggagctactggcaaagctgcagggattgcaccggcagcccggcttaagacaacctagccccagccacgacggtagcctctctccattacaggatagagcccgaaccgcccacccctag

SEQ ID NO: 228033 - DNA, 444 bp, Artificial Sequence
  derived and/or modified sequence
atggcagcgcaaaggctgggaaagagagtcctgagtaaacttcagagcccctctcgggctcgcggtcctggtggatcaccaggtgggctccaaaagcgtcacgctagagtgaccgtgaagtacgatcgaagggagttacagcgcaggctggacgtcgagaaatggattgacggtagattagaggagctctaccggggaatggaggccgacatgcctgacgaaattaacatagatgagctgttggaacttgagtctgaggaggagcgctccaggaagatacagggactgttaaagagttgtggcaagcctgtcgaagactttatccaagaacttcttgccaagttgcagggcttacatcgccagcccggattacgccaaccatcccctagtcatgacggcagcctgtctcctctgcaagatagagccagaaccgcacatccctag

SEQ ID NO: 228034 - DNA, 710 bp, Artificial Sequence
  derived and/or modified sequence
gcctcaagccgacgcagcggcctactctcgcactgcagacggggaaactgaggcctgaggcggccggggtggggcagacctcccggcgagcccgagcccccgcccccggctagccccgccctggcccgtaagaagcacccggggcgcgaggcgaaggcgcacagcgcggggccaggctgggtccagcagcgcgatggcagctcagcggctgggcaagcgcgtgctgagcaagctgcagtctccatcgcgggcccgcgggccagggggcagtcccggggggctgcagaagcggcacgcgcgcgtcaccgtcaagtatgaccggcgggagctgcagcggcggctggacgtggagaagtggatcgacgggcgcctggaggagctgtaccgcggcatggaggcagacatgcccgatgagatcaacattgatgaattgttggagttagagagtgaagaggagagaagccggaaaatccagggactcctgaagtcatgtgggaaacctgtcgaggacttcatccaggagctgctggcaaagcttcaaggcctccacaggcagcccggcctccgccagccaagcccctcccacgacggcagcctcagccccctccaggaccgggcccggactgctcacccctgaccctcttgcactctccctgccccccggacgccgcccagcttgcttgtgtataagttgtatttaatggttctgt

SEQ ID NO: 228035 - protein, 220 aa, Artificial Sequence
  derived and/or modified sequence
MERYAAALEEVADGARQQERHYQLLSALQSLVKELPSSFQQRLSYTTLSDLALALLDGTVFEIVQGLLEIQHLTEKSLYNQRLRLQNEHRVLRQALRQKHQEAQQACRPHNLPVVQAAQQRELEAVEHRIREEQRAMDQKIILELDRKVADQQSTLEKAGVAGFYVTTNPQELMLQMNLLELIRKLQQRGCRAGNAALGLGGPWQSPAAQCDQKGSPVPP

SEQ ID NO: 228036 - DNA, 663 bp, Artificial Sequence
  derived and/or modified sequence
atggagcgctatgcggccgccttggaagaagtggccgatggcgccagacagcaagagaggcactaccagttactaagtgcactgcagtccttggtgaaagaactgccttcttcctttcagcaacggctatcttataccacgttgagcgaccttgcccttgcattattggacggtaccgtgttcgaaattgttcaaggactcctggagattcagcaccttacagaaaaatccctgtacaatcagcggcttcgcttacagaacgagcacagggtgctaaggcaggcgctacgacaaaaacatcaagaggctcagcaggcctgccggccacataatctgcccgttgtccaggccgctcagcagcgggagctggaagctgtggagcataggattagagaggaacagagggctatggaccagaaaatcatcctggagttagatcgcaaggtggcagaccagcagtcgactctcgagaaggcaggagtggccggtttctatgtcacaaccaatcctcaagaattgatgctgcaaatgaatttgctggaactcatcaggaagcttcagcagcgagggtgcagagctggaaacgccgccctaggcttgggtggaccctggcagagccctgcagcccaatgtgatcagaagggatcccccgtaccgccatag

SEQ ID NO: 228037 - DNA, 663 bp, Artificial Sequence
  derived and/or modified sequence
atggagagatatgctgctgccctggaggaggtggctgatggagcccggcagcaggagcggcactaccagctgctgagcgccctgcagagcctggtgaaggagctgcccagcagcttccagcagaggctgagctacaccaccctgagtgacctggccctggccctgctggatggcaccgtgtttgaaattgtgcagggcctgctggagatccagcacctgacagagaagagcctgtacaaccagaggctgcggctgcagaatgagcaccgggtgctgcggcaggccctgcggcagaagcaccaggaggcccagcaggcctgccggccccacaacctgcctgtggtgcaggccgcccagcagcgggagctggaggccgtggagcaccgcatccgggaggagcagagggccatggaccagaagatcatcctggagctggacaggaaggtggccgaccagcagagcaccctggagaaggccggcgtggccggcttctacgtgaccaccaacccccaggagctgatgctgcagatgaacctgctggagctgatcaggaagctgcagcagaggggctgcagagctggaaatgctgccctgggcctgggcggcccctggcagagccctgctgcccagtgtgaccagaagggcagccctgtgcccccatag

SEQ ID NO: 228038 - DNA, 663 bp, Artificial Sequence
  derived and/or modified sequence
atggagcggtacgccgccgccctggaggaggtggccgacggcgccagacagcaggagcgtcactaccagttgctcagcgccctgcagtcgctggtgaaggagctaccatcctcattccagcagaggttaagctatacgacattgagcgacctcgcactggcactcttagacggtacagtgttcgaaattgtacaaggtctgctggagatccagcatctgacggaaaagtcgttgtataatcagcgcctgagacttcagaacgagcatcgggtgttgagacaggctcttcgtcagaaacatcaggaggcacaacaggcttgtagaccacacaacttgccggtggtgcaagccgcacaacaaagggagcttgaagccgttgagcataggatccgggaggaacaaagagccatggatcagaaaattattctcgagttggatcgaaaggtggctgaccagcagtccaccctggagaaagccggcgtagcgggattttatgtcacaactaacccccaggaactcatgttgcagatgaacctgctagaattgattagaaagctgcagcagagaggatgcagagcaggaaacgctgccctcggcctgggggggccgtggcagtcaccggcagcacaatgcgatcaaaagggcagtcctgtgcccccttag

SEQ ID NO: 228039 - DNA, 663 bp, Artificial Sequence
  derived and/or modified sequence
atggagcgctacgcagcagccctggaagaggttgccgacggcgcacgtcagcaggagaggcactatcagctgttgagtgctctgcaaagcctcgtgaaggagctgcccagttcctttcagcagaggctgtcttacactaccctatccgacttggcactcgccctcctcgatggcaccgtctttgaaatcgtgcaaggactgctggaaattcagcacctgacagagaaatcactgtataaccagcgacttcggctgcagaacgagcaccgagtccttcggcaagcgcttagacagaagcatcaggaggcccagcaggcttgtcgccctcataacctccctgtagtccaggctgctcagcagcgggaactcgaggccgtcgagcaccggatccgagaagagcagcgagccatggatcagaagatcatcctcgaacttgatcgtaaggtcgcagatcagcagtctaccctagaaaaagctggggtagcgggattttacgtgacgaccaatcctcaggaactcatgctgcagatgaatctcctcgaacttatccgcaaactccagcagcgtggttgccgggctggcaacgcagccctcggtctaggcggtccctggcagtccccagctgcacagtgcgatcaaaagggtagccccgttccaccttag

SEQ ID NO: 228040 - DNA, 663 bp, Artificial Sequence
  derived and/or modified sequence
atggagagatacgccgccgccctggaggaggtggccgacggcgccagacagcaggagagacactaccagctgctgagcgccctgcagagcctggtgaaggagctgcccagcagcttccagcagagactgagctacaccaccctgagcgacctggccctggccctgctggacggcaccgtgttcgagatcgtgcagggcctgctggagatccagcacctgaccgagaagagcctgtacaaccagagactgagactgcagaacgagcacagagtgctgagacaggccctgagacagaagcaccaggaggcccagcaggcctgcagaccccacaacctgcccgtggtgcaggccgcccagcagagagagctggaggccgtggagcacagaatcagagaggagcagagagccatggaccagaagatcatcctggagctggacagaaaggtggccgaccagcagagcaccctggagaaggccggcgtggccggcttctacgtgaccaccaacccccaggagctgatgctgcagatgaacctgctggagctgatcagaaagctgcagcagagaggctgcagagccggcaacgccgccctgggcctgggcggcccctggcagagccccgccgcccagtgcgaccagaagggcagccccgtgcccccctag

SEQ ID NO: 228041 - DNA, 1154 bp, Artificial Sequence
  derived and/or modified sequence
aatcgtaaaaggggcgggacgcgccgcgctcgggatgtcgtgaagctgggggagctcgtcgccgccgccggcggctagcgggcgtccgcgccatggagcgctacgcggccgccttggaggaggtggcggacggtgcccggcagcaggagcgacactaccagttgctgtcggcgctacagagcctggtgaaggagttgcccagctctttccagcagcgcctgtcctacaccacgctcagcgacctggccctggcgcttctcgacggcaccgtgttcgaaatcgtgcaggggctactggagatccagcacctcaccgaaaagagcctgtacaaccagcgcctgcgcctacagaacgagcaccgagtgctcaggcaggcgctgcggcagaagcaccaggaagcccagcaggcctgccggccccacaacctgcctgtggttcaggcggctcagcagcgagaactagaggccgtggaacaccggatccgtgaggagcagcgggcgatggaccagaagatcatcctggagctggaccggaaggtggctgaccagcagagcacactggagaaggcgggggtggctggcttctacgtgaccaccaacccacaggagctgatgctgcagatgaacctgctggaactcatccgaaagctgcagcagaggggctgccgggcagggaatgcagccctgggactgggaggtccctggcagtcgcctgctgcccagtgtgaccagaaaggcagccctgtcccaccatagccacaggcagcagaagtctgggcagagttcatcttcttgacctttggccactgccttcccagctgcccgcagggggttccccctgctgaggagagaccaggtggaccccagctgcctgtcacccttcatctgggacttgctgtcaaaccctaggatagtctcataaaggggaggctgggccagcctgctgctgtctgcttcaggaccaggcagagagtgaggctgggggttctcacaccttactccaccgggcacatcccaacctgcactggggcccacccgagcgcttgttctggtctcagccgctcccttggcagctgcagcccccatgcagaagaggctcccaggcccaagctctgtgtgacccagagaaataaagatgcctcagtgtggcccaaa

SEQ ID NO: 228042 - protein, 70 aa, Artificial Sequence
  derived and/or modified sequence
MSNNMAKIAEARKTVEQLKLEVNIDRMKVSQAAAELLAFCETHAKDDPLVTPVPAAENPFRDKRLFCVLL

SEQ ID NO: 228043 - DNA, 213 bp, Artificial Sequence
  derived and/or modified sequence
atgagcaacaacatggccaagatcgcggaggcccgtaaaacagtcgagcaactgaagctagaagtgaatatcgataggatgaaagtctctcaggctgccgctgagctgctggcattctgcgagacccatgctaaagatgaccctctcgtgacaccagtacctgccgctgaaaatccgtttagggacaaacgtctattctgcgttcttctctag

SEQ ID NO: 228044 - DNA, 213 bp, Artificial Sequence
  derived and/or modified sequence
atgtccaacaatatggctaagattgccgaggccaggaagaccgtcgaacaactcaaactggaagtgaacatcgaccgaatgaaggttagtcaggctgcagcagaactcctcgctttttgcgagacccatgccaaagatgaccctttagttacccccgttccagccgcagaaaacccattccgcgacaagagactcttctgtgtactgctgtag

SEQ ID NO: 228045 - DNA, 213 bp, Artificial Sequence
  derived and/or modified sequence
atgtccaacaacatggccaagattgccgaggcccgcaagacggtggaacagctgaagctggaggtgaacatcgaccgcatgaaggtgtcgcaggcagcagcggaactcctggctttctgcgagacgcatgccaaagatgacccgctggtgacgccagtacccgccgcggagaaccccttccgcgacaagcgcctcttttgtgttctgctctga

SEQ ID NO: 228046 - DNA, 213 bp, Artificial Sequence
  derived and/or modified sequence
atgagcaacaacatggccaagatcgccgaggccagaaagaccgtggagcagctgaagctggaggtgaacatcgacagaatgaaggtgagccaggccgccgccgagctgctggccttctgcgagacccacgccaaggacgaccccctggtgacccccgtgcccgccgccgagaaccccttcagagacaagagactgttctgcgtgctgctgtag

SEQ ID NO: 228047 - DNA, 213 bp, Artificial Sequence
  derived and/or modified sequence
atgtccaataatatggcaaagatcgctgaagcccgaaaaaccgtggaacagcttaaactggaagtgaacattgataggatgaaggtcagtcaggctgcagctgagctcctggccttttgtgagactcacgccaaggatgatccgctggtcacccctgtgccagccgctgaaaaccccttcagggacaagaggctgttctgtgtcctcctgtag

SEQ ID NO: 228048 - DNA, 213 bp, Artificial Sequence
  derived and/or modified sequence
atgagcaacaacatggccaagattgctgaggccaggaagacagtggagcagctgaagctggaggtgaacatcgacaggatgaaggtgtcccaggccgctgctgagctgctggccttctgtgagacccacgccaaggatgaccccctggtgacccctgtgcctgctgctgagaaccccttccgggacaagaggctcttctgtgtgctgctgtag

SEQ ID NO: 228049 - DNA, 213 bp, Artificial Sequence
  derived and/or modified sequence
atgagcaacaacatggccaagatcgccgaggcccggaagaccgtggaacagctcaaattggaggttaacatcgacagaatgaaggtgagccaggcagcagccgagctactggctttctgcgagacccacgccaaggatgacccactggtgacccctgtccccgcggccgagaaccccttccgtgacaagagactgttctgtgtcctgttatag

SEQ ID NO: 228050 - RNA, 213 nt, Artificial Sequence
  derived and/or modified sequence
auguccaacaauauggcuaagauugccgaggccaggaagaccgucgaacaacucaaacuggaagugaacaucgaccgaaugaagguuagucaggcugcagcagaacuccucgcuuuuugcgagacccaugccaaagaugacccuuuaguuacccccguuccagccgcagaaaacccauuccgcgacaagagacucuucuguguacugcuguag

SEQ ID NO: 228051 - protein, 403 aa, Artificial Sequence
  derived and/or modified sequence
MKLEVFVPRAAHGDKQGSDLEGAGGSDAPSPLSAAGDDSLGSDGDCAANSPAAGGGARDTQGDGEQSAGGGPGAEEAIPAAAAAAVVAEGAEAGAAGPGAGGAGSGEGARSKPYTRRPKPPYSYIALIAMAIRDSAGGRLTLAEINEYLMGKFPFFRGSYTGWRNSVRHNLSLNDCFVKVLRDPSRPWGKDNYWMLNPNSEYTFADGVFRRRRKRLSHRAPVPAPGLRPEEAPGLPAAPPPAPAAPASPRMRSPARQEERASPAGKFSSSFAIDSILRKPFRSRRLRDTAPGTTLQWGAAPCPPLPAFPALLPAAPCRALLPLCAYGAGEPARLGAREAEVPPTAPPLLLAPLPAAAPAKPLRGPAAGGAHLYCPLRLPAALQAASVRRPGPHLPYPVETLLA

SEQ ID NO: 228052 - DNA, 2338 bp, Artificial Sequence
  derived and/or modified sequence
ctcaacgtcgaaccgaaggcgacacccacccaactcctccctctccgccccatagtccacccaacacttgcagcccctccagagaaaaagcccagcggaagaggactccggaaaagtgactatctcggaagaccagggtagagctcccgggagaaaaaggcgaagatccccggccccggatcgccatccccttccctggcaccagcttctctaggctgcgcgaaggaagagggtacgacgccggggagggactgggtgcgcgggcatgaagttggaggtgttcgtccctcgcgcggcccacggggacaagcagggcagtgacctggagggcgcgggcggcagcgacgcgccgtccccgctgtcggcggcgggagacgactccctgggctcagatggggactgcgcggccaacagcccggccgcgggcggcggcgccagagatacgcagggcgacggcgaacagagtgcgggaggcgggccgggcgcggaggaggcgatcccggcagcagctgctgcagcggtggtggcggagggcgcggaggccggggcggcggggccaggcgcgggcggcgcggggagcggcgagggtgcacgcagcaagccatatacgcggcggcccaagcccccctactcgtacatcgcgctcatcgccatggccatccgcgactcggcgggcgggcgcttgacgctggcggagatcaacgagtacctcatgggcaagttcccctttttccgcggcagctacacgggctggcgcaactccgtgcgccacaacctttcgctcaacgactgcttcgtcaaggtgctgcgcgacccctcgcggccctggggcaaggacaactactggatgctcaaccccaacagcgagtacaccttcgccgacggggtcttccgccgccgccgcaagcgcctcagccaccgcgcgccggtccccgcgcccgggctgcggcccgaggaggccccgggcctccccgccgccccgccgcccgcgcccgccgccccggcctcgccccgcatgcgctcgcccgcccgccaggaggagcgcgccagccccgcgggcaagttctccagctccttcgccatcgacagcatcctgcgcaagcccttccgcagccgccgcctcagggacacggcccccgggacgacgcttcagtggggcgccgcgccctgcccgccgctgcccgcgttccccgcgctcctccccgcggcgccctgcagggccctgctgccgctctgcgcgtacggcgcgggcgagccggcgcggctgggcgcgcgcgaggccgaggtgccaccgaccgcgccgcccctcctgcttgcacctctcccggcggcggcccccgccaagccactccgaggcccggcggccggcggcgcgcacctgtactgccccctgcggctgcccgcagccctgcaggcggcctcagtccgccgccctggcccgcacctgccgtacccggtggagacgctcctagcctgagtagcgccgcggggcccgggaacgccgagtgcgcgccgtcggggaggcgggaacgcgggcccgcgcgcggactttgcactttgaatccagaggaagatgaatttttaaaatctccatcaaacgtgccttaaagctaaagcattttgacaggagtatttaaacttagtccaggatattttcctttgtgttttataactttacagaggaccaaagcaattcttgttttagtttctttgcgaagcctgctcctccttcccttcataaggactttttttgtctttctttaacgcccaggcttcgtcttatttctactgtttttgtcgcaacttccattgatttatgtcccttccctcccccctaagtacatcagggaacctttccacactataaatgatatgactactgtttggggtttctgggcccccatccgtgtacgtatgtggcatttccaggtatgactgagtgtgagagacatgtcagaggctcttcagtgatttcttgctattgaccgatgcttcactgtgccaaaagagaaaaaaaatgttgggttttgtaattaaattatttatatatttttgaaacccgaattgaaaatgttgcaggcaacgggctacagctttattagtggttctctaactgtggtctccttgggccaagcaatttctttaaaggaaaagttgattatgtatgtggggtgccaggaccactgccttgaaagcaagtgtgatttttatttttaatattattttatttgtgtctgtgtacatattcatgtataaattttatgaaacccaagcatagtgcttattttttaataaaacaactgacttaacacattgtgaaaaaaaaaaaaaaaaaaaa

SEQ ID NO: 228053 - DNA, 2318 bp, Artificial Sequence
  derived and/or modified sequence
ctcaacgtcgaaccgaaggcgacacccacccaactcctccctctccgccccatagtccacccaacacttgcagcccctccagagaaaaagcccagcggaagaggactccggaaaagtgactatctcggaagaccagggtagagctcccgggagaaaaaggcgaagatccccggccccggatcgccatccccttccctggcaccagcttctctaggctgcgcgaaggaagagggtacgacgccggggagggactgggtgcgcgggcatgaagttggaggtgttcgtccctcgcgcggcccacggggacaagcagggcagtgacctggagggcgcgggcggcagcgacgcgccgtccccgctgtcggcggcgggagacgactccctgggctcagatggggactgcgcggccaacagcccggccgcgggcggcggcgccagagatacgcagggcgacggcgaacagagtgcgggaggcgggccgggcgcggaggaggcgatcccggcagcagctgctgcagcggtggtggcggagggcgcggaggccggggcggcggggccaggcgcgggcggcgcggggagcggcgagggtgcacgcagcaagccatatacgcggcggcccaagcccccctactcgtacatcgcgctcatcgccatggccatccgcgactcggcgggcgggcgcttgacgctggcggagatcaacgagtacctcatgggcaagttcccctttttccgcggcagctacacgggctggcgcaactccgtgcgccacaacctttcgctcaacgactgcttcgtcaaggtgctgcgcgacccctcgcggccctggggcaaggacaactactggatgctcaaccccaacagcgagtacaccttcgccgacggggtcttccgccgccgccgcaagcgcctcagccaccgcgcgccggtccccgcgcccgggctgcggcccgaggaggccccgggcctccccgccgccccgccgcccgcgcccgccgccccggcctcgccccgcatgcgctcgcccgcccgccaggaggagcgcgccagccccgcgggcaagttctccagctccttcgccatcgacagcatcctgcgcaagcccttccgcagccgccgcctcagggacacggcccccgggacgacgcttcagtggggcgccgcgccctgcccgccgctgcccgcgttccccgcgctcctccccgcggcgccctgcagggccctgctgccgctctgcgcgtacggcgcgggcgagccggcgcggctgggcgcgcgcgaggccgaggtgccaccgaccgcgccgcccctcctgcttgcacctctcccggcggcggcccccgccaagccactccgaggcccggcggccggcggcgcgcacctgtactgccccctgcggctgcccgcagccctgcaggcggcctcagtccgccgccctggcccgcacctgccgtacccggtggagacgctcctagcctgagtagcgccgcggggcccgggaacgccgagtgcgcgccgtcggggaggcgggaacgcgggcccgcgcgcggactttgcactttgaatccagaggaagatgaatttttaaaatctccatcaaacgtgccttaaagctaaagcattttgacaggagtatttaaacttagtccaggatattttcctttgtgttttataactttacagaggaccaaagcaattcttgttttagtttctttgcgaagcctgctcctccttcccttcataaggactttttttgtctttctttaacgcccaggcttcgtcttatttctactgtttttgtcgcaacttccattgatttatgtcccttccctcccccctaagtacatcagggaacctttccacactataaatgatatgactactgtttggggtttctgggcccccatccgtgtacgtatgtggcatttccaggtatgactgagtgtgagagacatgtcagaggctcttcagtgatttcttgctattgaccgatgcttcactgtgccaaaagagaaaaaaaatgttgggttttgtaattaaattatttatatatttttgaaacccgaattgaaaatgttgcaggcaacgggctacagctttattagtggttctctaactgtggtctccttgggccaagcaatttctttaaaggaaaagttgattatgtatgtggggtgccaggaccactgccttgaaagcaagtgtgatttttatttttaatattattttatttgtgtctgtgtacatattcatgtataaattttatgaaacccaagcatagtgcttattttttaataaaacaactgacttaacacattgtg

SEQ ID NO: 228054 - DNA, 1212 bp, Artificial Sequence
  derived and/or modified sequence
atgaaactcgaggtgttcgtgcccagagccgcgcatggagacaagcagggctctgacctggagggtgccggcggctccgatgcaccaagccccctgtctgcagctggggacgatagtcttggctctgatggggactgcgctgctaactctcctgccgctggcggaggcgcccgggacacccaaggcgacggagaacagtctgccgggggcgggcctggagccgaagaagcgattccagcggcagctgccgctgcggtcgtggcggagggtgctgaagcaggcgccgccggaccaggagccggaggggctggaagtggcgaaggagcgaggtctaagccctacacccgcagacccaagccaccctattcatatatcgctctgatcgccatggcaatccgggactcggctggtggcaggttgacactcgccgagattaacgagtatctgatgggtaagtttccttttttccgaggatcatacactggatggcgaaactccgttagacataacctgagcctgaatgactgctttgtcaaagtgctgagagatccgagccgaccttggggtaaagacaactactggatgctgaacccgaatagcgaatacacatttgcagatggggttttccgccgcagaaggaagcgactctcccacagggccccggtcccggcaccaggtctgagaccagaggaggctcccggattgcccgccgcaccaccacctgcccccgccgcaccagcatctcccagaatgcgtagccccgctcgtcaagaggaacgggcttccccagccggcaaattcagcagtagtttcgccatcgattcaatcctacggaaaccatttcgctcacggagactcagggacacagcacccgggactaccttgcagtggggtgcagccccctgtccccctttgcccgcctttcccgccctcctccctgctgctccttgcagggcccttctgcccctatgcgcatacggagccggggagcctgcgaggctcggggccagagaagccgaagtgcctcctactgcccctcccttgcttttagcccctctgcccgctgccgctcccgccaagcccctcaggggcccagccgctggtggcgctcatctctactgccccctccgtctccccgcggccctgcaagccgccagcgtgaggagaccagggccacacctgccttaccccgtggagaccctcctggcctag

SEQ ID NO: 228055 - DNA, 1212 bp, Artificial Sequence
  derived and/or modified sequence
atgaagctggaggtgtttgtgccccgggccgcccacggggacaagcagggcagtgacctggagggcgccggcggcagtgatgcccccagccccctgtctgctgctggagatgacagcctgggcagtgatggagactgtgccgccaacagccctgctgctgggggcggggcccgggacacccagggagatggagagcagagcgctgggggcggccctggagctgaggaggccatcccagctgctgctgctgctgctgtggtggccgagggcgctgaggccggggccgccggccctggggccggcggggccggcagcggggagggcgcccggagcaagccctacacccggcggcccaagccaccctacagctacatcgccctgattgccatggccatccgggacagcgctgggggccgcctgaccctggccgagatcaatgagtacctgatgggcaagttccccttcttccggggcagctacacaggctggaggaacagcgtgcgccacaacctgagcctgaatgactgctttgtgaaggtgctgcgggaccccagccggccctggggcaaggacaactactggatgctgaaccccaacagcgagtacacctttgctgatggagtcttcagaagaagaaggaagaggctgagccaccgggcccctgtgcctgcccctggcctgcggcctgaggaggcccctggcctgcctgctgcccctcctccagccccagctgccccagccagccccaggatgaggagccctgcccggcaggaggagcgggccagccctgctgggaagttcagcagcagctttgccatcgacagcatcctgaggaagcccttccgcagccggcggctgcgggacacagcccctggcaccaccctgcagtggggcgccgccccctgcccccccctgcctgccttccctgccctgctgcctgctgccccctgccgggccctgctgcccctgtgtgcctacggggccggggagcccgcccggctgggcgcccgggaggccgaggtgcccccaacagccccacccctgctgctggcccccctgcctgctgctgccccagccaagcccctgcggggccctgctgctggaggagcccacctgtactgccccctgcggctgcctgctgccctgcaggccgcctctgtgcggcggcccggcccccacctgccctaccctgtggagaccctgctggcctag

SEQ ID NO: 228056 - DNA, 1212 bp, Artificial Sequence
  derived and/or modified sequence
atgaagctggaggtgttcgtgccccgggccgcccacggcgacaagcagggctctgatctcgaaggagcagggggaagcgacgcgccaagtcccttaagcgctgctggggacgattctctgggctctgatggcgattgcgcggccaactctcccgccgcggggggaggcgcccgtgatacacagggggacggtgagcagtcagcgggtggcgggccgggggcagaggaagccataccagccgctgcagctgctgctgtggtagccgagggggcagaggcgggagccgccggccccggcgctggaggagccggaagcggggagggcgcccggtctaagccctacactcgccggccaaaacctccgtacagctatatcgccctgatagctatggccatcagggatagcgcaggaggtagattgactctcgctgaaattaatgagtacctgatgggaaagtttcctttctttcggggcagttacacaggctggagaaatagcgtacgacataatttgagtcttaatgactgtttcgtgaaggtgttgcgggacccatcccggccatggggcaaagacaactactggatgctgaatcctaattccgaatacactttcgccgatggtgtcttccgccggagacgcaagcgcctgtcccatcgggcacccgtgcctgcgcctggtctccgacccgaagaggcaccaggcctgccagcggccccccccccagcaccagccgcgccggcctctccaagaatgcgctcacctgcccgacaggaagagagagcctctcccgccggaaagttctctagttcctttgctattgacagtatccttagaaagccctttcgatccagacggttgagagacaccgcgcctggcacgaccctccagtggggagctgcaccttgcccccccctccccgcatttccagctctcctgcctgcggcaccctgtcgcgcactgttacctttgtgtgcgtatggtgcgggggagcccgcccggctgggcgcccgggaggcagaagtgccccccactgcacccccattactgttagcccctctgcctgcagcggctcctgccaagccgctaagggggcccgccgccggcggcgcgcacctttactgcccacttcgtcttccagccgctttgcaggcagccagtgtgaggcgacccggcccccatctcccttatcctgtggagactctactggcctag

SEQ ID NO: 228057 - DNA, 1212 bp, Artificial Sequence
  derived and/or modified sequence
atgaagttggaagtattcgtgccccgtgccgctcacggggacaaacagggttctgacctggaaggggctgggggttctgacgcacctagcccgctgtctgcggctggggatgacagtctggggtcagacggagactgtgctgctaatagtcccgcagctggtggcggtgccagagacactcagggagatggagagcagtcggcagggggtggaccaggagccgaagaggctatccctgccgctgccgctgctgctgtcgttgctgaaggagccgaggccggtgccgctgggccaggagctgggggagccggaagtggcgaaggagctcggagcaagccttatacacggaggccaaaaccaccttacagctatatcgctctgattgctatggcaatcagagatagcgcaggcggacggttgaccctcgccgaaattaacgagtatctaatgggaaaattccctttcttccgaggcagctataccgggtggaggaatagtgtccgccataacctttcgctaaatgactgtttcgtgaaagtgctgagagatcctagccggccatgggggaaggataattattggatgctgaatcccaactccgagtatacctttgcagatggcgtgttcagacggcgtaggaaacgcttgagccatcgcgcacctgttcctgctcccggactccgcccagaagaggcccctggcttacccgcagcacctcccccagcgcctgccgctccggctagccctagaatgaggtcccctgcgcgtcaggaagaaagggcgagtcctgccggtaagtttagtagctcgttcgctatcgacagcattctgcgaaagcctttcaggagcaggcgtctgcgggataccgcccctggcaccacattgcagtggggcgctgctccatgtcctccattgcccgcttttccagcactgctgcccgctgctccctgtcgtgccctgttgcccctatgcgcctatggagccggtgagcctgccaggctgggggctcgagaagccgaagtgcctcctaccgctcctcctttactccttgctccacttccagcagccgcaccagccaagccgctgcggggacctgctgcaggcggagcccatctgtactgccccctaaggttacctgccgcacttcaggccgcatcagttagaaggccgggacctcatttaccctacccagtcgaaaccctgctagcctag

SEQ ID NO: 228058 - DNA, 1212 bp, Artificial Sequence
  derived and/or modified sequence
atgaagctggaggtgttcgtgcccagagccgcccacggcgacaagcagggcagcgacctggagggcgccggcggcagcgacgcccccagccccctgagcgccgccggcgacgacagcctgggcagcgacggcgactgcgccgccaacagccccgccgccggcggcggcgccagagacacccagggcgacggcgagcagagcgccggcggcggccccggcgccgaggaggccatccccgccgccgccgccgccgccgtggtggccgagggcgccgaggccggcgccgccggccccggcgccggcggcgccggcagcggcgagggcgccagaagcaagccctacaccagaagacccaagcccccctacagctacatcgccctgatcgccatggccatcagagacagcgccggcggcagactgaccctggccgagatcaacgagtacctgatgggcaagttccccttcttcagaggcagctacaccggctggagaaacagcgtgagacacaacctgagcctgaacgactgcttcgtgaaggtgctgagagaccccagcagaccctggggcaaggacaactactggatgctgaaccccaacagcgagtacaccttcgccgacggcgtgttcagaagaagaagaaagagactgagccacagagcccccgtgcccgcccccggcctgagacccgaggaggcccccggcctgcccgccgcccccccccccgcccccgccgcccccgccagccccagaatgagaagccccgccagacaggaggagagagccagccccgccggcaagttcagcagcagcttcgccatcgacagcatcctgagaaagcccttcagaagcagaagactgagagacaccgcccccggcaccaccctgcagtggggcgccgccccctgcccccccctgcccgccttccccgccctgctgcccgccgccccctgcagagccctgctgcccctgtgcgcctacggcgccggcgagcccgccagactgggcgccagagaggccgaggtgccccccaccgccccccccctgctgctggcccccctgcccgccgccgcccccgccaagcccctgagaggccccgccgccggcggcgcccacctgtactgccccctgagactgcccgccgccctgcaggccgccagcgtgagaagacccggcccccacctgccctaccccgtggagaccctgctggcctag

SEQ ID NO: 228059 - protein, 925 aa, Artificial Sequence
  derived and/or modified sequence
MAWLRLQPLTSAFLHFGLVTFVLFLNGLRAEAGGSGDVPSTGQNNESCSGSSDCKEGVILPIWYPENPSLGDKIARVIVYFVALIYMFLGVSIIADRFMASIEVITSQEREVTIKKPNGETSTTTIRVWNETVSNLTLMALGSSAPEILLSLIEVCGHGFIAGDLGPSTIVGSAAFNMFIIIGICVYVIPDGETRKIKHLRVFFITAAWSIFAYIWLYMILAVFSPGVVQVWEGLLTLFFFPVCVLLAWVADKRLLFYKYMHKKYRTDKHRGIIIETEGDHPKGIEMDGKMMNSHFLDGNLVPLEGKEVDESRREMIRILKDLKQKHPEKDLDQLVEMANYYALSHQQKSRAFYRIQATRMMTGAGNILKKHAAEQAKKASSMSEVHTDEPEDFISKVFFDPCSYQCLENCGAVLLTVVRKGGDMSKTMYVDYKTEDGSANAGADYEFTEGTVVLKPGETQKEFSVGIIDDDIFEEDEHFFVRLSNVRIEEEQPEEGMPPAIFNSLPLPRAVLASPCVATVTILDDDHAGIFTFECDTIHVSESIGVMEVKVLRTSGARGTVIVPFRTVEGTAKGGGEDFEDTYGELEFKNDETVKTIHIKVIDDEAYEKNKNYFIEMMGPRMVDMSFQKALLLSPDRKLTMEEEEAKRIAEMGKPVLGEHPKLEVIIEESYEFKTTVDKLIKKTNLALVVGTHSWRDQFMEAITVSAAGDEDEDESGEERLPSCFDYVMHFLTVFWKVLFACVPPTEYCHGWACFAVSILIIGMLTAIIGDLASHFGCTIGLKDSVTAVVFVAFGTSVPDTFASKAAALQDVYADASIGNVTGSNAVNVFLGIGLAWSVAAIYWALQGQEFHVSAGTLAFSVTLFTIFAFVCISVLLYRRRPHLGGELGGPRGCKLATTWLFVSLWLLYILFATLEAYCYIKGF

SEQ ID NO: 228060 - DNA, 2778 bp, Artificial Sequence
  derived and/or modified sequence
atggcctggctgagactgcagcccctgaccagcgccttcctgcacttcggcctggtgaccttcgtgctgttcctgaacggcctgagagccgaggccggcggcagcggcgacgtgcccagcaccggccagaacaacgagagctgcagcggcagcagcgactgcaaggagggcgtgatcctgcccatctggtaccccgagaaccccagcctgggcgacaagatcgccagagtgatcgtgtacttcgtggccctgatctacatgttcctgggcgtgagcatcatcgccgacagattcatggccagcatcgaggtgatcaccagccaggagagagaggtgaccatcaagaagcccaacggcgagaccagcaccaccaccatcagagtgtggaacgagaccgtgagcaacctgaccctgatggccctgggcagcagcgcccccgagatcctgctgagcctgatcgaggtgtgcggccacggcttcatcgccggcgacctgggccccagcaccatcgtgggcagcgccgccttcaacatgttcatcatcatcggcatctgcgtgtacgtgatccccgacggcgagaccagaaagatcaagcacctgagagtgttcttcatcaccgccgcctggagcatcttcgcctacatctggctgtacatgatcctggccgtgttcagccccggcgtggtgcaggtgtgggagggcctgctgaccctgttcttcttccccgtgtgcgtgctgctggcctgggtggccgacaagagactgctgttctacaagtacatgcacaagaagtacagaaccgacaagcacagaggcatcatcatcgagaccgagggcgaccaccccaagggcatcgagatggacggcaagatgatgaacagccacttcctggacggcaacctggtgcccctggagggcaaggaggtggacgagagcagaagagagatgatcagaatcctgaaggacctgaagcagaagcaccccgagaaggacctggaccagctggtggagatggccaactactacgccctgagccaccagcagaagagcagagccttctacagaatccaggccaccagaatgatgaccggcgccggcaacatcctgaagaagcacgccgccgagcaggccaagaaggccagcagcatgagcgaggtgcacaccgacgagcccgaggacttcatcagcaaggtgttcttcgacccctgcagctaccagtgcctggagaactgcggcgccgtgctgctgaccgtggtgagaaagggcggcgacatgagcaagaccatgtacgtggactacaagaccgaggacggcagcgccaacgccggcgccgactacgagttcaccgagggcaccgtggtgctgaagcccggcgagacccagaaggagttcagcgtgggcatcatcgacgacgacatcttcgaggaggacgagcacttcttcgtgagactgagcaacgtgagaatcgaggaggagcagcccgaggagggcatgccccccgccatcttcaacagcctgcccctgcccagagccgtgctggccagcccctgcgtggccaccgtgaccatcctggacgacgaccacgccggcatcttcaccttcgagtgcgacaccatccacgtgagcgagagcatcggcgtgatggaggtgaaggtgctgagaaccagcggcgccagaggcaccgtgatcgtgcccttcagaaccgtggagggcaccgccaagggcggcggcgaggacttcgaggacacctacggcgagctggagttcaagaacgacgagaccgtgaagaccatccacatcaaggtgatcgacgacgaggcctacgagaagaacaagaactacttcatcgagatgatgggccccagaatggtggacatgagcttccagaaggccctgctgctgagccccgacagaaagctgaccatggaggaggaggaggccaagagaatcgccgagatgggcaagcccgtgctgggcgagcaccccaagctggaggtgatcatcgaggagagctacgagttcaagaccaccgtggacaagctgatcaagaagaccaacctggccctggtggtgggcacccacagctggagagaccagttcatggaggccatcaccgtgagcgccgccggcgacgaggacgaggacgagagcggcgaggagagactgcccagctgcttcgactacgtgatgcacttcctgaccgtgttctggaaggtgctgttcgcctgcgtgccccccaccgagtactgccacggctgggcctgcttcgccgtgagcatcctgatcatcggcatgctgaccgccatcatcggcgacctggccagccacttcggctgcaccatcggcctgaaggacagcgtgaccgccgtggtgttcgtggccttcggcaccagcgtgcccgacaccttcgccagcaaggccgccgccctgcaggacgtgtacgccgacgccagcatcggcaacgtgaccggcagcaacgccgtgaacgtgttcctgggcatcggcctggcctggagcgtggccgccatctactgggccctgcagggccaggagttccacgtgagcgccggcaccctggccttcagcgtgaccctgttcaccatcttcgccttcgtgtgcatcagcgtgctgctgtacagaagaagaccccacctgggcggcgagctgggcggccccagaggctgcaagctggccaccacctggctgttcgtgagcctgtggctgctgtacatcctgttcgccaccctggaggcctactgctacatcaagggcttctag

SEQ ID NO: 228061 - DNA, 2778 bp, Artificial Sequence
  derived and/or modified sequence
atggcttggctgcggctacagcctcttactagcgcatttcttcactttgggttggtgacctttgtactgttccttaatggcctccgggccgaggccggcgggtcgggggatgtcccctccaccggacagaacaatgaatcatgctctgggtccagtgactgcaaggagggcgtaatcctgcctatttggtatcccgaaaatccttctctgggagacaaaatcgccagagttattgtttactttgttgcgctaatctacatgttcctcggggtctctatcattgccgatagattcatggcttcgattgaagtgattaccagccaggagagggaggttaccatcaagaagcccaacggggaaacctccacaacgacaatcagagtctggaacgaaaccgtctccaacctgacattgatggcgttgggctcctcagcccctgaaatcttactcagcctgatagaagtatgcggccatggcttcattgcaggcgatttggggccctcgactattgtggggtccgcagcgttcaatatgtttatcattatcgggatctgtgtgtacgtgattccagacggcgaaacgcggaaaattaaacacctgcgggtgttctttattacagccgcctggtcgatcttcgcctacatatggctatatatgatcctcgccgttttcagccctggtgtggtgcaagtttgggaaggcttgctcaccttgtttttcttccctgtgtgcgtgctgttagcttgggtcgcagacaagcgcctcctgttttataaatatatgcacaaaaaataccgcactgataaacatagagggatcatcatagagacagaaggcgatcatccaaaaggaatcgaaatggacggaaagatgatgaactcacactttttagatggtaatctcgttccgcttgaaggaaaggaggtggatgaatcacgccgcgagatgatccgtatcctcaaagaccttaagcaaaagcatcctgaaaaggatctcgaccagctcgtggagatggccaattactatgcgcttagtcatcagcagaagagccgtgctttctacaggatccaggccactagaatgatgaccggtgccggtaatattcttaagaaacacgctgccgagcaggccaaaaaggcttcatccatgtctgaagtccacacagatgaacctgaagatttcatctcaaaggtctttttcgacccatgttcctatcagtgcctagaaaactgtggcgccgtgctgctaaccgtggtccgaaagggcggcgacatgagcaaaacgatgtatgtcgactacaaaacggaagatggtagtgccaatgcaggagcagactacgaatttacggagggcactgttgtcttaaaacctggagaaactcagaaggagttcagtgtgggcattatcgacgacgacatttttgaggaagatgaacacttttttgtccggctgagtaatgttcgcattgaggaagagcagccagaggagggtatgccccctgcgattttcaactcgctgcccttacctagggcagtgttggcctccccttgtgtggccacagtgaccatactggacgacgaccacgcaggtatcttcacatttgaatgcgacactatacacgtgagcgagtcgatcggcgtgatggaggtgaaagttttgaggaccagcggcgcaaggggcaccgtgattgttccctttcgaacagttgagggaactgccaaaggaggcggagaggacttcgaagacacctacggagagctggaatttaaaaacgacgagacagtgaagacaattcacatcaaagtgatcgatgacgaggcatacgagaagaataagaattacttcattgaaatgatgggcccacgtatggtagatatgagtttccaaaaagcactcctcctcagcccagaccgcaagttaaccatggaggaagaggaagccaagcgcatagccgaaatggggaaaccagtgctgggagagcaccccaaactcgaagtgattatcgaggagagttatgagtttaagactacggttgataaactgatcaaaaagactaatctggcgctggtggtcgggacccattcttggcgcgaccagttcatggaagctatcacagtgtccgccgccggggacgaggatgaagatgagagtggggaggagcgccttcccagctgttttgactatgtcatgcacttcttgactgtgttctggaaagttctgttcgcgtgcgtacctcccactgagtattgccacgggtgggcctgtttcgcggtcagtattcttatcataggtatgttgaccgcaatcataggtgaccttgccagccacttcggttgtacaatcggcctgaaggattccgtaacagcggtcgtgtttgtggccttcggtacatccgttcccgatacttttgcctctaaagctgcagccttgcaggatgtgtatgccgatgccagcataggaaacgtcactggctctaatgccgtgaatgtgtttctgggcatcggtttggcctggagcgttgccgccatctattgggcgttgcagggacaggaatttcatgtatccgccgggactctagccttctccgttacactcttcacaatctttgctttcgtgtgcataagcgttctcctgtataggcgccgtcctcatctcggaggggagctcggtggaccccggggctgcaagttggctaccacatggctgtttgttagcttgtggctcctttatattctattcgctaccctggaggcgtactgctatataaaagggttctag

SEQ ID NO: 228062 - DNA, 2778 bp, Artificial Sequence
  derived and/or modified sequence
atggcatggttgcgccttcagccactgactagcgctttcctgcatttcggactggtgacgtttgtgctctttttgaacggcctgcgtgccgaagcaggtggctctggcgacgttcctagtacaggccagaacaacgaatcttgctctggctcctctgactgtaaagagggagtaatcttacccatctggtaccccgaaaatccatcgctgggggacaagatcgccagggtcattgtgtattttgtcgcgcttatatacatgttcttgggagtatctattatagccgacaggttcatggcctccatagaagtgatcactagccaagagcgggaggttactatcaaaaagcccaatggtgaaacttctactactactattagagtttggaacgagaccgtcagcaatttaacactaatggccttgggatctagcgcccctgaaattctgctttcattgatcgaggtgtgtggacacggcttcattgccggtgatttaggcccctccacaatcgtggggagcgctgcatttaacatgtttatcatcattggaatttgcgtgtacgtgattcctgatggagagactcggaagatcaaacatctgagagttttttttattaccgctgcttggagcatcttcgcgtacatttggctatacatgatcttggcggtgtttagcccaggggtggtacaagtctgggaaggcttgctcacactcttcttcttccccgtgtgcgtgttacttgcttgggtggccgacaaacggctcctgttctacaagtacatgcacaaaaaatatcggaccgacaagcatcgagggatcataattgaaactgaaggggatcatccaaagggtattgagatggacgggaagatgatgaactcccattttctggatggcaatctggtgcctctggaaggcaaagaagtcgacgaatccagacgggagatgattagaattctgaaagacttgaagcagaagcacccagagaaggacctggaccagctcgttgagatggccaattattacgccctgtcacatcagcagaaatcgcgagccttttacaggattcaggccacaaggatgatgacaggggccggaaatatcctgaaaaagcacgcagcggagcaggcgaaaaaggcgtcctcaatgagtgaagtgcataccgacgagcctgaagacttcataagcaaggtcttctttgacccctgttcctatcaatgtctggaaaactgcggggctgtcctccttacagttgtgaggaaggggggagacatgtcaaagaccatgtatgtggattataagacagaagacggcagcgctaacgcaggtgcagactacgaattcaccgaaggcaccgtcgtacttaaacctggcgagacccagaaagagttctccgtgggcattatagacgatgacatatttgaggaagatgagcattttttcgttagactgagcaacgtgagaatagaggaggagcagccagaagaaggcatgcctcccgcaatctttaatagccttcctcttcctagggccgtgcttgcctccccctgcgtcgccaccgtcacaatcttagatgatgatcacgcagggatatttacttttgagtgtgatacgatccatgtaagcgagagcatcggggtgatggaggtgaaagtgctgagaacaagtggggccagaggcacagtcattgtgcccttcagaaccgttgaaggcaccgctaaagggggtggagaggatttcgaggacacctatggcgagttagaattcaagaacgatgagacggtgaagactattcacattaaagtgatagatgacgaagcttacgaaaagaacaagaattatttcatcgaaatgatgggtcccaggatggtagacatgtccttccagaaggccctattgttaagcccagacagaaaacttacgatggaggaggaggaggctaagagaatcgctgaaatggggaagcctgtgctaggggaacaccctaagcttgaagtgattatcgaagagagctatgaattcaagactacagtcgataaactcatcaaaaaaacaaatctcgccttggtcgtagggactcattcctggagggatcagttcatggaagccatcaccgtttccgcggctggtgacgaggacgaggacgagagtggtgaggagcgtctgccgagctgtttcgattacgtcatgcattttctgacagttttttggaaggttctgtttgcttgtgtaccccctacagaatactgccacgggtgggcgtgtttcgccgtgagtattctgatcataggcatgttgaccgccataattggcgatctagcctcacacttcggatgcacaatcgggcttaaggacagcgtcaccgccgtcgtgttcgtggcattcggcacaagtgtacccgacacctttgcttctaaagccgctgccctgcaggatgtgtacgcagatgcgtcaattggaaatgttaccggctctaacgctgtgaatgtgttcctaggaatcggcttagcctggtccgtggctgccatttattgggccctccagggacaggagtttcatgtttctgcaggtaccctcgctttttcggtgacactgttcacaatctttgcattcgtctgcatatctgtgcttctgtacaggcggcgtcctcacctagggggcgaacttggcggaccccgcggctgcaaactggcgactacctggctgtttgtgtccctctggctactgtacatcctgttcgctacacttgaagcttactgttacatcaagggcttttag

SEQ ID NO: 228063 - DNA, 2778 bp, Artificial Sequence
  derived and/or modified sequence
atggcctggctgcggctgcagcccctgaccagcgccttcctgcacttcggcctggtgacctttgtgctcttcctgaatggcctgcgggcagaggccggcggcagcggagatgtgcccagcacaggccagaacaatgaaagctgcagcggcagcagtgactgcaaggagggcgtcatcctgcccatctggtacccagagaaccccagcctgggggacaagatcgcccgggtcatcgtgtactttgtggccctgatctacatgttcctgggcgtgtccatcatcgctgaccgcttcatggccagcattgaggtgatcaccagccaggagcgggaggtgaccatcaagaagcccaacggggagaccagcaccaccaccatccgggtgtggaatgagaccgtgagcaacctgaccctgatggccctgggcagcagcgcccctgagatcctgctgagcctgattgaggtgtgtggccacggcttcatcgccggggacctgggccccagcaccatcgtgggcagcgctgccttcaacatgttcatcatcatcggcatctgtgtgtatgtgatcccagatggagagaccaggaagatcaagcacctgcgggtcttcttcatcacagctgcctggagcatctttgcctacatctggctgtacatgatcctggccgtgttcagccctggggtggtgcaggtgtgggagggcctgctgaccctcttcttcttccctgtgtgtgtgctgctggcctgggtggccgacaagaggctgctcttctacaagtacatgcacaagaagtacagaacagacaagcaccggggcatcatcattgaaacagaaggagaccaccccaagggcatcgagatggatggcaagatgatgaacagccacttcctggatggcaacctggtgcccctggagggcaaggaggtggatgagagcagaagagagatgatccgcatcctgaaggacctgaagcagaagcaccctgagaaggacctggaccagctggtggagatggccaactactatgccctgagccaccagcagaagagccgggccttctaccgcatccaggccaccaggatgatgactggagctggcaacatcctgaagaagcatgctgctgagcaggccaagaaggccagctccatgtctgaggtgcacacagatgagcctgaggacttcatcagcaaggtgttctttgacccctgcagctaccagtgcctggagaactgtggggctgtgctgctgactgtggtgaggaaaggaggagacatgagcaagaccatgtatgtggactacaagacagaagatggcagcgccaatgctggagctgactatgagttcacagagggcaccgtggtgctgaagccaggagagacccagaaggagttctctgtgggcatcattgatgatgacatctttgaggaggatgagcacttctttgtgcggctgagcaatgtgagaattgaggaggagcagcctgaggagggcatgcccccagccatcttcaacagcctgcccctgcccagggctgtgctggccagcccctgtgtggccaccgtgaccatcctggatgatgaccatgctggcatcttcacctttgaatgtgacaccatccacgtgtctgagagcattggagtgatggaggtgaaggtgctgcggaccagcggggcccggggcaccgtgattgtgcccttcagaacagtggagggcacagccaagggcggcggggaggactttgaggacacctacggggagctggagttcaagaatgatgagaccgtgaagaccatccacatcaaggtgattgatgatgaggcctatgagaagaacaagaactacttcatcgagatgatgggccccaggatggtggacatgtccttccagaaggccctgctgctgagcccagacaggaagctgaccatggaggaggaggaggccaagagaattgctgagatgggcaagcctgtgctgggggagcaccccaagctggaggtgatcatcgaggagagctatgagttcaagaccaccgtggacaagctgatcaagaagaccaacctggccctggtggtgggcacccacagctggagggaccagttcatggaggccatcaccgtgtctgctgctggagatgaagatgaagatgaaagtggagaggagcggctgcccagctgctttgattatgtgatgcacttcctgaccgtcttctggaaggtgctgtttgcctgtgtgcccccaacagagtactgccacggctgggcctgctttgctgtgtccatcctgatcatcggcatgctgacagccatcatcggggacctggccagccacttcggctgcaccatcggcctgaaggacagcgtgacagctgtggtgtttgtggccttcggcacctctgtgcctgacacctttgccagcaaggccgccgccctgcaggatgtgtatgcagatgccagcattggaaatgtgacaggcagcaatgctgtgaatgtgttcctgggcatcggcctggcctggagcgtggccgccatctactgggccctgcagggccaggagttccacgtgtctgctggcaccctggccttctctgtgaccctcttcaccatctttgcctttgtgtgcatctctgtgctgctgtacagaagaagaccccacctgggcggggagctgggcggcccccggggctgcaagctggccaccacctggctgtttgtgtccctgtggctgctgtacatcctgtttgccaccctggaggcctactgctacatcaagggcttctag

SEQ ID NO: 228064 - DNA, 2778 bp, Artificial Sequence
  derived and/or modified sequence
atggcctggctgcggctgcagcccctgaccagcgccttcctgcactttgggttagtaacgttcgtgctgtttcttaatggacttcgcgccgaagcgggaggctctggggacgtacctagcacagggcagaacaatgagagctgctcggggagcagcgattgcaaggaaggagtgatactgcctatatggtatcccgagaaccctagcttaggcgacaaaattgccagagtgattgtatacttcgtagcccttatttacatgttcctgggtgttagcattattgccgacagattcatggcttccatcgaggtgataacctcacaggaacgggaggtgacgattaagaagcccaacggcgaaactagtactacaacgattagagtatggaatgagacagttagcaacctcactctgatggcactaggatcgtccgccccagagatcctcctttctttaatagaagtgtgtggacacggattcattgccggagatctgggcccatcaacgattgtgggatccgccgcctttaatatgtttataatcattggcatatgcgtgtatgtaatccccgacggcgaaacaaggaaaatcaagcacctccgggtgttttttattaccgcagcctggtccattttcgcttatatttggctttacatgatccttgccgtgttcagccccggtgtggtgcaggtctgggaaggactcctgacgctcttctttttcccggtgtgcgtgcttctcgcgtgggtcgctgacaagagactgttgttctataagtacatgcacaaaaagtaccgtaccgacaaacaccgcgggatcattattgaaacagagggtgatcaccctaaaggcatcgaaatggatggcaagatgatgaatagccatttcctagacggcaatctggtcccactcgagggtaaggaagttgacgaaagccgcagggaaatgatcaggattctgaaagacttgaaacaaaaacaccctgaaaaggatctggaccagctggtggaaatggccaactattacgcgctctctcaccagcaaaagtcaagagcattttatcgcatccaggccactagaatgatgacaggcgctgggaacattctcaagaagcacgcagccgagcaagccaagaaagcttcatccatgagcgaagtgcataccgacgaacccgaagacttcattagcaaagtgttttttgatccctgtagctaccagtgcctcgaaaattgcggcgctgtactactgacagtcgtacggaaaggcggggatatgtccaaaacaatgtacgtggactataaaacagaggatggcagcgccaacgctggagccgattatgaattcaccgaagggactgtagtgctgaagcccggagagacccaaaaagagttttccgtggggataattgacgatgacatatttgaggaggatgaacatttcttcgtccgactcagcaacgttaggattgaagaggaacagcccgaagagggaatgcctcctgcaatatttaattcccttcctttgccacgcgccgtacttgccagtccttgcgtggccaccgtaacgattctggacgatgatcacgcgggtatattcacctttgaatgtgacacaatccatgttagcgaatcaatcggcgtgatggaagtcaaagtgttgcgtaccagtggagctagagggactgttatcgtccctttccgtacagtggaggggacagctaagggaggcggggaagatttcgaggatacctacggtgagcttgagtttaaaaacgatgaaacggttaagaccatccacatcaaagtgattgacgatgaagcctacgagaagaataaaaattatttcattgaaatgatgggcccccgcatggtagatatgagctttcagaaggctttactgctgagtcccgacagaaaactgacaatggaagaggaagaggcaaaacgcattgctgagatggggaaacccgtgcttggggagcatccaaaactggaagtgatcatagaagaaagctacgaattcaagactaccgtggataaacttattaagaagacaaatctcgcactagtcgtcggaacacactcttggcgagatcagtttatggaggccatcaccgtgagcgcggctggggacgaagatgaggatgagtccggcgaagaacgattgccgtcgtgtttcgattacgtaatgcacttcctcacggtgttctggaaggttctgtttgcctgcgtcccacccacggaatactgtcatggatgggcgtgttttgccgtcagtatcctgatcatcgggatgttgacagccatcatcggcgacctggcttcccactttggctgtacaattggtctaaaagactctgtgacagctgtggtctttgtggcctttggcacaagcgtccccgacacctttgccagtaaagcagcagccctgcaggacgtgtacgcagacgcatccattgggaacgtgaccggctccaacgctgtgaatgtttttttaggtatcggattggcctggagcgtagccgcaatttactgggccctgcaaggtcaggaattccacgtctctgccgggacattggctttctccgttaccctgtttacaattttcgcctttgtctgcatctctgtgctactgtatagacggcgcccccacctcgggggggaattggggggccctagggggtgtaagttggccaccacttggcttttcgtgtcactctggctcctttatatattgtttgccacacttgaggcgtactgttatataaaaggtttttag

SEQ ID NO: 228065 - DNA, 2778 bp, Artificial Sequence
  derived and/or modified sequence
atggcctggctgcggctgcagcccctgaccagcgccttcctgcacttcgggctcgttacattcgtgctgtttctgaatgggttgcgtgcagaggcaggcgggtccggggacgtgcccagtaccgggcagaacaacgagagttgtagcggcagcagtgattgcaaggaaggtgttatcctacccatctggtatcccgaaaacccatctctgggcgataaaatcgctcgggtaatcgtgtactttgtcgccctaatatacatgttcctcggcgtctctatcatcgcggatagattcatggctagcattgaagtgattactagtcaagagcgggaagtgacaataaagaaacctaacggagaaacctcaacaacaacaattcgagtgtggaatgaaactgtgagtaacctgacacttatggctctcgggagctcggctcccgagatcttactaagcctcatagaggtgtgcgggcacggctttatagccggggatttggggccttctacaattgtcggcagcgctgctttcaacatgttcataattatcgggatctgtgtctacgtcatccctgatggagagacccgcaaaataaagcaccttagggtcttcttcattacggctgcgtggagtatttttgcctacatctggttatatatgatactggcagtgttctctcctggtgttgtgcaggtatgggagggcctgttaacgttgttttttttccctgtgtgtgtgctcctcgcttgggtggccgacaagagactgctgttttataaatacatgcacaaaaagtaccggactgacaagcataggggcattattattgaaactgaaggcgatcaccctaaaggtatcgaaatggacggcaaaatgatgaatagtcactttctggatggaaacctggtgcccttagaaggaaaggaagtggatgagtccagacgagagatgattagaatcttgaaggacctgaaacagaagcacccagagaaggacttggatcagttagtggaaatggccaactattatgccctaagtcaccagcagaaatctagagccttttaccgcatccaggcgactcgaatgatgacaggggcggggaatatactgaagaaacatgccgccgaacaggccaagaaggcatcaagtatgtctgaagtccataccgatgaacctgaggactttatttcaaaagtgttcttcgacccgtgtagttaccagtgcctcgagaattgtggggcagtcctgctgaccgtggtccgcaaggggggggacatgtctaaaacgatgtatgtggactataagactgaggacggatccgcaaacgcaggcgccgattatgaattcaccgaaggcacggtagttctgaagcccggagaaacgcagaaggagttttctgtgggcatcattgatgacgatatctttgaggaggacgaacatttcttcgtgcggctgtccaacgtgagaattgaagaggaacagccagaggagggaatgcctcccgccatctttaattcgttaccactgcctagagcggtactggctagcccttgcgtagcaaccgtcaccattcttgatgatgaccatgccggaatctttacttttgagtgtgatactatccatgtctccgagtctatcggcgtcatggaggtcaaggtcctgaggacttctggagccaggggcaccgtcattgtccccttcagaaccgtggagggcactgccaagggaggcggagaagatttcgaagacacatatggcgagctggagttcaagaacgacgagaccgttaagactatccacatcaaggtgattgacgatgaggcatacgagaagaacaagaattattttattgagatgatgggtccaagaatggtggacatgtccttccaaaaagccttactgctgtcccctgatcgcaaactcaccatggaagaggaagaggccaaaagaatcgctgaaatgggaaaacccgtgttgggcgagcaccccaagctcgaagtcatcattgaggaatcatatgagttcaaaactactgttgacaagttaattaagaaaacaaatttagcactggtggtaggtacccatagctggagagatcagttcatggaggccattacggtgtcagctgctggggacgaggatgaggacgaatccggagaggaacgcctgcccagctgtttcgattatgttatgcacttcctgaccgtcttttggaaagttctgttcgcatgtgtgcctccgacagagtattgtcacgggtgggcatgtttcgcggtgtccattctgattataggaatgcttactgctatcataggggacctggctagtcattttgggtgcacaatcggcctcaaggattccgtcacggctgtagtgtttgtcgccttcgggactagtgttccagacacgttcgccagtaaggcagcagccctgcaggacgtgtatgcagatgcctctattgggaatgttactgggtccaatgctgtcaatgtgtttctcggtataggactggcctggtctgtggccgctatttattgggccctgcaagggcaggagtttcatgtatcagcaggtacccttgccttctctgtgactctcttcaccatcttcgcgtttgtatgtatatctgtcttgttgtaccggcgacgacctcaccttggaggggaattagggggtccacgcggctgcaaacttgcaacaacatggttgtttgtgtccttatggctcctgtatatactctttgctacgcttgaagcctactgctacattaaaggcttctag

SEQ ID NO: 228066 - DNA, 2778 bp, Artificial Sequence
  derived and/or modified sequence
atggcctggctgcggctccaacctttaaccagcgcttttctgcacttcgggttggtaacttttgtgctgttcctgaatggcctgcgagcggaggctggaggatccggagacgtgccttcaacgggccaaaacaatgagtcctgctctggaagctcagattgtaaagagggcgtgatcctgcctatatggtacccggagaacccaagccttggtgataaaattgctcgggtgattgtgtatttcgtcgccttgatttacatgttcctgggggtgtcaattattgccgatcgttttatggcctccattgaagtcatcacctcccaagagagggaggttacgatcaaaaaacctaatggtgaaacttcaacaaccaccatcagagtctggaacgaaaccgtgtcaaacttaacccttatggccctgggcagctctgccccagagattctcttgtcgctgatagaggtgtgcggccatggctttattgccggtgatctgggcccaagtactattgtaggctctgccgcttttaacatgttcatcattatcggcatctgcgtgtatgttataccagacggggaaacacgcaaaatcaagcacctgagagttttctttatcaccgccgcttggagcatcttcgcctatatttggctatatatgattcttgccgtattctctccgggagtggtgcaggtatgggaaggcctgctgacactatttttctttcccgtgtgtgtgcttctggcctgggtcgcggataagcgcctactgttctacaagtacatgcacaagaagtaccgcaccgacaaacaccggggtattatcatagagaccgaaggagatcaccccaaaggtatcgagatggatggaaagatgatgaatagccacttcctagacgggaatttggtgcctcttgaaggcaaagaagtcgatgagtctcggagagagatgattcgcattctcaaagatttgaagcagaaacatcctgaaaaggatttggatcagctggtcgaaatggccaattattatgcgttgtcacatcagcagaaatccagagctttttatcgcatacaagccacccgcatgatgacgggggcaggaaacatcctgaaaaaacatgctgctgaacaggccaagaaagcatcctctatgagcgaagttcacacagatgaaccagaggatttcatcagtaaagtgttcttcgatccctgcagttaccaatgtctggaaaattgtggtgcagtgctcctcaccgtagttcggaagggaggtgacatgagcaagactatgtatgtagattataaaacagaggacggcagcgctaacgccggtgccgactatgagtttacagaaggcaccgtagtgcttaagccaggggaaactcagaaggaattctccgtgggaatcattgacgatgatatctttgaagaggatgaacatttcttcgtaaggctctccaatgttcgaatagaagaggagcagcccgaagaaggtatgcctccagcgatctttaactccctgcctctgccaagggccgttctcgccagtccctgtgtggctacagtaactatcctcgacgacgaccatgctggcattttcacatttgagtgtgacaccatacatgttagcgaaagcataggtgtgatggaggtaaaagtgttgcgaacgtctggagcgaggggaactgttattgtaccctttcgtacggtggagggcacagccaaggggggaggcgaagattttgaggacacttacggcgagctggaattcaaaaacgacgagactgtgaaaaccattcatatcaaggtgatcgatgatgaggcatacgagaaaaacaaaaactactttattgaaatgatggggcctaggatggtggacatgtcatttcagaaggccctgctcctctcaccagatcggaagctgacaatggaagaggaagaagctaaacggattgccgaaatgggaaagcctgtactaggcgaacatccaaaactggaggtgattatcgaagagagttacgaattcaaaacaacggtagataaactgatcaagaagacgaatcttgctcttgtggttggcacacactcatggcgtgatcagtttatggaggcaattaccgtgtccgctgccggagatgaggacgaggacgaatcgggtgaggagaggcttccctcctgctttgattacgtcatgcattttctgaccgtattctggaaggtcctcttcgcctgcgtgcccccaacagagtactgtcatggctgggcctgttttgccgtcagtattctgatcatcggtatgcttaccgcaatcatcggagatctggcgtctcattttggttgcaccatcggcctgaaagactccgtgacagcagtggttttcgtggctttcggtacttcggttcctgacaccttcgcctctaaagcagcggctctgcaggacgtgtatgccgatgcctcgatcggcaacgtcacaggctctaacgccgtgaacgtgttcctcggaatcggtttagcatggtcagtggccgctatttactgggctctccaggggcaagagttccatgtcagcgccggtacattggccttctccgtcaccctgtttacaatctttgcattcgtgtgcataagcgtgctgctttatagaaggcgacctcatctggggggtgaattaggagggccaagagggtgtaagctcgccacgacctggctgttcgtgtcattgtggttactgtacatactgttcgccacactggaggcgtactgctatatcaaagggttttag

SEQ ID NO: 228067 - DNA, 2778 bp, Artificial Sequence
  derived and/or modified sequence
atggcctggctacgcctgcagccgcttactagcgcatttctccacttcggccttgttactttcgtgttgttcctcaacggtctaagggctgaagccggaggctctggggatgtgcccagtacgggccagaacaacgagtcttgttcaggatcctccgactgcaaggagggagtgatcctccctatttggtatcccgaaaatcccagccttggcgacaaaatcgccagggtgatagtctatttcgtcgctctgatttatatgttccttggggtaagcattatcgctgataggttcatggcgtccatcgaggtgattacctcccaggagagagaggtcactataaaaaagcctaatggagagacgtctacaacgaccatccgggtgtggaatgagactgtttccaacctgaccctgatggctctgggctcatcagccccagagattcttctctccctcatagaagtgtgtggccacgggttcatagcaggtgacctggggccatccactatcgttggcagcgctgcgttcaacatgttcatcattataggcatctgtgtctatgtgatccccgacggcgaaacccggaagataaaacacctgagggtattcttcattaccgctgcctggagcattttcgcatacatttggctctacatgattctggccgtgtttagtccgggagtggtgcaggtatgggaagggttactgactctgttttttttcccagtctgtgttttactggcctgggtggccgacaagagacttctgttttataaatatatgcataagaagtatcgtactgacaaacatagaggcatcatcattgaaactgaaggcgatcacccaaagggcatcgagatggatggcaagatgatgaactcacattttttagacggaaacctcgtccctctggaggggaaagaggtggacgaatcgagaagagagatgattcgcatcctgaaagacttgaagcagaaacatccagagaaggacttagatcagctggtggaaatggctaattattatgccctgagtcaccagcagaaatccagagcattttacaggattcaggctacacgcatgatgactggcgctgggaacatactgaaaaagcatgccgcagagcaggctaagaaagcttccagcatgtcggaggtgcacaccgacgaacccgaagactttatcagcaaagttttttttgatccgtgctcctatcagtgcctagagaattgtggagcagtgctcctgacagtggtccgcaagggtggcgacatgagcaaaacaatgtatgttgactacaaaaccgaggatggctccgctaacgctggcgcagactatgagttcactgaaggcacggtggtgttgaagcccggagagacccagaaagagttttcggtgggaattatcgacgacgacattttcgaggaggatgagcactttttcgtgcgactctctaatgtgcgcattgaggaggagcagccagaggagggtatgcctcctgctatattcaatagcctacctttgcccagagccgtgctggcttccccttgcgtcgctaccgtcactatcctcgacgacgaccatgcgggtatctttacattcgaatgtgacacaattcacgtcagcgaaagcatcggagtaatggaggtgaaagtcctccgaactagtggagcgcgaggaaccgtgattgtgcccttccggactgtggaaggaacagccaaaggtggaggggaggatttcgaggacacctacggcgaactggaatttaagaacgacgagacagtaaaaaccattcacattaaggttatcgacgacgaggcgtacgaaaaaaacaagaattacttcatcgaaatgatgggaccacggatggtggatatgtcattccagaaagccctgcttttgtccccagacaggaaactaactatggaagaggaggaggcaaagcggatcgccgaaatgggcaagcccgtcctcggggaacaccctaagctcgaggttatcatcgaagagtcatatgagttcaaaacaacagtggataaattaatcaaaaagacaaacttagccctggtggtgggcacccattcctggcgggaccagtttatggaagcgatcaccgtgtcagctgcaggcgatgaggacgaagatgagagcggcgaagaacgtctgccaagttgctttgattacgttatgcatttccttaccgtattctggaaggtcttgttcgcatgtgtgccacccacggagtattgccacggttgggcctgtttcgctgtctctatcctaattattggaatgctgactgccattatcggagatcttgccagccattttggctgcactatcgggttaaaagattcagtgactgctgttgtattcgttgcctttgggactagcgtgcctgacacatttgcgtcaaaggctgctgctctccaagacgtgtatgcagacgctagtataggcaacgtgacaggatctaacgccgttaacgtctttcttggtattggcctggcctggtcagtcgcagccatctattgggctttgcaggggcaagaattccatgtgtctgccggtacgctcgcctttagtgttaccctgttcacgatcttcgcatttgtgtgcatctcagtgctgctgtaccggcgacgccctcacctgggcggtgagctcggcggacctcgtggatgcaagctggccactacctggctatttgtgtccctttggctcctttatattctattcgcaaccttagaggcctactgctacatcaaggggttctag

SEQ ID NO: 228068 - DNA, 5262 bp, Artificial Sequence
  derived and/or modified sequence
cggcgctgtctcccagctgatagggtgacgttccgtttggaggcttggagattggctttttgatttggcttcttccggcagcttaatgggcaaagctctccgctcgcccagaaaccagcctctccgcgcgtcccctctgcgcgcggcgaggccgagacgtctcccgcggtgacagcgtgcaaggcggagacccggcgcgctcccagcccagggaaagcccaggcgacgcgaccgcaagcccgagcccaggtccctcggagccgccagggcgcgccgggctgcttgccttcctgccccttcctgcaggaatcccccgccgcccgcggccgggactccgggcctctcccgggcgtagattccagtcaccgctctgggtcggggtttccctctttctgaaatccgtgcggaaggacccctcccggggcccctcgccctggccccagacaccctccctcccagaccccgcgctccagatgcgctgccccgcagctccctgacagctgcgagcccacgaaccccggcgggagggcggcggcggcggactgacatgccccggacgcggctgcggccggcgggcagcccgcgggggcgatgagccgctgcgaccggtgaggcgccgggcggcgggggcatcgcgtaccttcctcacccccctcccttgcccactccgctcgggaggccgagaggaaacggtctctggcctatcaggaggacaactggtgctgcaatagaagccagtggctaagtctcgtgtatggcgtggttaaggttgcagcctctcacctctgccttcctccattttgggctggttacctttgtgctcttcctgaatggtcttcgagcagaggctggtggctcaggggacgtgccaagcacagggcagaacaatgagtcctgttcagggtcatcggactgcaaggagggtgtcatcctgccaatctggtacccggagaacccttcccttggggacaagattgccagggtcattgtctattttgtggccctgatatacatgttccttggggtgtccatcattgctgaccgcttcatggcatctattgaagtcatcacctctcaagagagggaggtgacaattaagaaacccaatggagaaaccagcacaaccactattcgggtctggaatgaaactgtctccaacctgacccttatggccctgggttcctctgctcctgagatactcctctctttaattgaggtgtgtggtcatgggttcattgctggtgatctgggaccttctaccattgtagggagtgcagccttcaacatgttcatcatcattggcatctgtgtctacgtgatcccagacggagagactcgcaagatcaagcatctacgagtcttcttcatcaccgctgcttggagtatctttgcctacatctggctctatatgattctggcagtcttctcccctggtgtggtccaggtttgggaaggcctcctcactctcttcttctttccagtgtgtgtccttctggcctgggtggcagataaacgactgctcttctacaaatacatgcacaaaaagtaccgcacagacaaacaccgaggaattatcatagagacagagggtgaccaccctaagggcattgagatggatgggaaaatgatgaattcccattttctagatgggaacctggtgcccctggaagggaaggaagtggatgagtcccgcagagagatgatccggattctcaaggatctgaagcaaaaacacccagagaaggacttagatcagctggtggagatggccaattactatgctctttcccaccaacagaagagccgtgccttctaccgtatccaagccactcgtatgatgactggtgcaggcaatatcctgaagaaacatgcagcagaacaagccaagaaggcctccagcatgagcgaggtgcacaccgatgagcctgaggactttatttccaaggtcttctttgacccatgttcttaccagtgcctggagaactgtggggctgtactcctgacagtggtgaggaaagggggagacatgtcaaagaccatgtatgtggactacaaaacagaggatggttctgccaatgcaggggctgactatgagttcacagagggcacggtggttctgaagccaggagagacccagaaggagttctccgtgggcataattgatgacgacatttttgaggaggatgaacacttctttgtaaggttgagcaatgtccgcatagaggaggagcagccagaggaggggatgcctccagcaatattcaacagtcttcccttgcctcgggctgtcctagcctccccttgtgtggccacagttaccatcttggatgatgaccatgcaggcatcttcacttttgaatgtgatactattcatgtcagtgagagtattggtgttatggaggtcaaggttctgcggacatcaggtgcccggggtacagtcatcgtcccctttaggacagtagaagggacagccaagggtggcggtgaggactttgaagacacatatggggagttggaattcaagaatgatgaaactgtcaaaacaattcacatcaaggtaattgatgatgaggcatatgagaaaaacaagaattacttcattgagatgatgggcccccgcatggtggatatgagttttcagaaagcgctcctgttatctccagacaggaagctgactatggaagaagaggaggccaagaggatagcagagatgggaaagccagtattgggtgaacaccccaaactagaagtcatcattgaagagtcctatgagttcaagactacggtggacaaactgatcaagaagacaaacctggccttggttgtggggacccattcctggagggaccagttcatggaggccatcaccgtcagtgcagcaggggatgaggatgaggatgaatccggggaggagaggctgccctcctgctttgactacgtcatgcacttcctgactgtcttctggaaggtgctgtttgcctgtgtgccccccacagagtactgccacggctgggcctgcttcgccgtctccatcctcatcattggcatgctcaccgccatcattggggacctggcctcgcacttcggctgcaccattggtctcaaagattcagtcacagctgttgttttcgtggcatttggcacctctgtcccagatacgtttgccagcaaagctgctgccctccaggatgtatatgcagacgcctccattggcaacgtgacgggcagcaacgccgtcaatgtcttcctgggcatcggcctggcctggtccgtggccgccatctactgggctctgcagggacaggagttccacgtgtcggccggcacactggccttctccgtcaccctcttcaccatctttgcatttgtctgcatcagcgtgctcttgtaccgaaggcggccgcacctgggaggggagcttggtggcccccgtggctgcaagctcgccacaacatggctctttgtgagcctgtggctcctctacatactctttgccacactagaggcctattgctacatcaaggggttctaagccacacaacagagcctccagcagggcaggcctaggacttctcctaagagaagggcacttccccaccagtgatctctcccgactgcactgccctggagaggcagcatcaggacctaagccccaggaacttcacccaacttaggccctggcaattaactgaaagggcaaagtcttaatcaatcaaacaatggaggaatcaccgactttacacagtatttaattgaatacaaacaagcaacagcaacaaatccacctccaccccatctccccctcatatccctgacccaaagcaaaggtcagagcctttcgcctccttctattccatcttttgattattcctttgcctctcatttctttggaagcagggtttctcctctctgcccaattccatatgtccctattatctcactcagctgacaagacgtgaaaatgagtcacattcatgtggctggggtggggttcttttttcattgtaatcattattgtggttgctttcgttttgccattaggttttgcttattattttgttttgtcttttttttctgaagtgagtgaaaaaggtgccacaaaggaattccaggtccgagccaacagagagaaacatgaatttttagacacatgctctcctgccacctcttggctccatcaagatccagttccccatctcactgttttctctgagttcttgggaggagtgatggtgttggggtagaaataagctcactcacccacgcagggtactaaagatcttacaggagcttcaactggagcaggaggagctttttatgcttatgttgaatcaagtcagatacaaaaagcaattgtccctctttgcccaagcctttccaattctgtgtgtcttgttgtgtcagtgtccacttgtgtatccttctgcaggaagacccgccaaatagaagagatgggacaaaaataggaatggtgtgtgacgacaaagggctactggaagaacaaaagggatacaggccttcttgattatctttggctttgtacctgaggcaggagagaagagatgtccaaccagtgagatctttaagagaaaagtttgtattttaaatgtcaatgtgcctgagaaatgtcagcttcaccacgctcttgcttcctaatgctctatacaaagagggctgactatatttcttgaagtggtgtaaaaacttagagattttataagagaaccaggggctcccttcacctctcctggtccctcaggtcacatatgaaagcatttttacaagataggaactggaattcctcatttctcccatgttcctgcttgttcttaaacttcatgaagctatttttccagcctatggggtagttcttgctccagtaagaggaatcttagttgtcataatcccttggagcctgggtttttggagaaagagatctccgtgccctacagaccttttctcaacgaatgtgggaaggacctggctttaaaacacgcacacaaacacacaaataaacagacataagatgtcatcacgaaactgcccacggatctttaggctttctgcattgacataaatacattttctaagggggggggggaagaaattaaaaaacacctgttaattttaaacacattttttaagaaaaaaataattaaaaaagaaacagtgctcatgtcataagctatgttgacagttgccagtggaaatgttgggttggttcaaaaaaaaaataaaagctatactatatctctctacata

SEQ ID NO: 228069 - DNA, 2840 bp, Artificial Sequence
  derived and/or modified sequence
gtctctggcctatcaggaggacaactggtgctgcaatagaagccagtggctaagtctcgtgtatggcgtggttaaggttgcagcctctcacctctgccttcctccattttgggctggttacctttgtgctcttcctgaatggtcttcgagcagaggctggtggctcaggggacgtgccaagcacagggcagaacaatgagtcctgttcagggtcatcggactgcaaggagggtgtcatcctgccaatctggtacccggagaacccttcccttggggacaagattgccagggtcattgtctattttgtggccctgatatacatgttccttggggtgtccatcattgctgaccgcttcatggcatctattgaagtcatcacctctcaagagagggaggtgacaattaagaaacccaatggagaaaccagcacaaccactattcgggtctggaatgaaactgtctccaacctgacccttatggccctgggttcctctgctcctgagatactcctctctttaattgaggtgtgtggtcatgggttcattgctggtgatctgggaccttctaccattgtagggagtgcagccttcaacatgttcatcatcattggcatctgtgtctacgtgatcccagacggagagactcgcaagatcaagcatctacgagtcttcttcatcaccgctgcttggagtatctttgcctacatctggctctatatgattctggcagtcttctcccctggtgtggtccaggtttgggaaggcctcctcactctcttcttctttccagtgtgtgtccttctggcctgggtggcagataaacgactgctcttctacaaatacatgcacaaaaagtaccgcacagacaaacaccgaggaattatcatagagacagagggtgaccaccctaagggcattgagatggatgggaaaatgatgaattcccattttctagatgggaacctggtgcccctggaagggaaggaagtggatgagtcccgcagagagatgatccggattctcaaggatctgaagcaaaaacacccagagaaggacttagatcagctggtggagatggccaattactatgctctttcccaccaacagaagagccgtgccttctaccgtatccaagccactcgtatgatgactggtgcaggcaatatcctgaagaaacatgcagcagaacaagccaagaaggcctccagcatgagcgaggtgcacaccgatgagcctgaggactttatttccaaggtcttctttgacccatgttcttaccagtgcctggagaactgtggggctgtactcctgacagtggtgaggaaagggggagacatgtcaaagaccatgtatgtggactacaaaacagaggatggttctgccaatgcaggggctgactatgagttcacagagggcacggtggttctgaagccaggagagacccagaaggagttctccgtgggcataattgatgacgacatttttgaggaggatgaacacttctttgtaaggttgagcaatgtccgcatagaggaggagcagccagaggaggggatgcctccagcaatattcaacagtcttcccttgcctcgggctgtcctagcctccccttgtgtggccacagttaccatcttggatgatgaccatgcaggcatcttcacttttgaatgtgatactattcatgtcagtgagagtattggtgttatggaggtcaaggttctgcggacatcaggtgcccggggtacagtcatcgtcccctttaggacagtagaagggacagccaagggtggcggtgaggactttgaagacacatatggggagttggaattcaagaatgatgaaactgtcaaaacaattcacatcaaggtaattgatgatgaggcatatgagaaaaacaagaattacttcattgagatgatgggcccccgcatggtggatatgagttttcagaaagcgctcctgttatctccagacaggaagctgactatggaagaagaggaggccaagaggatagcagagatgggaaagccagtattgggtgaacaccccaaactagaagtcatcattgaagagtcctatgagttcaagactacggtggacaaactgatcaagaagacaaacctggccttggttgtggggacccattcctggagggaccagttcatggaggccatcaccgtcagtgcagcaggggatgaggatgaggatgaatccggggaggagaggctgccctcctgctttgactacgtcatgcacttcctgactgtcttctggaaggtgctgtttgcctgtgtgccccccacagagtactgccacggctgggcctgcttcgccgtctccatcctcatcattggcatgctcaccgccatcattggggacctggcctcgcacttcggctgcaccattggtctcaaagattcagtcacagctgttgttttcgtggcatttggcacctctgtcccagatacgtttgccagcaaagctgctgccctccaggatgtatatgcagacgcctccattggcaacgtgacgggcagcaacgccgtcaatgtcttcctgggcatcggcctggcctggtccgtggccgccatctactgggctctgcagggacaggagttccacgtgtcggccggcacactggccttctccgtcaccctcttcaccatctttgcatttgtctgcatcagcgtgctcttgtaccgaaggcggccgcacctgggaggggagcttggtggcccccgtggctgcaagctcgccacaacatggctctttgtgagcctgtggctcctctacatactctttgccacactagaggcctattgctacatcaaggggttctaa

SEQ ID NO: 228070 - protein, 974 aa, Artificial Sequence
  derived and/or modified sequence
MRRAGIGEDSRLGLQAQPGAEPSPGRAGTERSLGGTQGPGQPCSCPGAMASAVRGSRPWPRLGLQLQFAALLLGTLSPQVHTLRPENLLLVSTLDGSLHALSKQTGDLKWTLRDDPVIEGPMYVTEMAFLSDPADGSLYILGTQKQQGLMKLPFTIPELVHASPCRSSDGVFYTGRKQDAWFVVDPESGETQMTLTTEGPSTPRLYIGRTQYTVTMHDPRAPALRWNTTYRRYSAPPMDGSPGKYMSHLASCGMGLLLTVDPGSGTVLWTQDLGVPVMGVYTWHQDGLRQLPHLTLARDTLHFLALRWGHIRLPASGPRDTATLFSTLDTQLLMTLYVGKDETGFYVSKALVHTGVALVPRGLTLAPADGPTTDEVTLQVSGEREGSPSTAVRYPSGSVALPSQWLLIGHHELPPVLHTTMLRVHPTLGSGTAETRPPENTQAPAFFLELLSLSREKLWDSELHPEEKTPDSYLGLGPQDLLAASLTAVLLGGWILFVMRQQQPQVVEKQQETPLAPADFAHISQDAQSLHSGASRRSQKRLQSPSKQAQPLDDPEAEQLTVVGKISFNPKDVLGRGAGGTFVFRGQFEGRAVAVKRLLRECFGLVRREVQLLQESDRHPNVLRYFCTERGPQFHYIALELCRASLQEYVENPDLDRGGLEPEVVLQQLMSGLAHLHSLHIVHRDLKPGNILITGPDSQGLGRVVLSDFGLCKKLPAGRCSFSLHSGIPGTEGWMAPELLQLLPPDSPTSAVDIFSAGCVFYYVLSGGSHPFGDSLYRQANILTGAPCLAHLEEEVHDKVVARDLVGAMLSPLPQPRPSAPQVLAHPFFWSRAKQLQFFQDVSDWLEKESEQEPLVRALEAGGCAVVRDNWHEHISMPLQTDLRKFRSYKGTSVRDLLRAVRNKKHHYRELPVEVRQALGQVPDGFVQYFTNRFPRLLLHTHRAMRSCASESLFLPYYPPDSEARRPCPGATGR

SEQ ID NO: 228071 - DNA, 2925 bp, Artificial Sequence
  derived and/or modified sequence
atgcgtagagctggaataggcgaagacagccggctgggactgcaagcccagcctggggctgaaccatctccagggcgtgcaggtacagaaaggtccctgggaggaacacaggggcccggtcagccctgttcctgccctggggccatggcctctgcagtgaggggatctagaccgtggccacgactcgggttacagctgcagtttgcagccctcctgctcggtaccttatctccgcaagttcacacactgcgacccgaaaacctgctcctggtgtctaccttagacggctccctgcatgcgctctccaagcagacgggcgacttgaaatggacactcagagatgatccagtgattgaaggcccaatgtatgttacagagatggccttcttaagcgatccagctgacggctctctttacatcctggggacccagaagcaacaggggcttatgaagcttccgtttaccatcccggaactggtgcatgcatcaccatgtcgtagctccgacggtgtgttctacaccggtaggaaacaggatgcatggttcgttgtggaccctgagtcaggggagactcagatgacactgacaacagaaggccccagtaccccgaggctatacattggcaggacccaatataccgtcacaatgcacgatcccagagcccccgcgctgcgctggaataccacatacagaaggtactccgcaccacctatggatgggtcgcctggcaagtacatgagccacttggcgagttgtggtatgggactactgcttaccgtagacccggggagcgggacagttctgtggacccaggaccttggtgtccctgtgatgggggtgtacacctggcaccaagacggtcttagacagctccctcaccttacacttgcacgcgacaccctgcacttcctagcactcagatggggccatatccgccttcccgcttctggacctcgagacacagccacactgttttccactttggacacccagctccttatgacgctctacgtcggtaaggacgaaaccgggttctacgtgtccaaagccctggtgcataccggggtcgcccttgtaccccgagggctgacgctcgctccagccgatgggccaactactgatgaggtgactcttcaagtctccggcgagagggaagggtctcctagcacagcagtgcggtaccccagtggtagcgtagcccttccctctcaatggctccttattggacaccacgagctgccccccgttctgcacacaacgatgctacgagtccaccccactttggggagcggcaccgccgagacccggcctcctgagaatacccaggcgcctgctttttttctggagctcttgtctctgtctcgtgaaaaactgtgggacagcgagctccacccggaagaaaagactccagacagctatctgggcttgggacctcaggatttactcgctgctagcctgactgctgtacttctgggcggctggatcctattcgtcatgagacagcagcagcctcaggtagtcgagaagcagcaggagacaccactggcacccgctgactttgcccatattagtcaggatgctcagagtttacatagcggtgcctcccggcggtcacaaaaaagactgcagtctccctcaaagcaggcacaacctctcgatgatcctgaggccgagcaattgaccgtggttgggaagattagtttcaaccctaaagacgtgctgggacgtggagctggaggcaccttcgtttttcgcggacagtttgagggccgcgctgtcgctgtcaaacggcttcttagagaatgttttggcctggttcggagggaggtgcagctgctgcaggagagcgatagacatcctaatgtgctgcggtatttttgcaccgagcgaggaccccaattccactatattgccttggagctctgccgcgcctcactgcaagagtacgtggagaatcctgatcttgaccgtggtgggctggagccagaagtggtcctgcaacagctaatgtctggtcttgcccacctgcactctctgcacatcgtgcaccgggacttgaagcctgggaacattctgattacgggaccagactcccagggcctgggaagggtagtcctgagtgatttcggcttgtgcaagaagctgccggcgggccggtgcagtttctctctacattctggcattccaggaaccgaagggtggatggccccggaactattgcaactgttaccccctgactcacctacctccgcagtagatatcttctcagctgggtgcgtgttttattatgtgctgtcgggaggatcccatccatttggagatagtctataccggcaggcgaatatattgacgggcgccccatgcctcgcccatctggaggaggaggtgcacgataaggtggtcgcaagagacctggtcggtgcgatgctttcccctctgcctcagccacgtccttcggctcctcaggtgctcgcgcacccattcttctggagccgggccaagcaactgcagtttttccaggacgtatctgactggctggaaaaagaaagcgagcaagaaccactggtgagggccttagaggccggaggttgtgctgtagttcgagataattggcacgagcatatatcaatgcctcttcaaacagatctaaggaagtttcggtcgtacaaaggtacaagcgtcagggatcttctccgtgccgttcgtaataagaagcaccactacagagaattacctgtcgaagtgcgccaggccctgggtcaggtccccgatggctttgtccagtacttcacaaatcggtttccccggctgctcctgcacacgcaccgagccatgagaagttgtgcttccgaatccctgttcctgccttattatcctcctgactcagaagcccgccgaccatgtccgggcgcaacaggccgttag

SEQ ID NO: 228072 - DNA, 2925 bp, Artificial Sequence
  derived and/or modified sequence
atgaggcgggccggcatcggggaggacagccggctgggcctgcaggcccagcccggggctgagcccagccctggccgggccggcacagagaggagcctgggcggcacccagggccctggccagccctgcagctgccctggggccatggccagcgctgtgcggggcagccggccctggccccggctgggcctgcagctgcagtttgctgccctgctgctgggcaccctgagcccccaggtgcacaccctgcggcctgagaacctgctgctggtgtccaccctggatggcagcctgcacgccctgagcaagcagacaggagacctgaagtggaccctgagagatgaccccgtcatcgagggccccatgtatgtgacagagatggccttcctgagtgaccctgcagatggcagcctgtacatcctgggcacccagaagcagcagggcctgatgaagctgcccttcaccatccctgagctggtgcacgccagcccctgccgcagcagtgatggagtcttctacacaggcaggaagcaggatgcctggtttgtggtggaccctgagagcggggagacccagatgaccctgaccacagagggccccagcaccccccggctgtacatcggccgcacccagtacacagtgaccatgcatgacccccgggccccagccctgcgctggaacaccacctaccgccgctacagcgccccacccatggatggcagccctgggaagtacatgagccacctggccagctgtggcatgggcctgctgctgactgtggaccccggcagcggcaccgtgctgtggacccaggacctgggcgtgcctgtgatgggcgtgtacacctggcaccaggacggcctgcggcagctgccccacctgaccctggcccgggacaccctgcacttcctggccctgcgctggggccacatccggctgcctgccagcggcccccgggacacagccaccctcttcagcaccctggacacccagctgctgatgaccctgtatgtgggcaaggatgaaacaggcttctacgtgtccaaggccctggtgcacactggagtggccctggtgccccggggcctgaccctggccccagcagatggccccaccacagatgaggtgaccctgcaggtgtctggagagcgggagggcagccccagcacagctgtgcgctaccccagcggctctgtggccctgcccagccagtggctgctgattggccaccacgagctgccccctgtgctgcacaccaccatgctgcgggtgcaccccaccctgggcagcggcacagctgagacccggcccccagagaacacccaggccccagccttcttcctggagctgctgagcctgagccgggagaagctgtgggacagcgagctgcaccctgaggagaagaccccagacagctacctgggcctgggcccccaggacctgctggccgccagcctgacagctgtgctgctgggcggctggatcctgtttgtgatgaggcagcagcagccccaggtggtggagaagcagcaggagacccccctggccccagctgactttgcccacatcagccaggatgcccagagcctgcacagcggggccagccgccgcagccagaagaggctgcagagccccagcaagcaggcccagcccctggatgatcctgaggccgagcagctgactgtggtgggcaagatctccttcaaccccaaggatgtgctgggccgcggggccggcggcacctttgtgttccggggccagtttgagggccgggctgtggccgtgaagaggctgctgagagaatgttttggcctggtgagaagagaggtgcagctgctgcaggagagtgacagacaccccaacgtgctgcgctacttctgcacagagcggggcccccagttccactacatcgccctggagctgtgccgggccagcctgcaggagtatgtggagaacccagacctggaccggggcggcctggagcctgaggtggtgctgcagcagctgatgagcggcctggcccacctgcacagcctgcacatcgtgcaccgggacctgaagccaggcaacatcctgatcaccggccctgacagccagggcctgggccgggtggtgctgagtgactttggcctgtgcaagaagctgcctgctggccgctgcagcttcagcctgcacagcggcatccctggaacagagggctggatggcccctgagctgctgcagctgctgcccccagacagccccaccagcgctgtggacatcttctctgctggctgtgtgttctactacgtgctgagcggcggcagccacccctttggagacagcctgtaccggcaggccaacatcctgaccggggccccctgcctggcccacctggaggaggaggtgcatgacaaggtggtggcccgggacctggtgggcgccatgctgagccccctgccccagccccggcccagcgccccccaggtgctggcccaccccttcttctggagccgggccaagcagctgcagttcttccaggatgtgtctgactggctggagaaggagagcgagcaggagcccctggtgcgggccctggaggccggcggctgtgctgtggtgcgggacaactggcatgagcacatctccatgcccctgcagacagacctgaggaagttccgcagctacaagggcacctctgtgcgggacctgctgcgggctgtgaggaacaagaagcaccactaccgggagctgcctgtggaggtgcggcaggccctgggccaggtgcctgatggctttgtgcagtacttcaccaaccgcttcccccggctgctgctgcacacccaccgggccatgaggagctgtgccagcgagagcctcttcctgccctactaccccccagacagcgaggcccggcggccctgccctggggccaccggccgctag

SEQ ID NO: 228073 - DNA, 2925 bp, Artificial Sequence
  derived and/or modified sequence
atgcggcgggccggcatcggcgaggacagccggctgggcctgcaggctcagcccggagcggaaccctcacctgggcgagccggaacagaacgttcactcggaggcacccagggcccaggccagccgtgttcatgccccggggcaatggcctctgctgttcgaggcagccgtccatggcctcgactgggacttcagctgcagttcgcagcactgctgcttggaacgttgtctcctcaggtgcatacattaaggcctgagaatctactcctcgtttcaacccttgacggctctttgcacgccttgtcaaaacagacgggtgatctgaagtggacgttgagagacgatcccgtgatcgaaggcccaatgtacgttacagaaatggccttcctttccgacccagctgacggaagtctgtacatcttaggtacccagaaacagcaggggctaatgaagctgccctttaccatccccgaactggtgcatgcgtccccctgcagatcttctgacggagtgttttacactggccgcaagcaggatgcctggttcgtagtggaccctgagtctggagagacacagatgaccttaaccactgagggtcctagcacaccacgtctgtacatcggtagaacgcagtacactgtgaccatgcacgacccgcgcgcacctgctttgcggtggaacacaacctatcgacgttactcagcaccgccaatggacggctccccaggcaagtacatgtctcacctggctagttgtggcatgggcctgttacttaccgtagatcccgggagcggcaccgtcttgtggactcaggatctgggcgttccagtgatgggagtgtacacatggcaccaggacgggttgagacaacttccccacttgaccttggcccgtgacacactgcactttctagcactgagatgggggcacatccggctgccggccagcggccccagggatacagctaccctcttcagcaccctggacacacaacttttaatgaccctctacgtggggaaagacgaaactgggttttacgtaagtaaggccctggtacacacaggggttgctcttgtgcccagaggcttgactctcgctcccgcggatggtcctactacggacgaagtgacactccaggtctccggggaacgtgaaggctcaccctccaccgccgtgcgctatcccagcggctctgtcgctctcccttcccagtggttgcttattggacaccatgagctccctcccgtgctgcatactaccatgctcagagtccatccaacactgggctctggaaccgcagaaacccggccccccgaaaacactcaggcgcccgcctttttcctcgagctcctctccttatctcgggagaaactgtgggactccgaactgcaccccgaggaaaagacacctgactcttatctggggctggggccccaggacctccttgcagccagcttgaccgctgtgctgcttggcgggtggatactcttcgtcatgcgccagcagcagcctcaggtggttgagaaacaacaggaaaccccccttgcccctgctgatttcgctcacatttcccaggatgcacagtccctgcattcgggtgccagccgccggtctcaaaagcgcctgcaatctcccagcaagcaagcccagcccctggatgaccctgaggccgagcagctgacggttgtgggcaaaattagcttcaaccccaaggacgtcctgggccggggcgccggcgggaccttcgtttttcgcggacagttcgaaggtcgggccgtagctgtaaagcgactcctgagagaatgcttcggcctggtgcggagagaagttcagttgctgcaggagtctgacaggcacccgaatgtcctcaggtatttctgtacagaaagaggaccacagttccactacatcgcccttgagctgtgccgggcctcactacaggaatatgtcgagaatccagaccttgatcgggggggcctggaacctgaagtcgtgctgcagcagctgatgtcaggattagcgcaccttcacagcctgcatattgttcacagggatctcaaaccaggcaatatcctgatcactgggcccgatagccagggtcttggcagggtggtgctgagcgattttgggctgtgtaagaaacttccagcggggagatgctcgttttccctgcactctgggattcctgggaccgaaggctggatggcccctgagcttctgcagctgctgccaccagacagccccacaagcgccgtcgatattttctcagcaggatgcgtgttctactatgtgttgagcggcggctctcacccatttggcgacagcctgtatagacaggcgaatattctgacaggcgcaccctgccttgctcacttagaagaggaggtccatgacaaagtagttgcacgggatcttgtcggcgcgatgctttctccactgccacagcccaggccatccgctccacaggtgctggcacaccctttcttctggagccgcgctaagcaactgcagtttttccaagacgtgtctgattggctggaaaaggagagcgaacaggagcccctggtgcgcgcactggaggcgggtggctgtgccgttgttcgagataactggcatgagcacatctccatgcctctacagactgacctccgcaagttccgcagctacaagggtacaagtgttagggacctgctgagagccgtgcgaaataaaaaacaccactatagggagctccccgtagaggtccgacaggccctcggacaggttcccgacggcttcgtgcaatacttcactaaccgctttcctagactcctgctacacacccacagggctatgagaagctgcgcttctgagtcgctgttcttgccttattatcctccagatagtgaggctcggcgcccatgccccggcgccactggccggtag

SEQ ID NO: 228074 - DNA, 2925 bp, Artificial Sequence
  derived and/or modified sequence
atgagacgtgcgggaattggagaagattcccggctgggattgcaagcccaaccaggtgcagagccctcacccggtcgggcagggactgagcgatccctcggtggtactcagggtccgggacagccctgttcatgtccaggtgctatggcaagcgctgtgaggggcagcagaccgtggccgcgtctggggctccagttgcagtttgcagccttacttttggggacgttgagccctcaggtgcacacactcagacccgaaaatcttctgctggtctccaccctagatggatctctccacgccctctccaagcagaccggggatcttaagtggacactgcgcgacgacccggtcatcgagggacctatgtacgtcactgaaatggcttttctgagcgacccagccgatggtagcctgtatatcctgggcacacagaaacagcaggggctgatgaaactcccgtttacgatccccgagcttgttcacgcttctccctgtaggtcctcagatggggtgttctacaccggcaggaaacaggatgcatggttcgtggtcgacccagagtcaggtgagacccagatgaccctgaccacggagggcccttcgactccaaggctgtacatcggacgcacgcagtacacagtgaccatgcacgatcctcgcgctcctgcactgagatggaataccacctataggagatatagtgccccaccgatggacgggagcccagggaagtacatgtcccatttggcttcctgtggaatggggttgctcctgacagtcgacccgggttctggtaccgtgctatggacacaggatctgggagtgcccgtgatgggagtatacacctggcaccaggacggtctgcgccagctcccgcacctgaccctagccagggacacactgcactttcttgctctcagatggggccacattcggttgcccgcaagtgggcctcgggacacggcaaccctgttcagcaccctggatacccagctcctcatgaccctgtatgtaggcaaagatgaaaccggtttctatgtctcaaaggccttagtccacaccggtgtagctctagtgccaagggggttaactcttgccccagcagatggcccaactactgacgaggtcacgcttcaggtcagtggtgaaagggaagggagtcctagcacagctgtcaggtacccgtctgggagcgtcgccttgccgtctcagtggctgctgatcggccatcacgaactgcccccagtcttacacactactatgcttagagtacacccaacgctgggaagcgggacggcagagacccgtcctccggaaaatacccaggcgcctgctttctttttggagctcctgtcgctaagccgggagaaactctgggatagtgaactccacccagaagagaagacaccggattcctatttagggcttgggccacaggacttgctcgcagcaagtttaaccgccgtgcttcttggcggttggatcttgtttgtcatgagacaacaacaaccacaggtggttgagaaacagcaggaaactccactggccccagccgacttcgcccatatctcccaagacgcgcaatccttacactccggcgctagccgcaggtcccagaaacgactgcaatccccttccaaacaggcccagccgctggatgaccctgaggcagagcagttgacagtcgtcggtaagattagctttaatcccaaagacgtgctgggccgaggggctgggggaacgtttgtgttccgcggacagtttgagggacgggcagtggctgtaaagcgcctgctccgggagtgtttcgggctggtgcgcagggaggtgcagctgctccaggaaagcgatcggcacccaaacgtactcagatacttttgcaccgagaggggaccacagtttcactatatagcactcgagctttgccgggctagcctccaggagtatgtagaaaaccccgatctggatagaggagggctcgagcctgaagtggtcctgcaacagctgatgtctggactcgctcacctgcatagtcttcacatcgtccaccgggacctcaagcccggaaatatattgattacaggacctgattctcaagggttaggaagagtggtcctttctgacttcgggctgtgtaaaaagttacccgctggccgttgttcttttagtttgcacagtggtattcctggcaccgaaggttggatggcaccggagctgcttcagctgctaccgcctgatagtccaacctcagctgtggacatctttagtgctgggtgcgttttctactatgtgctgagcggtggtagtcacccatttggcgactctctctaccgccaggctaatattctgacaggcgctccatgcctggcccatctggaagaagaagtacacgataaggttgtagcccgagatttggtcggcgcaatgttaagcccactcccccagcctcgaccgagcgcaccgcaggtgctggcccacccattcttctggagcagggcaaaacaacttcaattcttccaggacgtgtccgactggctggaaaaggaatccgagcaggaaccattggtgagggctctggaagccggaggatgcgctgtggttcgagataactggcacgaacacatatccatgcctctgcagacagacctacggaaatttcgtagctacaaaggtacatcagtgagggaccttctacgagctgtgagaaacaagaaacatcactaccgtgaacttcctgttgaagtgcggcaggctttaggccaggtaccagatggcttcgtccagtattttaccaatcggttccccagactcctgttacatacccaccgtgctatgcggtcttgcgcgagtgaatctctatttctgccttattacccacccgacagcgaggccagaagaccttgtccaggtgcaactggtcggtag

SEQ ID NO: 228075 - DNA, 2925 bp, Artificial Sequence
  derived and/or modified sequence
atgagaagagccggcatcggcgaggacagcagactgggcctgcaggcccagcccggcgccgagcccagccccggcagagccggcaccgagagaagcctgggcggcacccagggccccggccagccctgcagctgccccggcgccatggccagcgccgtgagaggcagcagaccctggcccagactgggcctgcagctgcagttcgccgccctgctgctgggcaccctgagcccccaggtgcacaccctgagacccgagaacctgctgctggtgagcaccctggacggcagcctgcacgccctgagcaagcagaccggcgacctgaagtggaccctgagagacgaccccgtgatcgagggccccatgtacgtgaccgagatggccttcctgagcgaccccgccgacggcagcctgtacatcctgggcacccagaagcagcagggcctgatgaagctgcccttcaccatccccgagctggtgcacgccagcccctgcagaagcagcgacggcgtgttctacaccggcagaaagcaggacgcctggttcgtggtggaccccgagagcggcgagacccagatgaccctgaccaccgagggccccagcacccccagactgtacatcggcagaacccagtacaccgtgaccatgcacgaccccagagcccccgccctgagatggaacaccacctacagaagatacagcgccccccccatggacggcagccccggcaagtacatgagccacctggccagctgcggcatgggcctgctgctgaccgtggaccccggcagcggcaccgtgctgtggacccaggacctgggcgtgcccgtgatgggcgtgtacacctggcaccaggacggcctgagacagctgccccacctgaccctggccagagacaccctgcacttcctggccctgagatggggccacatcagactgcccgccagcggccccagagacaccgccaccctgttcagcaccctggacacccagctgctgatgaccctgtacgtgggcaaggacgagaccggcttctacgtgagcaaggccctggtgcacaccggcgtggccctggtgcccagaggcctgaccctggcccccgccgacggccccaccaccgacgaggtgaccctgcaggtgagcggcgagagagagggcagccccagcaccgccgtgagataccccagcggcagcgtggccctgcccagccagtggctgctgatcggccaccacgagctgccccccgtgctgcacaccaccatgctgagagtgcaccccaccctgggcagcggcaccgccgagaccagaccccccgagaacacccaggcccccgccttcttcctggagctgctgagcctgagcagagagaagctgtgggacagcgagctgcaccccgaggagaagacccccgacagctacctgggcctgggcccccaggacctgctggccgccagcctgaccgccgtgctgctgggcggctggatcctgttcgtgatgagacagcagcagccccaggtggtggagaagcagcaggagacccccctggcccccgccgacttcgcccacatcagccaggacgcccagagcctgcacagcggcgccagcagaagaagccagaagagactgcagagccccagcaagcaggcccagcccctggacgaccccgaggccgagcagctgaccgtggtgggcaagatcagcttcaaccccaaggacgtgctgggcagaggcgccggcggcaccttcgtgttcagaggccagttcgagggcagagccgtggccgtgaagagactgctgagagagtgcttcggcctggtgagaagagaggtgcagctgctgcaggagagcgacagacaccccaacgtgctgagatacttctgcaccgagagaggcccccagttccactacatcgccctggagctgtgcagagccagcctgcaggagtacgtggagaaccccgacctggacagaggcggcctggagcccgaggtggtgctgcagcagctgatgagcggcctggcccacctgcacagcctgcacatcgtgcacagagacctgaagcccggcaacatcctgatcaccggccccgacagccagggcctgggcagagtggtgctgagcgacttcggcctgtgcaagaagctgcccgccggcagatgcagcttcagcctgcacagcggcatccccggcaccgagggctggatggcccccgagctgctgcagctgctgccccccgacagccccaccagcgccgtggacatcttcagcgccggctgcgtgttctactacgtgctgagcggcggcagccaccccttcggcgacagcctgtacagacaggccaacatcctgaccggcgccccctgcctggcccacctggaggaggaggtgcacgacaaggtggtggccagagacctggtgggcgccatgctgagccccctgccccagcccagacccagcgccccccaggtgctggcccaccccttcttctggagcagagccaagcagctgcagttcttccaggacgtgagcgactggctggagaaggagagcgagcaggagcccctggtgagagccctggaggccggcggctgcgccgtggtgagagacaactggcacgagcacatcagcatgcccctgcagaccgacctgagaaagttcagaagctacaagggcaccagcgtgagagacctgctgagagccgtgagaaacaagaagcaccactacagagagctgcccgtggaggtgagacaggccctgggccaggtgcccgacggcttcgtgcagtacttcaccaacagattccccagactgctgctgcacacccacagagccatgagaagctgcgccagcgagagcctgttcctgccctactacccccccgacagcgaggccagaagaccctgccccggcgccaccggcagatag

SEQ ID NO: 228076 - DNA, 3616 bp, Artificial Sequence
  derived and/or modified sequence
gcttgtacctgctgtgcagtgaggactccaggaactgatgatgaaccggcacggtcctcggcacgtggcaagttctccataagtgggctcagtaaaatccctctcccgggaaagcgccccaccgtgtttggtggggtgactgggacgcgaggatgcggctgggagtgtgatgagaagggcggggatcggcgaggactccaggctggggttgcaggcccagccaggggcggagccttctccgggtcgggcggggacagagcgctcccttggaggcacccagggacctggccagccgtgcagctgcccaggcgctatggcgagtgcggtcagggggtcgaggccgtggccccggctggggctccagctccagttcgcggcgctgctgctcgggacgctgagtccacaggttcatactctcaggccagagaacctcctgctggtgtccaccttggatggaagtctccacgcactaagcaagcagacaggggacctgaagtggactctgagggatgatcccgtcatcgaaggaccaatgtacgtcacagaaatggcctttctctctgacccagcagatggcagcctgtacatcttggggacccaaaaacaacagggattaatgaaactgccattcaccatccctgagctggttcatgcctctccctgccgcagctctgatggggtcttctacacaggccggaagcaggatgcctggtttgtggtggaccctgagtcaggggagacccagatgacactgaccacagagggtccctccaccccccgcctctacattggccgaacacagtatacggtcaccatgcatgacccaagagccccagccctgcgctggaacaccacctaccgccgctactcagcgccccccatggatggctcacctgggaaatacatgagccacctggcgtcctgcgggatgggcctgctgctcactgtggacccaggaagcgggacggtgctgtggacacaggacctgggcgtgcctgtgatgggcgtctacacctggcaccaggacggcctgcgccagctgccgcatctcacgctggctcgagacactctgcatttcctcgccctccgctggggccacatccgactgcctgcctcaggcccccgggacacagccaccctcttctctaccttggacacccagctgctaatgacgctgtatgtggggaaggatgaaactggcttctatgtctctaaagcactggtccacacaggagtggccctggtgcctcgtggactgaccctggcccccgcagatggccccaccacagatgaggtgacactccaagtctcaggagagcgagagggctcacccagcactgctgttagatacccctcaggcagtgtggccctcccaagccagtggctgctcattggacaccacgagctacccccagtcctgcacaccaccatgctgagggtccatcccaccctggggagtggaactgcagagacaagacctccagagaatacccaggccccagccttcttcttggagctattgagcctgagccgagagaaactttgggactccgagctgcatccagaagaaaaaactccagactcttacttggggctgggaccccaagacctgctggcagctagcctcactgctgtcctcctgggagggtggattctctttgtgatgaggcagcaacagccgcaggtggtggagaagcagcaggagacccccctggcacctgcagactttgctcacatctcccaggatgcccagtccctgcactcgggggccagccggaggagccagaagaggcttcagagtccctcaaagcaagcccagccactcgacgaccctgaagctgagcaactcaccgtagtggggaagatttccttcaatcccaaggacgtgctgggccgcggggcaggcgggactttcgttttccggggacagtttgagggacgggcagtggctgtcaagcggctcctccgcgagtgctttggcctggttcggcgggaagttcaactgctgcaggagtctgacaggcaccccaacgtgctccgctacttctgcaccgagcggggaccccagttccactacattgccctggagctctgccgggcctccttgcaggagtacgtagaaaacccggacctggatcgcgggggtctggagcccgaggtcgtgctgcagcagctgatgtctggcctggcccacctgcactctttacacatagtgcaccgggacctgaagccaggaaatattctcatcaccgggcctgacagccagggcctgggcagagtggtgctctcagacttcggcctctgcaagaagctgcctgctggccgctgtagcttcagcctccactccggcatccccggcacggaaggctggatggcgcccgagcttctgcagctcctgccaccagacagtcctaccagcgctgtggacatcttctctgcaggctgcgtgttctactacgtgctttctggtggcagccacccctttggagacagtctttatcgccaggcaaacatcctcacaggggctccctgtctggctcacctggaggaagaggtccacgacaaggtggttgcccgggacctggttggagccatgttgagcccactgccgcagccacgcccctctgccccccaggtgctggcccaccccttcttttggagcagagccaagcaactccagttcttccaggacgtcagtgactggctggagaaggagtccgagcaggagcccctggtgagggcactggaggcgggaggctgcgcagtggtccgggacaactggcacgagcacatctccatgccgctgcagacagatctgagaaagttccggtcctataaggggacatcagtgcgagacctgctccgtgctgtgaggaacaagaagcaccactacagggagctcccagttgaggtgcgacaggcactcggccaagtccctgatggcttcgtccagtacttcacaaaccgcttcccacggctgctcctccacacgcaccgagccatgaggagctgcgcctctgagagcctcttcctgccctactacccgccagactcagaggccaggaggccatgccctggggccacagggaggtgaggtgggctggatgccacacagatggtctccgtgctggctcactgaagagctgagcctgtggctggcctcagaatcaggctgggtgcagtggctcacacctgtaatcccagcattttgggaggctgagtgagaggatcacttgagctcaggagttcgagaccagcctggccaacatggcaacaccccatttctacaaaaaatttgtaaaattagccaggcatggtggcgcacgcctgtagtcccagctgcttgggaggctgaggtgggagaatcacttgagcccaggagttcgaggctgcagtgagccaggatcatgccactgcactccagcctggtccacagagagacactgtcaccccctttcccccacaagactggcagaggctgggcagcctggggctgatgaagcagagatgttcgctggatcccaggccctggcacccctcaggaaatacaagaaaaagaatattcacatctgtttaatgtgcataaagccaaggaaaggacagttccgaattcaat

SEQ ID NO: 228077 - protein, 471 aa, Artificial Sequence
  derived and/or modified sequence
MSYPQGYLYQAPGSLALYSCPAYGASALAAPRSEELARSASGSAFSPYPGSAAFTAQAATGFGSPLQYSADAAAAAAGFPSYMGAPYDAHTTGMTGAISYHPYGSAAYPYQLNDPAYRKNATRDATATLKAWLNEHRKNPYPTKGEKIMLAIITKMTLTQVSTWFANARRRLKKENKMTWAPRNKSEDEDEDEGDATRSKDESPDKAQEGTETSAEDEGISLHVDSLTDHSCSAESDGEKLPCRAGDPLCESGSECKDKYDDLEDDEDDDEEGERGLAPPKPVTSSPLTGLEAPLLSPPPEAAPRGGRKTPQGSRTSPGAPPPASKPKLWSLAEIATSDLKQPSLGPGCGPPGLPAAAAPASTGAPPGGSPYPASPLLGRPLYYTSPFYGNYTNYGNLNAALQGQGLLRYNSAAAAPGEALHTAPKAASDAGKAGAHPLESHYRSPGGGYEPKKDASEGCTVVGGGVQPYL

SEQ ID NO: 228078 - DNA, 245 bp, Artificial Sequence
  derived and/or modified sequence
ccacccgtacggcagcgcggcctacccgtaccagctcaacgaccccgcgtaccgcaagaacgccacgcgggacgccacggccactctcaaggcctggctcaacgagcaccgcaagaacccctaccccaccaagggcgagaagatcatgctagccatcatcaccaagatgaccctcacccaggtctccacctggttcgccaacgcgcgccggcgcctcaagaaggagaacaagatgacctgggccc

SEQ ID NO: 228079 - DNA, 1416 bp, Artificial Sequence
  derived and/or modified sequence
atgtcatacccgcagggatacctttaccaggcaccaggctctctggccctgtactcctgccccgcgtacggggcatcggcactcgctgctccccgctccgaggagctagctaggagtgcatcaggtagcgcattctccccatatcctggcagcgcagctttcaccgcgcaagctgccaccggattcgggtctcccctccagtactccgccgatgcggctgccgccgctgccgggttccccagttacatgggcgccccttacgatgctcataccacaggtatgactggggcaatctcttaccacccatacggctcggcggcctacccataccaattgaacgaccccgcctataggaagaacgccactcgggatgccacggccacactcaaggcctggttaaacgaacatcgcaaaaacccctatccgactaaaggcgaaaagataatgctggcaatcatcacaaagatgacactaacccaggtcagcacatggttcgcgaacgctaggaggagacttaagaaagagaacaagatgacctgggcaccacgcaacaaatccgaagacgaggacgaagacgaaggcgatgcaactcgttctaaagatgagtctccagacaaagcacaggaaggaacagagaccagtgcagaagatgagggtatctcgttgcacgtggacagtctgaccgaccatagctgctccgccgaatccgacggggaaaagctgccctgtagggcaggcgatccactgtgtgagtccggttccgagtgtaaagataaatacgacgacctggaggacgacgaggatgatgatgaagaaggcgagagagggttggctcctccaaagccagtcacttcgagccctctgaccggactggaggccccactgctgtcgcctcccccagaggcagccccaaggggaggtcggaagacacctcaggggtcacggaccagccctggagctccacctccggcctcaaaacccaaactctggtccttggccgagatcgcaactagcgacctgaaacagccaagcctgggcccgggctgcggaccccccgggttgccagccgcggcagcccccgcttcgaccggcgctccccccggaggaagcccctaccccgccagcccgctgctgggtcgcccattatactatacatccccgttctatggtaactatacaaattatgggaacctgaacgctgcacttcagggccaaggtttgctgcggtacaattccgcggctgctgctccaggcgaggcccttcacaccgcacccaaggcagcgtccgatgctggaaaagcaggagctcatccactggaaagtcattacaggtcaccaggggggggctatgaaccaaagaaagacgcctcagagggatgtaccgttgtgggcggaggggtgcagccatacctgtag

SEQ ID NO: 228080 - DNA, 1416 bp, Artificial Sequence
  derived and/or modified sequence
atgagttacccacaggggtacctgtaccaggcacctggttccctagccctatactcatgcccggcctatggagcctctgcacttgcagctcctagatcagaggagcttgccagaagcgccagcggttccgccttctccccctacccaggatccgccgctttcaccgcacaggctgcaaccgggtttggcagccccctccagtatagcgccgatgccgcagcagcagccgctggctttccatcttatatgggcgctccctacgatgcccatacgaccggcatgacaggggcgatttcttaccacccctacggctcggctgcttatccttatcagctgaatgacccggcatacaggaaaaatgccacacgggatgccaccgccactttaaaggcatggttgaatgaacacagaaaaaacccataccctaccaagggggagaagatcatgctggccatcattactaagatgaccctgactcaggtctctacctggtttgctaacgctagacgacgcttgaaaaaggagaataagatgacttgggccccaaggaacaaaagcgaggatgaggacgaggatgagggggacgctacacggtctaaggatgaatcgccagacaaagctcaagaaggcacagaaaccagcgccgaggatgaagggatcagcctgcacgtggactccttgacggatcactcatgctctgccgagagcgacggagagaaactgccatgcagggcaggggatcccctgtgcgagtcaggaagcgagtgtaaggacaaatacgacgatctcgaagacgacgaggacgacgatgaggaaggagagcggggattagcccctcccaagcccgtgacctcttcaccacttacaggactcgaggcccctcttctttctccccctccagaggccgcccctaggggaggcaggaagaccccgcagggatctcgcacgagccccggggctccgcctcctgcatccaaaccaaaactgtggagcctggctgagattgcaacatctgatttgaagcaaccttcacttggaccaggctgcggccctcctggattacccgccgccgcggccccagcttccactggagccccccccgggggctctccttatcctgcaagtccattgcttggtcggcccctgtactatacatcacctttttatgggaactataccaattatggaaacttgaatgccgccctgcagggccagggcctgcttcgatataattcggcggcagctgccccaggagaggccctgcatacagcaccaaaggccgcctccgacgccggaaaggcaggtgcccatccccttgagtcacattaccgttctcctgggggagggtacgaacctaagaaagacgcctctgagggctgcaccgtcgtgggaggaggagtgcaaccatacctgtag

SEQ ID NO: 228081 - DNA, 2456 bp, Artificial Sequence
  derived and/or modified sequence
aaaccccgaccgccggcctggcgcgcggctgcgcccaccggctccgcgctgctgccgccgccaccgccaccccgccgccgccccggcccgcgggccgcccaggctagtacccgggccggcctgcctccgccggccgtccgggtgcccgccgccgcgccgcgccccggccgggcgtggatggagggcgccgcgcgccctgcccgctgctcggcgtgacgcgggccccgcgccccgcgcccaccatgtcctacccgcagggctacctgtaccaggcgcccggctcgctggcgctctactcgtgcccggcctacggcgcgtcggctttggcggctccgcgcagcgaggagctggcgcgctcggcgtcgggctcggcgttcagcccctacccgggctcggcggccttcacggcgcaggcggccaccggcttcgggagcccgctgcagtactcggccgacgccgccgccgccgccgccggcttcccgtcctacatgggcgcaccctacgacgcgcacaccaccggcatgaccggcgccatcagctaccacccgtacggcagcgcggcctacccgtaccagctcaacgaccccgcgtaccgcaagaacgccacgcgggacgccacggccactctcaaggcctggctcaacgagcaccgcaagaacccctaccccaccaagggcgagaagatcatgctagccatcatcaccaagatgaccctcacccaggtctccacctggttcgccaacgcgcgccggcgcctcaagaaggagaacaagatgacctgggccccgagaaacaaaagcgaagatgaggacgaggacgagggcgacgctaccagaagcaaggacgagagtcccgacaaggcgcaggagggcacggagacctcggcagaggacgaagggatcagcctgcacgtggactcgctcacggatcactcgtgctcggccgagtcggacggggagaagcttccgtgccgcgccggggaccccctgtgcgaatcgggctcggagtgcaaggacaagtatgacgacctggaggacgacgaggacgacgacgaggagggcgagcggggcctggcgccgcccaagcccgtgacctcgtcgccgcttaccggcttggaggcgccgctgctgagccccccgcccgaggccgcgccccgcggtggccgcaagacgccccagggcagccggacgtctccgggcgcgccgccccccgccagcaagcccaagctgtggtcgctggccgagatcgccacgtcggacctcaagcagccgagcctgggcccgggctgcgggccaccggggctgcccgcggccgccgcgccggcctcaaccggggcaccgccaggaggctcgccctaccctgcctcgccgctgctgggccgccccctctactacacgtcgcccttctacggcaactacacaaactacgggaacttgaacgcggcgctgcagggccagggtctcctgcggtacaactctgcggccgcggcccccggcgaggccctgcacaccgcgccaaaggcggccagcgacgcgggcaaggcgggcgcgcacccgctcgagtcccactaccggtccccgggcggcggctacgagcccaagaaagatgccagcgagggctgcaccgtggttggcgggggcgtccagccctacctatagaagggccgagcacagcaatgcaagtaagtgggcaccctggtgcttcccagaccctgtggagcctcccagcaccaacttgcttaatgtgtttttcttgcttctggtcatggggttagaagacagagcatttcaatcttgtccagcttttctttccttaagggggaaactatattttctgttttatagattccctctttttggcacaagttctatcactcctttacctagggaaggaaaaaaaaaatatatatatatatgtgtgtgtgtgtgtgtgtaatatatatatgtatatatatagtacatgtatatatatagtacatgtgtatatatatattacacactactgttgttttcttttgaaacaatagattattaaaatctgggcatttatatgcaatttagagccatttttactatgctagacacataatagacacatgctttgatgagcttgggctaccaaaacttggagtagcaaaaacctttatagatgatgtttgcaaaataagactgaagagacacgaggcgtactagtcttttatcagccctgtccaacctcccctccacccatgtccaagtggacaggactctgacattctcccggggctcacaacagtatctcaaaaaatatgttgctttgcaacgagtcagaattactaatcatagatcttgaagataagaaagatttggaaccacttcagatcaactcgtttttataatggtgttgttgtggaactgaaagattggggatgatttggttttttccttggtccacaggtaggtgtcacaattgctttg

SEQ ID NO: 228082 - DNA, 2630 bp, Artificial Sequence
  derived and/or modified sequence
ctcccccaaaccccgaccgccggcctggcgcgcggctgcgcccaccggctccgcgctgctgccgccgccaccgccaccccgccgccgccccggcccgcgggccgcccaggctagtacccgggccggcctgcctccgccggccgtccgggtgcccgccgccgcgccgcgccccggccgggcgtggatggagggcgccgcgcgccctgcccgctgctcggcgtgacgcgggccccgcgccccgcgcccaccatgtcctacccgcagggctacctgtaccaggcgcccggctcgctggcgctctactcgtgcccggcctacggcgcgtcggctttggcggctccgcgcagcgaggagctggcgcgctcggcgtcgggctcggcgttcagcccctacccgggctcggcggccttcacggcgcaggcggccaccggcttcgggagcccgctgcagtactcggccgacgccgccgccgccgccgccggcttcccgtcctacatgggcgcaccctacgacgcgcacaccaccggcatgaccggcgccatcagctaccacccgtacggcagcgcggcctacccgtaccagctcaacgaccccgcgtaccgcaagaacgccacgcgggacgccacggccactctcaaggcctggctcaacgagcaccgcaagaacccctaccccaccaagggcgagaagatcatgctagccatcatcaccaagatgaccctcacccaggtctccacctggttcgccaacgcgcgccggcgcctcaagaaggagaacaagatgacctgggccccgagaaacaaaagcgaagatgaggacgaggacgagggcgacgctaccagaagcaaggacgagagtcccgacaaggcgcaggagggcacggagacctcggcagaggacgaagggatcagcctgcacgtggactcgctcacggatcactcgtgctcggccgagtcggacggggagaagcttccgtgccgcgccggggaccccctgtgcgaatcgggctcggagtgcaaggacaagtatgacgacctggaggacgacgaggacgacgacgaggagggcgagcggggcctggcgccgcccaagcccgtgacctcgtcgccgcttaccggcttggaggcgccgctgctgagccccccgcccgaggccgcgccccgcggtggccgcaagacgccccagggcagccggacgtctccgggcgcgccgccccccgccagcaagcccaagctgtggtcgctggccgagatcgccacgtcggacctcaagcagccgagcctgggcccgggctgcgggccaccggggctgcccgcggccgccgcgccggcctcaaccggggcaccgccaggaggctcgccctaccctgcctcgccgctgctgggccgccccctctactacacgtcgcccttctacggcaactacacaaactacgggaacttgaacgcggcgctgcagggccagggtctcctgcggtacaactctgcggccgcggcccccggcgaggccctgcacaccgcgccaaaggcggccagcgacgcgggcaaggcgggcgcgcacccgctcgagtcccactaccggtccccgggcggcggctacgagcccaagaaagatgccagcgagggctgcaccgtggttggcgggggcgtccagccctacctatagaagggccgagcacagcaatgcaagtaggtgtcacaattgctttgaaaaaaaaaaaaaaaaaaaagtcagcaggccattctctcttcccaagctcataaatttacagatacaacaaacagatgtctaaatccagaccacatcttgtgccactgtaaaagagaaggatccacacagcactgtcagcccacagactctaacaattggaacagactattgttggacatatgtgaatttgttggcatagtatagtttccccgatgtatgtgtgacttttgaaaacaatctgtttttctcaggatatcttgaattgatcacttcattgccacggtatatattctataggtgtgataggatttactgtaaagtttatttgtaaaagatgtacacagtagaaataaaacgtgatggaagaacttgagtacttcagaagtggaaacaaatttgatatttatttttataatgatataaagcttctagtaatttatgcaagttgtattgcaatggaatctaaactttttgtaaataaattctgcctggtttttatttgaacattgctggttatacaatctttgttggttgtttaacacgaattctttactaatttatatcttaaattgtaaataaaaacagactagtctacaataatatgatgtttggggcttatttttcctagaagaatgatttggggtagagcgctagtgaataacctccaggtgatctgacctcacctttttaatgaaaacctgtgtgaaataaactctcctttctctcctgagcattgaaaaaaaaaaaaaaaggcagatggaagagaagtatataatcgggagaaacatgtgctgtagatgatttctatacaggtattgcaaaaaaaccaaaaaacataagatttttgtgccctgagtgtgctaattacttgttagtgtaaatttttaaaacttggcaaaataaaatgatctgacacccta

SEQ ID NO: 228083 - DNA, 1416 bp, Artificial Sequence
  derived and/or modified sequence
atgagctacccccagggctacctgtaccaggcccctggcagcctggccctgtacagctgcccagcctatggagccagcgccctggccgcccccaggtctgaggagctggcccggagcgccagcggcagcgccttcagcccctacccaggcagcgctgccttcaccgcccaggccgccaccggcttcggcagccccctgcagtacagcgcagatgctgctgctgctgctgctggcttccccagctacatgggcgccccctatgatgcccacaccaccggcatgactggagccatctcctaccacccctacggcagcgctgcctacccctaccagctgaatgaccctgcctacaggaagaatgccaccagagatgccacagccaccctgaaggcctggctgaatgagcacaggaagaacccctaccccaccaagggggagaagatcatgctggccatcatcaccaagatgaccctgacccaggtgtccacctggtttgccaatgcccggcggcggctgaagaaggagaacaagatgacctgggcccccaggaacaagtcagaagatgaagatgaagatgaaggagatgccaccaggagcaaggatgagagcccagacaaggcccaggagggcacagagaccagcgcagaagatgagggcatcagcctgcacgtggacagcctgacagaccacagctgcagcgctgagagtgatggagagaagctgccctgcagagctggggaccccctgtgtgagagcggcagcgagtgcaaggacaagtatgatgacctggaggatgatgaagatgatgatgaggagggggagcggggcctggccccacccaagcctgtgaccagcagccccctgaccggcctggaggcccccctgctgagccccccacctgaggccgccccccggggcggcaggaagaccccccagggcagcaggaccagccctggggcccctcctccagccagcaagcccaagctgtggagcctggccgagatcgccaccagtgacctgaagcagcccagcctgggccctggctgcggccccccaggcctgcctgctgctgctgccccagccagcactggagcccctcctgggggcagcccctacccagccagccccctgctgggccggcccctgtactacaccagccccttctacggcaactacaccaactacggcaacctgaatgctgccctgcagggccagggcctgctgcgctacaacagcgctgctgctgcccctggagaggccctgcacacagcccccaaggccgccagtgatgctgggaaggccggggcccaccccctggagagccactaccgcagccctgggggcggctatgagcccaagaaggatgccagcgagggctgcaccgtggtgggcggcggcgtgcagccctacctgtag

SEQ ID NO: 228084 - DNA, 1416 bp, Artificial Sequence
  derived and/or modified sequence
atgagctacccccagggctacctgtaccaggcccccggcagcctggctctgtacagttgccctgcttatggcgcaagcgcattagctgccccccgcagtgaggaactagctcgaagcgcatctgggtcagccttcagcccctaccccggctcggcggcgttcacggcgcaggccgcaactgggttcggttcgcctttacagtactctgctgacgccgccgctgcggcagcaggctttccatcttacatgggagcaccatacgacgcacacactactgggatgaccggcgcaattagttatcatccatacggatctgctgcttacccataccagttgaacgatcctgcctataggaagaatgccaccagagacgccacagcaaccctgaaggcatggttaaatgagcacagaaaaaacccctatcctactaagggagagaaaatcatgctagccattattacgaaaatgactctgacacaggtttccacctggttcgctaacgcacgtagaaggctcaagaaagaaaacaagatgacttgggctccccgtaataagagcgaagacgaagatgaggacgagggcgacgctactagatcaaaagacgaatcacccgataaggcccaggaaggtactgaaacaagcgctgaagatgaagggatttcattgcatgtagacagcttgacagaccactcctgctcggctgaatcggacggcgaaaaactgccgtgccgggccggggaccccttatgtgaatccggaagcgaatgtaaggataagtatgatgacttggaggatgatgaggatgacgatgaagagggagagcgggggctggcccctcctaagcctgttacaagttctcctctgactggtctggaagcccccctcctatccccacccccagaggcagcccctcgggggggaaggaagacgccccaggggtcccggacatccccgggcgcaccacctcctgcctcaaagccaaagttgtggtccctcgccgaaattgccacctccgacctgaaacaaccatccctgggaccgggttgtggacctcctgggttgcccgcggctgctgccccagcttcaaccggtgcccccccaggcggcagcccctaccctgcttccccgttgctcgggaggcccctctactatacgtcccctttttacgggaactatactaattacgggaacctgaatgccgccttgcaggggcagggccttctgagatataattctgccgccgcagctcctggggaagctctgcacacagctcccaaggcggccagtgacgccgggaaggcaggagcgcatccacttgagagccactatcgctctcccggcggcggttacgagcccaagaaagacgcctccgaaggatgcaccgtcgtgggagggggagtgcagccctatctgtag

SEQ ID NO: 228085 - DNA, 1416 bp, Artificial Sequence
  derived and/or modified sequence
atgagctacccccagggctacctgtaccaggcccccggcagcctggcgctttactcatgtccggcatatggagcttctgcccttgctgcccctcgaagcgaggaattagcccgctcagcatctgggtccgctttcagcccttaccccgggagtgctgcattcacggctcaggcagccactggctttgggtcaccacttcagtattccgcagacgctgctgccgccgctgccggtttcccttcgtatatgggagcaccctacgatgctcataccacggggatgaccggtgctatctcttatcatccgtacggcagcgccgcctacccctatcagctaaacgatcctgcctatcggaaaaatgcaaccagggacgccaccgcgacactcaaggcttggctgaacgagcaccgcaagaacccgtacccaaccaagggcgaaaagattatgttggcaatcatcaccaagatgacgctgacacaggtgtcaacttggttcgccaacgcgaggcgccgcttgaagaaggagaacaagatgacgtgggccccacggaacaagtccgaggatgaagacgaagatgagggggacgcaacgcgctcaaaagacgaatcccctgataaagcccaggaagggacggagacgagcgcagaggacgagggtatctccctccatgttgacagcctcacagatcattcctgtagtgctgaaagtgatggagaaaagctaccatgccgggcaggggaccctctgtgtgagagtggcagcgaatgtaaggacaaatacgatgacctagaagatgacgaggacgatgatgaagaaggcgaacgaggattggccccaccgaaacctgtaaccagttcaccactgacggggctggaagcacctttgctgagcccccccccggaggctgctcccagaggagggagaaaaaccccgcagggctctcggacgtcccctggtgctccccccccagcaagtaaacctaagttgtggtctttggccgaaatagcaactagtgatttaaaacagccctcactcggccccggatgtgggccccccggtctgccagcagccgcggctccagcttctaccggcgcaccacctgggggctctccctaccccgcatctccactgctgggtcgccccctctattatactagtcctttttatggcaattacactaactatggcaacttaaatgcagctctgcagggccaaggattactcaggtacaattccgccgccgcggctcccggtgaagctcttcacacagcccccaaagccgcatcggacgctggcaaagcaggcgcccacccactcgagtcccattatcgttccccgggtggaggttacgagcctaagaaggatgctagtgaggggtgcaccgttgtgggcggcggggtgcagccatatctttag

SEQ ID NO: 228086 - DNA, 1416 bp, Artificial Sequence
  derived and/or modified sequence
atgtcctaccctcagggatatctgtaccaggcccctggatcactggccctgtactcctgccctgcatacggagccagtgccttagcagcacctcggtccgaggagctagcaaggtccgcatcgggctctgccttctctccttatccagggagtgccgcttttacagcccaggcggctactggcttcggaagtcctctgcagtatagtgctgatgcagccgctgccgctgcgggatttccctcatacatgggggctccttacgacgctcacaccacaggaatgacaggcgctatctcctatcacccgtatggatccgccgcatacccctatcagttgaacgaccccgcttacaggaagaatgccacccgtgacgctacagcaacactgaaagcctggctaaacgaacaccgtaaaaacccttatcctacgaagggcgaaaaaatcatgctggccatcatcactaaaatgacactgacccaggtgtccacctggtttgccaacgctagaaggcgcctgaagaaagaaaataaaatgacttgggcccctcggaataagagcgaggacgaagacgaggatgagggcgatgcgaccaggtccaaagacgagagtccggacaaagcgcaggagggaactgagacctctgcggaggacgaaggcatcagtctgcatgttgatagtttgactgaccattcatgcagtgccgagagcgatggcgagaagttgccctgccgtgccggagatccactgtgcgagtccggatccgagtgtaaggacaaatacgatgatctggaggatgacgaggatgacgacgaggaaggcgagaggggcctggcaccacctaagcctgtcacatcaagccccctgaccggtctggaagcacctttgctctcccctcccccagaagccgctccacggggaggccgaaagactccccagggctcaagaacttctcctggtgccccaccacccgcatccaagcctaagctgtggtccctcgctgaaatcgcaacatcagatctgaaacagccatcacttggaccgggatgcgggccaccaggcctccccgctgctgctgccccagcctcgacgggcgctccgccaggcggatccccataccctgcctctcccctactcggcagacccttatactacacctcccccttttacgggaactacacaaattatggaaacctaaatgccgctctgcaaggtcagggattgctgagatacaattctgccgctgcagcccctggtgaggctctccacactgctcccaaggcagcttcagacgccggtaaggctggtgctcatcccctcgaaagccattacagaagtcccggaggtggctatgaacccaaaaaggacgcctcggaaggctgcacggtggtcggcggaggagtccagccctatctgtag

SEQ ID NO: 228087 - DNA, 1416 bp, Artificial Sequence
  derived and/or modified sequence
atgagctacccacaggggtacctgtatcaagcgcctgggtcactagccctttactcctgcccagcatatggagccagcgctcttgccgctcccaggtcagaagaacttgccagaagcgcctcagggagtgcattcagcccctaccccggatcagccgctttcaccgcccaagctgccaccggtttcggctcccctttgcagtactctgcagacgcagctgctgcagctgcgggattcccatcctatatgggggctccctacgatgcccatacaactggcatgacaggggctatcagctatcacccatatggatcagccgcttacccgtaccagcttaacgatcccgcttaccggaaaaatgcaactcgggacgctactgccactctgaaggcatggcttaacgagcaccgcaagaatccataccccactaagggagaaaaaatcatgctggccataatcaccaagatgaccttgacccaggtttcaacttggttcgccaatgcgcgaaggcgccttaaaaaggagaacaaaatgacctgggcccctaggaacaaatctgaggatgaggacgaggatgaaggggacgcaaccagaagtaaagacgaaagccctgataaagcacaggagggcacggagacatccgctgaagacgagggcatttcactgcatgtggatagcctgacagaccattcctgcagcgctgagagtgacggggagaagcttccatgcagagctggcgacccactttgcgagtctggctccgagtgtaaagataagtacgacgacctggaggacgatgaagatgatgatgaggaaggcgagagaggcctggcaccccctaaaccagttacctccagcccactgaccggattagaggccccactcttgagcccaccacctgaagccgctcctcgcggagggcgaaaaactcctcaggggagccgcactagccccggagcccctcccccagccagcaagcccaagctgtggtctctggcagagatcgccacttctgacttgaagcagccctcactgggacccggatgtggcccacctgggcttcccgctgccgcagctcccgcaagcacgggagcccctccgggtggtagcccatatccagcttcccccctgctgggacgtccgctatactacacctctccattttacggcaattacacgaactatgggaatcttaacgccgcactccagggtcagggccttctgagatacaatagtgctgctgccgctcctggtgaagcattgcacactgcccctaaagctgccagcgatgcaggcaaggcaggtgcacacccccttgagagtcactatcgctcaccaggtggcggttacgagccgaaaaaagatgcctctgaagggtgtaccgtcgtcggcggaggtgtgcagccctacctgtag

SEQ ID NO: 228088 - DNA, 1416 bp, Artificial Sequence
  derived and/or modified sequence
atgagctacccccagggctacctgtaccaggcccccggcagcctggccctgtacagctgccccgcctacggcgccagcgccctggccgcccccagaagcgaggagctggccagaagcgccagcggcagcgccttcagcccctaccccggcagcgccgccttcaccgcccaggccgccaccggcttcggcagccccctgcagtacagcgccgacgccgccgccgccgccgccggcttccccagctacatgggcgccccctacgacgcccacaccaccggcatgaccggcgccatcagctaccacccctacggcagcgccgcctacccctaccagctgaacgaccccgcctacagaaagaacgccaccagagacgccaccgccaccctgaaggcctggctgaacgagcacagaaagaacccctaccccaccaagggcgagaagatcatgctggccatcatcaccaagatgaccctgacccaggtgagcacctggttcgccaacgccagaagaagactgaagaaggagaacaagatgacctgggcccccagaaacaagagcgaggacgaggacgaggacgagggcgacgccaccagaagcaaggacgagagccccgacaaggcccaggagggcaccgagaccagcgccgaggacgagggcatcagcctgcacgtggacagcctgaccgaccacagctgcagcgccgagagcgacggcgagaagctgccctgcagagccggcgaccccctgtgcgagagcggcagcgagtgcaaggacaagtacgacgacctggaggacgacgaggacgacgacgaggagggcgagagaggcctggccccccccaagcccgtgaccagcagccccctgaccggcctggaggcccccctgctgagccccccccccgaggccgcccccagaggcggcagaaagaccccccagggcagcagaaccagccccggcgcccccccccccgccagcaagcccaagctgtggagcctggccgagatcgccaccagcgacctgaagcagcccagcctgggccccggctgcggcccccccggcctgcccgccgccgccgcccccgccagcaccggcgccccccccggcggcagcccctaccccgccagccccctgctgggcagacccctgtactacaccagccccttctacggcaactacaccaactacggcaacctgaacgccgccctgcagggccagggcctgctgagatacaacagcgccgccgccgcccccggcgaggccctgcacaccgcccccaaggccgccagcgacgccggcaaggccggcgcccaccccctggagagccactacagaagccccggcggcggctacgagcccaagaaggacgccagcgagggctgcaccgtggtgggcggcggcgtgcagccctacctgtag

SEQ ID NO: 228089 - protein, 1196 aa, Artificial Sequence
  derived and/or modified sequence
MPVRRGHVAPQNTFLGTIIRKFEGQNKKFIIANARVQNCAIIYCNDGFCEMTGFSRPDVMQKPCTCDFLHGPETKRHDIAQIAQALLGSEERKVEVTYYHKNGSTFICNTHIIPVKNQEGVAMMFIINFEYVTDNENAATPERVNPILPIKTVNRKFFGFKFPGLRVLTYRKQSLPQEDPDVVVIDSSKHSDDSVAMKHFKSPTKESCSPSEADDTKALIQPSKCSPLVNISGPLDHSSPKRQWDRLYPDMLQSSSQLSHSRSRESLCSIRRASSVHDIEGFGVHPKNIFRDRHASEDNGRNVKGPFNHIKSSLLGSTSDSNLNKYSTINKIPQLTLNFSEVKTEKKNSSPPSSDKTIIAPKVKDRTHNVTEKVTQVLSLGADVLPEYKLQTPRINKFTILHYSPFKAVWDWLILLLVIYTAIFTPYSAAFLLNDREEQKRRECGYSCSPLNVVDLIVDIMFIIDILINFRTTYVNQNEEVVSDPAKIAIHYFKGWFLIDMVAAIPFDLLIFGSGSDETTTLIGLLKTARLLRLVRVARKLDRYSEYGAAVLMLLMCIFALIAHWLACIWYAIGNVERPYLTDKIGWLDSLGQQIGKRYNDSDSSSGPSIKDKYVTALYFTFSSLTSVGFGNVSPNTNSEKIFSICVMLIGSLMYASIFGNVSAIIQRLYSGTARYHMQMLRVKEFIRFHQIPNPLRQRLEEYFQHAWTYTNGIDMNMVLKGFPECLQADICLHLNQTLLQNCKAFRGASKGCLRALAMKFKTTHAPPGDTLVHCGDVLTALYFLSRGSIEILKDDIVVAILGKNDIFGEMVHLYAKPGKSNADVRALTYCDLHKIQREDLLEVLDMYPEFSDHFLTNLELTFNLRHESAKADLLRSQSMNDSEGDNCKLRRRKLSFESEGEKENSTNDPEDSADTIRHYQSSKRHFEEKKSRSSSFISSIDDEQKPLFSGIVDSSPGIGKASGLDFEETVPTSGRMHIDKRSHSCKDITDMRSWERENAHPQPEDSSPSALQRAAWGISETESDLTYGEVEQRLDLLQEQLNRLESQMTTDIQTILQLLQKQTTVVPPAYSMVTAGSEYQRPIIQLMRTSQPEASIKTDRSFSPSSQCPEFLDLEKSKLKSKESLSSGVHLNTASEDNLTSLLKQDSDLSLELHLRQRKTYVHPIRHPSLPDSSLSTVGIVGLHRHVSDPGLPGK

SEQ ID NO: 228090 - DNA, 3591 bp, Artificial Sequence
  derived and/or modified sequence
atgcccgtcaggagagggcacgtcgccccgcaaaatacattcttgggcaccatcatacgcaaattcgaagggcagaacaaaaagttcatcattgccaacgcacgggtccagaactgcgcaattatatactgcaatgatgggttctgcgagatgacaggcttcagtaggccagatgtgatgcagaaaccctgcacatgcgattttctgcacggccccgagacaaagaggcatgacattgcacagatcgctcaggcgctactcgggagcgaggagaggaaggtggaagtgacgtattatcacaagaacggctcaacattcatttgtaacacacacattattcccgttaagaatcaggagggggtcgctatgatgttcataattaattttgaatatgtgaccgacaatgagaacgctgcaacccccgagcgcgtgaatccaatcttgcctatcaaaaccgtgaacagaaagttttttggattcaagtttccaggtctcagggtgctgacctatagaaagcagtctctaccccaggaagatcccgatgtggtggtgattgattcatccaaacattctgacgactccgtggcaatgaagcacttcaaatctcccacaaaggagagttgctcaccatcagaggccgatgataccaaggccttaatccagccatcaaaatgctcacctcttgtaaatatctctggcccactcgatcattcgtcccccaagagacagtgggatcggctttacccagacatgctgcagagttcaagccagctttcacactctcggtctagagagtctctctgcagtatacggcgtgccagcagtgtacatgacatagagggatttggcgtccacccaaaaaatatcttccgggaccggcatgcgtctgaggacaacggcagaaacgtaaaagggccgtttaaccatatcaagtcctcactgctggggagtacctcagatagcaacctcaataaatacagtacgattaacaagattccacagctgaccctgaatttttccgaagtaaagaccgaaaagaaaaacagctcaccccctagcagtgacaagacaattatagcccccaaggtgaaggaccggacacacaacgtcacggagaaagttacacaggtcctctcccttggagctgacgtgctccccgagtacaaactgcagactccacgtattaacaagttcacgatcttgcactattcgccattcaaagcagtgtgggactggctgatcctcctgctggttatctacacggcaatttttacaccgtacagcgctgcatttctgctaaacgacagagaggaacagaagaggcgggagtgtggctattcgtgcagccccttgaatgtggtcgacctcattgtggacatcatgttcattatcgacattcttattaatttcaggaccacttacgtgaatcagaacgaagaagtggtgagtgaccctgcaaaaattgccatccactacttcaagggatggtttctgattgacatggtggccgccattccctttgaccttctgatctttgggagcggctctgacgagacgactacactcatcggcctcctgaagacagcaaggcttctccgcctggtacgcgtcgcacgtaagcttgacaggtactccgagtatggagccgcggtgttgatgttgctcatgtgcatttttgcattgattgcccactggctggcgtgtatttggtatgctataggcaacgtggagcggccatacctcacagataaaatcggttggctggacagcttaggtcaacaaatcgggaaacggtacaacgacagtgatagctcttcaggacccagcatcaaggataagtacgtcacggcgctttacttcaccttcagttctctgacatccgtcggctttggtaacgtatcgcctaataccaactccgaaaagatcttctctatctgtgtgatgcttatcgggagtttaatgtacgcctcgatatttggtaatgtgtcagccatcatccagcggctctactccgggaccgcccggtaccacatgcagatgctacgagtaaaggagttcatcagattccatcaaattccaaatcctctaaggcagcggttggaggaatatttccagcatgcatggacctatacaaatggcattgacatgaatatggtcctcaagggattcccggaatgtctgcaggcagatatctgtcttcatcttaatcagacactgctgcaaaactgcaaagcttttcggggggcatcgaaaggttgtcttcgagccctagccatgaaatttaaaacaactcacgccccaccaggagatacactggtacattgtggcgacgttctgactgcgttatacttcctgtccagagggtctatagagatccttaaagatgatatcgtggttgcaattctgggaaagaatgacatttttggtgagatggtgcacttgtacgctaaacctgggaaaagtaatgccgacgtgcgagctctgacctactgcgacttgcacaagatacaacgcgaggatctcttggaggtgttggatatgtacccagagtttagtgatcatttcctaactaacctggagttaactttcaacctaaggcacgagtccgccaaagcagatctgttgcggagccagtccatgaacgactctgaaggcgacaattgcaagctccgaaggaggaaactgagcttcgagagcgaaggagaaaaggaaaattccacgaatgacccagaggactctgccgacacgatcagacattaccagtcaagcaagcgccatttcgaggaaaaaaaaagtcggagctccagcttcattagttcaattgacgacgaacagaagccactattcagtggcattgtggacagctctccaggcattggaaaggccagtggcttggatttcgaagagacagtgcctacctctgggagaatgcacattgacaagagatctcactcttgtaaggacatcacagacatgcgcagctgggagagggaaaatgcgcatccacagccagaagacagttccccatcagcccttcagagagcagcctggggaatcagtgagacggaatccgatctgacttatggagaggttgaacagcggctggatctgttgcaggagcagctgaataggttggaaagccagatgactactgacatccagacaatactccaactgctacagaaacagaccaccgtcgtcccacccgcctacagtatggtgaccgccggatctgagtaccagagaccgattattcagctgatgaggacatcccagcccgaagcttcaatcaaaaccgaccgcagctttagcccttctagccagtgccccgaatttctggacctggaaaagtcaaaactgaagtcaaaagaaagcctgtcctctggcgtacacctcaacacagccagcgaggataatctgaccagcctcctaaagcaggatagtgacttgagcctagagctgcacctgaggcaacgcaagacgtacgttcaccctatcagacacccatctttgccagactcatcactgtccaccgtgggcatcgtcggacttcacagacatgtatccgacccaggattgccaggaaagtag

SEQ ID NO: 228091 - DNA, 3591 bp, Artificial Sequence
  derived and/or modified sequence
atgcctgtgcggcggggccacgtggccccccagaacaccttcctgggcaccatcatcaggaagtttgagggccagaacaagaagttcatcatcgccaatgcccgggtgcagaactgtgccatcatctactgcaatgatggcttctgtgagatgacaggcttcagcaggccagatgtgatgcagaagccctgcacctgtgacttcctgcacggccctgagaccaagagacatgacatcgcccagatcgcccaggccctgctgggcagcgaggagaggaaggtggaggtgacctactaccacaagaatggcagcaccttcatctgcaacacccacatcatccctgtgaagaaccaggagggcgtggccatgatgttcatcatcaactttgaatatgtgacagacaatgaaaatgctgccaccccagagcgggtgaaccccatcctgcccatcaagacagtgaacaggaagttcttcggcttcaagtttcctggcctgcgggtgctgacctacaggaagcagagcctgccccaggaggaccctgatgtggtggtgattgacagcagcaagcacagtgatgacagcgtggccatgaagcacttcaagagccccaccaaggagagctgcagccccagcgaggctgatgacaccaaggccctgatccagcccagcaagtgcagccccctggtgaacatcagcggccccctggaccacagcagccccaagaggcagtgggaccggctgtacccagacatgctgcagagcagcagccagctgagccacagccgcagccgggagagcctgtgcagcatcagaagagccagctctgtgcatgacatcgagggcttcggcgtgcaccccaagaacatcttccgggacagacatgcctctgaagataatggaagaaatgtgaagggccccttcaaccacatcaagagcagcctgctgggcagcaccagtgacagcaacctgaacaagtacagcaccatcaacaagatcccccagctgaccctgaacttcagcgaggtgaagacagagaagaagaacagcagcccccccagcagtgacaagaccatcatcgcccccaaggtgaaggacaggacccacaacgtgacagagaaggtgacccaggtgctgagcctgggcgcagatgtgctgcctgagtacaagctgcagaccccccgcatcaacaagttcaccatcctgcactacagccccttcaaggctgtgtgggactggctgatcctgctgctggtgatctacacagccatcttcaccccctacagcgctgccttcctgctgaatgaccgggaggagcagaagagaagagaatgtggctacagctgcagccccctgaatgtggtggacctgattgtggacatcatgttcatcatcgacatcctgatcaacttccgcaccacctacgtgaaccagaatgaggaggtggtgtctgaccctgccaagatcgccatccactacttcaagggctggttcctgattgacatggtggccgccatcccctttgacctgctgatcttcggcagcggcagtgatgagaccaccaccctgattggcctgctgaagacagcccggctgctgcggctggtgcgggtggccaggaagctggaccgctacagtgaatatggagctgctgtgctgatgctgctgatgtgcatctttgccctgattgcccactggctggcctgcatctggtacgccatcggaaatgtggagcggccctacctgacagacaagattggctggctggacagcctgggccagcagatcggcaagcgctacaatgacagcgacagcagcagcggccccagcatcaaggacaagtatgtgacagccctgtacttcaccttcagcagcctgacctctgtgggctttggaaatgtgagccccaacaccaacagcgagaagatcttcagcatctgtgtgatgctgattggcagcctgatgtatgccagcatctttggaaatgtgtctgccatcatccagaggctgtacagcggcacagcccgctaccacatgcagatgctgcgggtgaaggagttcatccgcttccaccagatccccaaccccctgcggcagaggctggaggagtacttccagcacgcctggacctacaccaacggcatcgacatgaacatggtgctgaagggcttcccagaatgtctgcaggccgacatctgcctgcacctgaaccagaccctgctgcagaactgcaaggccttccggggggccagcaagggctgcctgcgggccctggccatgaagttcaagaccacccacgcccctcctggggacaccctggtgcactgtggagatgtgctgacagccctgtacttcctgagccggggcagcattgagatcctgaaggatgacatcgtggtggccatcctgggcaagaatgacatctttggagagatggtgcacctgtatgccaagccaggcaagagcaatgctgatgtgcgggccctgacctactgtgacctgcacaagatccagcgggaggacctgctggaggtgctggacatgtacccagagttcagtgaccacttcctgaccaacctggagctgaccttcaacctgcggcatgaaagtgccaaggctgacctgctgcggagccagagcatgaatgattctgagggggacaactgcaagctgcggcggaggaagctgagctttgaaagtgaaggagagaaggagaacagcaccaatgaccctgaagattctgctgacaccatccgccactaccagagcagcaagaggcactttgaggagaagaagagccgcagcagcagcttcatcagcagcattgatgatgagcagaagcccctcttcagcggcatcgtggacagcagccctggcatcggcaaggccagcggcctggactttgaggagaccgtgcccaccagcggccgcatgcacatcgacaagaggagccacagctgcaaggacatcacagacatgaggtcctgggagcgggagaatgcccacccccagcctgaggacagcagccccagcgccctgcagagagctgcctggggcatcagcgagacagaaagtgacctgacctacggggaggtggagcagaggctggacctgctgcaggagcagctgaaccggctggagagccagatgaccacagacatccagaccatcctgcagctgctgcagaagcagaccaccgtggtgcccccagcctacagcatggtgacagctggcagcgagtaccagaggcccatcatccagctgatgaggaccagccagcctgaggccagcatcaagacagacaggagcttcagccccagcagccagtgcccagagttcctggacctggagaagagcaagctgaagagcaaggagagcctgagcagcggcgtgcacctgaacacagccagcgaggacaacctgaccagcctgctgaagcaggacagcgacctgagcctggagctgcacctgcggcagaggaagacctacgtgcaccccatccgccaccccagcctgcctgacagcagcctgagcacagtgggcatcgtgggcctgcacagacatgtgtctgaccccggcctgcccgggaagtag

SEQ ID NO: 228092 - DNA, 3591 bp, Artificial Sequence
  derived and/or modified sequence
atgcccgtgcggcggggccacgtggccccccagaacaccttcctgggcacaatcatccgcaaattcgaaggccagaacaagaagttcatcatcgcaaatgctagggtgcagaactgcgcaatcatctattgcaacgatggcttttgtgaaatgactggattcagcagacctgacgttatgcaaaagccttgcacctgcgattttctccacggccccgaaactaaacgtcacgacatcgcccaaattgcccaggctcttttaggtagtgaggagcgcaaggtggaagtgacctactatcacaagaatggcagcacatttatttgtaacactcacataatccccgtgaaaaatcaagaaggggtggctatgatgtttatcattaacttcgagtacgtcacggataacgaaaatgccgctaccccagaacgtgtaaaccctatactgccaattaaaacagtaaaccgcaaattctttgggttcaagtttcctggcctccgggtgcttacataccgcaaacagagtcttccacaggaggacccagatgtagtggttatcgactcgtccaagcattcagatgattctgttgcaatgaaacacttcaagtctcctacaaaggaatcatgctcgccctctgaggcagacgacactaaagctctgatacagccctccaagtgtagcccactcgtcaatatttctgggcctctggaccatagttctcccaagaggcagtgggatcggctgtacccagacatgctgcagtctagtagccaattgagccactccaggtccagagagtctctgtgcagtatcagaagagcctctagtgtacatgacatagagggcttcggggtccaccctaagaatatcttcagagacagacatgcttctgaagacaatggtcggaacgtcaaaggaccttttaaccatataaaatcttccctcctcggctccacctccgatagcaatctgaacaaatacagcaccattaacaagatcccacaactcacgctcaacttttccgaagtcaagacagaaaagaagaattcatcccctccaagctctgataaaacaatcatcgcacccaaggtcaaagacaggacccataacgtcaccgagaaagttacacaggtgctctccctcggcgcagacgtgcttcccgaatacaagctgcagactccgaggataaataagtttacaatcctccattatagtcccttcaaggccgtctgggattggctgattttgttactggtgatatataccgctatctttaccccttattccgccgcttttctattgaacgatcgagaggaacagaagcggagggaatgtggctactcatgtagccctcttaacgtggtcgatctgatcgtggacataatgttcattatagacatacttattaacttcagaaccacctacgtgaatcagaacgaggaagttgtcagcgatcctgctaagattgccattcactattttaagggttggtttctcattgacatggtcgcagcaattccatttgatctcctgatttttggctccggatcagacgagacgaccactttaatagggttgctcaagacggcccggttactgagactggtgagggtggcaaggaaactagataggtacagtgagtacggtgccgctgtgctcatgttgcttatgtgtatttttgcgctcattgcacactggttagcctgtatatggtatgcaataggaaacgtggagagaccctaccttactgataagataggatggctggactcactggggcagcagatagggaagcgttataatgatagtgactcatcgagtggcccaagtataaaggacaaatacgtgacagctttatatttcaccttttctagcttgacatcagtaggatttggaaacgtttcacccaacacaaacagcgagaagatcttttctatttgtgtaatgttaatagggtctctgatgtacgcgagcatctttgggaacgtctcggccattatccagcggctgtattctggaactgctagatatcatatgcagatgcttcgggttaaggagttcatcagattccatcagatccctaacccgctgcggcagagactggaggaatacttccagcacgcctggacatatacaaacggaatcgatatgaatatggtgctgaagggattccccgagtgcttgcaggcggacatttgcctgcacctcaatcagacactgctgcagaattgcaaagccttccgaggcgcctcaaaggggtgtctgcgcgcccttgccatgaagtttaagaccacacatgcaccccccggggacacactcgtacattgtggtgatgtgctcacagcattgtacttcttatctcgaggcagtatcgagatcctgaaagatgacatcgtggtggctatcctgggcaagaacgacatattcggcgagatggtacatttatacgccaaaccagggaagtccaacgccgacgtgagggctctcacgtactgcgatctccataaaatccagagagaggacctgctggaggtcctagacatgtatccagagttttccgaccactttcttacaaacttggagctgacctttaacctgcgacacgagtcagccaaggccgaccttttgcggagtcagagcatgaatgacagcgagggggataattgcaagcttaggcggcgcaagctgagcttcgaatccgagggggaaaaagaaaactccacaaacgatcctgaagatagcgctgataccatccgccattaccagtccagtaaacggcactttgaggagaagaagtccagatctagtagttttatcagttcaatcgatgatgagcaaaagccactctttagtggcatcgtggatagctctcctgggataggcaaagcatccgggctcgatttcgaggaaacagtccccaccagcggccgcatgcacatcgacaaaagatctcattcctgcaaagatattaccgatatgagaagctgggagcgggaaaatgcccatccacagcctgaagacagctcgccatcagcactccagagagctgcttggggaatatcggagacagagtcagacctaacctacggggaagtggaacagcgtctggacctgctgcaggagcagctgaatcgccttgaaagccagatgaccactgatattcagaccattcttcagctgttgcaaaaacaaaccaccgtggtgcccccggcctacagtatggtgaccgcagggtctgagtatcagcgcccgataattcagctgatgagaacctcacaacctgaggcttcaataaagacagatcgatccttttccccttcaagtcaatgtccagagttcctcgatctcgaaaagtccaagttaaagtctaaagagagcctcagctcaggtgtgcatctgaacactgcgtccgaggacaatctgacctctctcctcaaacaggatagcgacctctcactggagctccaccttcgacagcgtaaaacatatgttcatcccataaggcatccaagcttaccagactcaagtctctcaactgtgggcattgttgggcttcaccgccacgttagcgatccagggctgcctggcaagtag

SEQ ID NO: 228093 - DNA, 4113 bp, Artificial Sequence
  derived and/or modified sequence
caaagagcggctcgcgcgctggcctgggctctagccgaggagagatcccgggagaactccagagctccgggggagcgctcctcggaagaccggggccaacatgcctgtgcgcagggggcatgtggcaccacaaaatacatttctggggaccatcattcggaaatttgaagggcaaaataaaaaatttatcattgcaaatgccagagtgcagaactgtgccatcatttattgcaacgatgggttctgtgagatgactggtttctccaggccagatgtcatgcaaaagccatgcacctgcgactttctccatggacccgagaccaagaggcatgatattgcccaaattgcccaggcattgctggggtcagaagagaggaaagtggaggtcacctactatcacaaaaatgggtccacttttatttgtaacactcacataattccagtgaaaaaccaagagggcgtggctatgatgttcatcattaattttgaatatgtgacggataatgaaaacgctgccaccccagagagggtaaacccaatattaccaatcaaaactgtaaaccggaaattttttgggttcaaattccctggtctgagagttctcacttacagaaagcagtccttaccacaagaagaccccgatgtggtggtcatcgattcatctaaacacagtgatgattcagtagccatgaagcattttaagtctcctacaaaagaaagctgcagcccctctgaagcagatgacacaaaagctttgatacagcccagcaaatgttctcccttggtgaatatatccggacctcttgaccattcctctcccaaaaggcaatgggaccgactctaccctgacatgctgcagtcaagttcccagctgtcccattccagatcaagggaaagcttatgtagtatacggagagcatcttcggtccatgatatagaaggattcggcgtccaccccaagaacatatttagagaccgacatgccagcgaagacaatggtcgcaatgtcaaagggccttttaatcatatcaagtcaagcctcctgggatccacatcagattcaaacctcaacaaatacagcaccattaacaagattccacagctcactctgaatttttcagaggtcaaaactgagaaaaagaattcatcacctccttcttcagataaaaccattattgcacccaaggttaaagatcgaacacacaatgtgactgagaaagtgacccaggttctctctttaggagcagatgtcctacctgaatacaaactgcagacaccacgcatcaacaagtttacgatattgcactacagccctttcaaggcagtctgggactggcttatcctgctgttggtcatatacactgctatatttactccctactctgcagccttcctcctcaatgacagagaagaacagaaaagacgagaatgtggctattcttgtagccctttgaatgtggtagacttgattgtggatattatgtttatcatagatattttaataaacttcagaacaacatatgtaaatcagaatgaagaagtggtaagtgatcccgccaaaatagcaatacactacttcaaaggctggttcctgattgacatggttgcagcaattccttttgacttgctgatttttggatcaggttctgatgagacaacaacattaattggtcttttgaagactgcccgactcctccgtcttgtgcgcgtggccaggaaactggatcgatattcagaatatggcgctgctgttctaatgctcttaatgtgcatctttgccctgattgctcactggctggcttgcatttggtatgcgattgggaatgtagaaaggccttacctgactgacaaaatcggatggttggattccttaggacagcaaattgggaaacgttacaatgacagtgactcaagttctggaccatccattaaagacaaatacgtcacagcactttattttaccttcagcagtttaaccagtgtaggattcgggaatgtgtctcctaacacgaattcggagaaaatcttttcaatttgtgtcatgttgattggctcactaatgtatgcaagcatttttgggaatgtatctgcaattatccaaagactatactcgggaactgccaggtaccacatgcagatgctgcgagtaaaagagttcattcgctttcaccaaatccccaaccctctgaggcaacgtcttgaagaatatttccagcacgcatggacttacaccaatggcattgacatgaacatggtcctaaagggtttcccagaatgcttacaagcagacatttgtctacatctcaaccagacattgctgcaaaactgcaaagcctttcggggggcaagtaaaggttgccttagagctttggcaatgaagttcaaaaccacccatgcacctccaggagacaccctcgttcactgtggggatgtcctcactgcactttatttcttatccagaggctccattgaaattctcaaagatgacattgtggtggctattctgggaaaaaatgatatatttggagaaatggttcatctttatgccaaacctggaaagtctaatgcagatgtaagagccctcacatactgtgacttgcataagattcagcgagaagacttgttagaggttttggatatgtatcctgagttttctgatcactttctaacaaacctagagttgactttcaacctaaggcatgagagcgcaaaggctgatctcctacgatcacaatccatgaatgattcagaaggagacaactgtaaactaagaagaaggaaattgtcatttgaaagtgaaggagagaaagaaaacagtacaaatgatcctgaagactctgcagataccataagacattatcagagttccaagagacactttgaagagaaaaaaagcagatcctcatctttcatctcctccattgatgatgaacaaaagccgctcttctcaggaatagtagactcttctccaggaatagggaaagcatctgggctcgattttgaagaaacagtgcccacctcaggaagaatgcacatagataaaagaagtcactcttgcaaagatatcactgacatgcgaagctgggaacgagaaaatgcacatccccagcctgaagactccagtccatctgcacttcagcgagctgcctggggtatctctgaaaccgaaagcgacctcacctacggggaagtggaacaaagattagatctgctccaggagcaacttaacaggcttgaatcccaaatgaccactgacatccagaccatcttacagttgctgcagaaacaaaccactgtggtccccccagcctacagtatggtaacagcaggatcagaatatcagagacccatcatccagctgatgagaaccagtcaaccggaagcatccatcaaaactgaccgaagtttcagcccttcctcacaatgtcctgaatttctagaccttgaaaaatctaaacttaaatccaaagaatccctttcaagtggggtgcatctgaacacagcttcagaagacaacttgacttcacttttaaaacaagacagtgatctctctttagagcttcacctgcggcaaagaaaaacttacgttcatccaattaggcatccttctttgccagattcatccctaagcactgtaggaatcgtgggtcttcataggcatgtttctgatcctggtcttccagggaaataatcattttgtactatttactccacatacaatgtaagtgcttttaatggctgttttcctttttctatttaaatcctctctacttgactcaggggctcacaaggtaccattatatgcaaaagtactgtatattttcctaaattgaagcttgtaaggtaaaactgagcagttaggatgtaaatatacataagaacttttggttccaaatgttaaaactgccagcatctcacggcaccttattttttatttttattttttaaatcacatgcatgttaggaaactccaatttctcttgcatggagactcctatttactgcttttactaaaccagtacttcgttatgaaaatgccttccacgcaaataagaaaccaagggataaaactgttcatggatgcaactcaaattcagatgatcctcaactcat

SEQ ID NO: 228094 - DNA, 3591 bp, Artificial Sequence
  derived and/or modified sequence
atgcccgtcagacggggtcacgtggcaccacagaacactttcttgggcaccatcatcagaaagttcgaaggtcagaataagaagttcataatcgcaaatgctagggttcagaactgcgcaatcatttactgtaatgatgggttttgcgaaatgacaggcttcagccgacctgacgtgatgcagaagccatgcacatgcgacttcctgcacggccctgaaactaaacgccacgacattgcgcagattgcacaggcactactaggatccgaggagcgcaaggtggaagttacttactaccataaaaacgggtccacctttatctgtaacactcacatcatccccgtaaagaaccaggagggtgtggccatgatgtttataattaacttcgaatacgtcacggataatgagaacgcggcaacgcccgagagggttaatcccattctacctatcaagacagtgaacaggaaatttttcggtttcaaatttccgggtttacgcgtcttgacatatagaaagcagtccctaccacaagaggatccagatgtcgttgtaatcgactcatctaagcattctgacgacagtgtggcaatgaagcacttcaagagtcctactaaggagagttgctcgccttctgaagccgatgataccaaggctctgatccagccctcgaaatgctccccactggtgaatatatccggtcccttggaccacagttctccaaagcgtcagtgggatcggttgtacccggacatgctgcaatcctcatcccagttatcacacagcaggtctagggaaagtttatgttctattaggagggcaagttccgtgcacgatatcgagggattcggtgtgcatcccaagaacatatttcgggaccggcatgcaagcgaagacaatgggcgtaacgtcaaagggcctttcaaccacattaagagcagtctcctcggctctacaagcgattctaatctaaataagtacagtactatcaataaaatcccccaacttacactcaatttctccgaagtaaagaccgaaaaaaaaaacagcagcccaccctcttctgataaaaccattatcgctcccaaggtgaaagatcgtacgcataacgtcacagagaaggttacacaggtcctctcactcggggcagatgtactgccggagtataagctacagacccccagaattaacaaatttaccatcctgcattatagtccctttaaggccgtttgggactggctgatcttactcctggtgatctacaccgccatcttcaccccatatagcgcggctttcttactgaatgatcgtgaggagcagaaaaggagggagtgtggttattcctgctcacccctgaacgtggtagatttgatcgttgatatcatgttcattattgacatcctcattaacttccggactacgtacgtcaaccagaacgaggaggtcgtcagcgacccagcaaagatcgcaatccattactttaagggttggtttctgattgatatggttgctgcaatcccatttgacctcttgatattcgggtctggcagcgatgagaccaccacacttatcggcctgctaaagacggcacggcttcttcgccttgtgcgggttgctcgtaagcttgatcggtatagcgagtacggggcagcggtgcttatgctgctgatgtgtatctttgcccttatcgctcactggctggcatgcatctggtacgctattggcaacgttgagcgcccttacttaaccgacaaaatcggatggctggattctctcggccagcagattggcaaacgctacaacgacagcgattccagctctggcccatctataaaagacaagtatgtgaccgccctgtattttacatttagttctctgacctccgtcgggttcgggaatgtctcccccaataccaactctgagaaaatctttagcatatgcgtaatgctgatcggctctctcatgtacgcaagtatctttggaaatgtaagcgcaatcattcagagattgtattctggcaccgctcggtaccacatgcagatgctgcgggtgaaggagtttattcggtttcaccagattcctaaccccttacgccagcgattggaagagtatttccagcacgcatggacctatacaaacggcattgatatgaacatggtgctgaaaggtttcccagaatgtctgcaagcagatatttgccttcacttgaaccagacactgctccagaattgtaaagcctttcggggagcctctaaagggtgtctgagagcactggccatgaaatttaaaaccacacacgcaccacctggggatacacttgtgcattgcggtgacgttttgacagccctttacttcctcagccggggttccatcgaaattttgaaggacgatatcgtagtggccatcctcggcaagaacgatatatttggcgaaatggtgcatctttatgccaagcctggcaagagcaatgctgacgttcgggcactaacatactgcgacttgcacaaaatacaacgggaggacctgttggaagtcctggatatgtaccccgagttcagcgaccatttcctaactaacctagaattaacatttaatctgagacacgagtccgcaaaggctgacctgctgcgatcgcagtcaatgaacgacagtgaaggagataattgcaagctgcgcaggcggaagctaagctttgagtctgagggagaaaaggaaaacagcacgaatgatccagaggacagcgctgacacaatccggcactaccagtcatcaaagcggcatttcgaggaaaagaaaagccgatctagctccttcattagtagtatcgatgacgaacaaaaacccctgttcagcggtattgttgattcaagtcctgggattggaaaggcctctgggttggactttgaggagactgtgcctacctcaggccgtatgcatattgataagcgctcccactcttgtaaggatattactgacatgaggagttgggagcgggagaacgcacatccacagcccgaggatagttcaccaagcgcattgcagagagccgcttggggcatcagcgagactgagagtgatcttacttatggcgaggttgagcaacgccttgatctgctgcaggagcagctgaaccgtctggaatcacagatgaccacagatattcagactatactgcagttgttgcagaagcagaccactgtagtcccacctgcatattccatggtcactgccggttctgagtaccagaggccaatcatacagctgatgcggacgtcccagcccgaggcgagtatcaaaactgatcgcagcttcagtccctcatcccaatgtcccgaattcctggaccttgaaaagtcaaagctgaagagtaaggagagcctgagttcaggtgtgcacttgaataccgcttctgaggataaccttaccagcctgttgaagcaggactccgatctgagtcttgaactccatctgaggcagcgcaagacctacgtgcatccgatcagacacccctccttacccgacagttcactgagcaccgtagggattgtcggccttcaccgacacgttagtgatccagggctgcccggtaagtag

SEQ ID NO: 228095 - DNA, 3591 bp, Artificial Sequence
  derived and/or modified sequence
atgcccgtgagaagaggccacgtggccccccagaacaccttcctgggcaccatcatcagaaagttcgagggccagaacaagaagttcatcatcgccaacgccagagtgcagaactgcgccatcatctactgcaacgacggcttctgcgagatgaccggcttcagcagacccgacgtgatgcagaagccctgcacctgcgacttcctgcacggccccgagaccaagagacacgacatcgcccagatcgcccaggccctgctgggcagcgaggagagaaaggtggaggtgacctactaccacaagaacggcagcaccttcatctgcaacacccacatcatccccgtgaagaaccaggagggcgtggccatgatgttcatcatcaacttcgagtacgtgaccgacaacgagaacgccgccacccccgagagagtgaaccccatcctgcccatcaagaccgtgaacagaaagttcttcggcttcaagttccccggcctgagagtgctgacctacagaaagcagagcctgccccaggaggaccccgacgtggtggtgatcgacagcagcaagcacagcgacgacagcgtggccatgaagcacttcaagagccccaccaaggagagctgcagccccagcgaggccgacgacaccaaggccctgatccagcccagcaagtgcagccccctggtgaacatcagcggccccctggaccacagcagccccaagagacagtgggacagactgtaccccgacatgctgcagagcagcagccagctgagccacagcagaagcagagagagcctgtgcagcatcagaagagccagcagcgtgcacgacatcgagggcttcggcgtgcaccccaagaacatcttcagagacagacacgccagcgaggacaacggcagaaacgtgaagggccccttcaaccacatcaagagcagcctgctgggcagcaccagcgacagcaacctgaacaagtacagcaccatcaacaagatcccccagctgaccctgaacttcagcgaggtgaagaccgagaagaagaacagcagcccccccagcagcgacaagaccatcatcgcccccaaggtgaaggacagaacccacaacgtgaccgagaaggtgacccaggtgctgagcctgggcgccgacgtgctgcccgagtacaagctgcagacccccagaatcaacaagttcaccatcctgcactacagccccttcaaggccgtgtgggactggctgatcctgctgctggtgatctacaccgccatcttcaccccctacagcgccgccttcctgctgaacgacagagaggagcagaagagaagagagtgcggctacagctgcagccccctgaacgtggtggacctgatcgtggacatcatgttcatcatcgacatcctgatcaacttcagaaccacctacgtgaaccagaacgaggaggtggtgagcgaccccgccaagatcgccatccactacttcaagggctggttcctgatcgacatggtggccgccatccccttcgacctgctgatcttcggcagcggcagcgacgagaccaccaccctgatcggcctgctgaagaccgccagactgctgagactggtgagagtggccagaaagctggacagatacagcgagtacggcgccgccgtgctgatgctgctgatgtgcatcttcgccctgatcgcccactggctggcctgcatctggtacgccatcggcaacgtggagagaccctacctgaccgacaagatcggctggctggacagcctgggccagcagatcggcaagagatacaacgacagcgacagcagcagcggccccagcatcaaggacaagtacgtgaccgccctgtacttcaccttcagcagcctgaccagcgtgggcttcggcaacgtgagccccaacaccaacagcgagaagatcttcagcatctgcgtgatgctgatcggcagcctgatgtacgccagcatcttcggcaacgtgagcgccatcatccagagactgtacagcggcaccgccagataccacatgcagatgctgagagtgaaggagttcatcagattccaccagatccccaaccccctgagacagagactggaggagtacttccagcacgcctggacctacaccaacggcatcgacatgaacatggtgctgaagggcttccccgagtgcctgcaggccgacatctgcctgcacctgaaccagaccctgctgcagaactgcaaggccttcagaggcgccagcaagggctgcctgagagccctggccatgaagttcaagaccacccacgccccccccggcgacaccctggtgcactgcggcgacgtgctgaccgccctgtacttcctgagcagaggcagcatcgagatcctgaaggacgacatcgtggtggccatcctgggcaagaacgacatcttcggcgagatggtgcacctgtacgccaagcccggcaagagcaacgccgacgtgagagccctgacctactgcgacctgcacaagatccagagagaggacctgctggaggtgctggacatgtaccccgagttcagcgaccacttcctgaccaacctggagctgaccttcaacctgagacacgagagcgccaaggccgacctgctgagaagccagagcatgaacgacagcgagggcgacaactgcaagctgagaagaagaaagctgagcttcgagagcgagggcgagaaggagaacagcaccaacgaccccgaggacagcgccgacaccatcagacactaccagagcagcaagagacacttcgaggagaagaagagcagaagcagcagcttcatcagcagcatcgacgacgagcagaagcccctgttcagcggcatcgtggacagcagccccggcatcggcaaggccagcggcctggacttcgaggagaccgtgcccaccagcggcagaatgcacatcgacaagagaagccacagctgcaaggacatcaccgacatgagaagctgggagagagagaacgcccacccccagcccgaggacagcagccccagcgccctgcagagagccgcctggggcatcagcgagaccgagagcgacctgacctacggcgaggtggagcagagactggacctgctgcaggagcagctgaacagactggagagccagatgaccaccgacatccagaccatcctgcagctgctgcagaagcagaccaccgtggtgccccccgcctacagcatggtgaccgccggcagcgagtaccagagacccatcatccagctgatgagaaccagccagcccgaggccagcatcaagaccgacagaagcttcagccccagcagccagtgccccgagttcctggacctggagaagagcaagctgaagagcaaggagagcctgagcagcggcgtgcacctgaacaccgccagcgaggacaacctgaccagcctgctgaagcaggacagcgacctgagcctggagctgcacctgagacagagaaagacctacgtgcaccccatcagacaccccagcctgcccgacagcagcctgagcaccgtgggcatcgtgggcctgcacagacacgtgagcgaccccggcctgcccggcaagtag

SEQ ID NO: 228096 - protein, 918 aa, Artificial Sequence
  derived and/or modified sequence
MPGGAGAARLCLLAFALQPLRPRAAREPGWTRGSEEGSPKLQHELIIPQWKTSESPVREKHPLKAELRVMAEGRELILDLEKNEQLFAPSYTETHYTSSGNPQTTTRKLEDHCFYHGTVRETELSSVTLSTCRGIRGLITVSSNLSYVIEPLPDSKGQHLIYRSEHLKPPPGNCGFEHSKPTTRDWALQFTQQTKKRPRRMKREDLNSMKYVELYLVADYLEFQKNRRDQDATKHKLIEIANYVDKFYRSLNIRIALVGLEVWTHGNMCEVSENPYSTLWSFLSWRRKLLAQKYHDNAQLITGMSFHGTTIGLAPLMAMCSVYQSGGVNMDHSENAIGVAATMAHEMGHNFGMTHDSADCCSASAADGGCIMAAATGHPFPKVFNGCNRRELDRYLQSGGGMCLSNMPDTRMLYGGRRCGNGYLEDGEECDCGEEEECNNPCCNASNCTLRPGAECAHGSCCHQCKLLAPGTLCREQARQCDLPEFCTGKSPHCPTNFYQMDGTPCEGGQAYCYNGMCLTYQEQCQQLWGPGARPAPDLCFEKVNVAGDTFGNCGKDMNGEHRKCNMRDAKCGKIQCQSSEARPLESNAVPIDTTIIMNGRQIQCRGTHVYRGPEEEGDMLDPGLVMTGTKCGYNHICFEGQCRNTSFFETEGCGKKCNGHGVCNNNQNCHCLPGWAPPFCNTPGHGGSIDSGPMPPESVGPVVAGVLVAILVLAVLMLMYYCCRQNNKLGQLKPSALPSKLRQQFSCPFRVSQNSGTGHANPTFKLQTPQGKRKVINTPEILRKPSQPPPRPPPDYLRGGSPPAPLPAHLSRAARNSPGPGSQIERTESSRRPPPSRPIPPAPNCIVSQDFSRPRPPQKALPANPVPGRRSLPRPGGASPLRPPGAGPQQSRPLAALAPKFPEYRSQRAGGMISSKI

SEQ ID NO: 228097 - protein, 920 aa, Artificial Sequence
  derived and/or modified sequence
MPGGAGAARLCLLAFALQPLRPRAAREPGWTISRGSEEGSPKLQHELIIPQWKTSESPVREKHPLKAELRVMAEGRELILDLEKNEQLFAPSYTETHYTSSGNPQTTTRKLEDHCFYHGTVRETELSSVTLSTCRGIRGLITVSSNLSYVIEPLPDSKGQHLIYRSEHLKPPPGNCGFEHSKPTTRDWALQFTQQTKKRPRRMKREDLNSMKYVELYLVADYLEFQKNRRDQDATKHKLIEIANYVDKFYRSLNIRIALVGLEVWTHGNMCEVSENPYSTLWSFLSWRRKLLAQKYHDNAQLITGMSFHGTTIGLAPLMAMCSVYQSGGVNMDHSENAIGVAATMAHEMGHNFGMTHDSADCCSASAADGGCIMAAATGHPFPKVFNGCNRRELDRYLQSGGGMCLSNMPDTRMLYGGRRCGNGYLEDGEECDCGEEEECNNPCCNASNCTLRPGAECAHGSCCHQCKLLAPGTLCREQARQCDLPEFCTGKSPHCPTNFYQMDGTPCEGGQAYCYNGMCLTYQEQCQQLWGPGARPAPDLCFEKVNVAGDTFGNCGKDMNGEHRKCNMRDAKCGKIQCQSSEARPLESNAVPIDTTIIMNGRQIQCRGTHVYRGPEEEGDMLDPGLVMTGTKCGYNHICFEGQCRNTSFFETEGCGKKCNGHGVCNNNQNCHCLPGWAPPFCNTPGHGGSIDSGPMPPESVGPVVAGVLVAILVLAVLMLMYYCCRQNNKLGQLKPSALPSKLRQQFSCPFRVSQNSGTGHANPTFKLQTPQGKRKVINTPEILRKPSQPPPRPPPDYLRGGSPPAPLPAHLSRAARNSPGPGSQIERTESSRRPPPSRPIPPAPNCIVSQDFSRPRPPQKALPANPVPGRRSLPRPGGASPLRPPGAGPQQSRPLAALAPKFPEYRSQRAGGMISSKI

SEQ ID NO: 228098 - DNA, 2757 bp, Artificial Sequence
  derived and/or modified sequence
atgcctggcggagccggcgccgctcgtctctgcttgctggctttcgcactgcagcctctgcgacctcgggctgctagagagccaggttggacacggggatcagaggagggttccccaaaactacaacacgaacttataataccccagtggaagacgtccgaaagcccagtgcgggaaaaacaccccctgaaggccgaactgcgggtgatggccgagggacgcgaactgattctggacctggaaaaaaacgaacagttgtttgctccctcgtacacagagacacactatacctcttccggaaatccacagactactacacggaaactggaggatcattgtttctatcatggtaccgtccgcgagaccgaactctcctccgtcaccttgtccacttgtcgcggcatcaggggtctgattaccgtcagcagcaatctgtcctacgtaatcgaacctcttcccgatagtaaaggtcagcatctcatctatcgcagcgaacacctgaagcccccaccaggaaattgtggcttcgaacacagcaagcccacaacccgagactgggcgctgcaattcacacaacagactaagaagagacctcggcgcatgaaaagagaagacctgaacagtatgaagtacgttgaactctatctggtcgccgattacctggaatttcagaagaaccggcgggatcaagatgccaccaagcataagctgattgaaatagcaaattatgtcgataaattttatcggtctctgaatattcggattgccttggtggggcttgaggtgtggactcacggtaatatgtgtgaagtgtctgaaaacccctatagcactctgtggtcatttctctcctggagacgcaagctcttggctcagaagtatcacgataatgcacaattgataactggcatgtcatttcacggcacaacgattggcctggcacccctcatggcgatgtgctccgtgtaccagagcggcggtgtgaatatggatcactcagagaacgccattggagttgctgcaacaatggcccacgagatgggccataacttcggcatgacacacgattccgccgactgttgctcggcctccgccgctgacggcggctgcataatggcagctgcgactggccatcccttcccgaaagtcttcaacggctgtaatcgcagagagctggataggtacttgcagagcggcggcggcatgtgcctgtccaatatgcctgacacccgcatgttatacgggggcaggcgatgcggcaacggctacctcgaagacggagaagaatgtgactgcggggaggaggaagagtgcaataacccatgttgtaacgccagcaattgtaccctccggccgggggcagaatgcgctcatgggtcctgttgtcaccagtgtaaactccttgcccctggcaccctatgccgcgaacaggcccggcaatgcgatctgcctgagttctgtactggcaaatcccctcactgtcctaccaatttttaccagatggacggtaccccctgcgaaggcgggcaggcgtactgctataatggaatgtgtttgacttaccaggagcagtgccagcagttgtgggggccaggagcaaggcccgccccggatctttgcttcgaaaaggtgaacgtggccggtgacacgttcggtaattgtggcaaggacatgaatggagaacaccgcaaatgtaacatgcgggatgccaaatgcgggaagattcagtgtcagtcctcggaagctcgcccattggaatcaaacgctgtgcctatagatacaacaatcattatgaatggccgccagatccagtgccgcggtacccacgtctacaggggaccggaagaagagggtgatatgctggaccctggcctggtcatgactggtaccaaatgcggctacaatcatatttgcttcgagggacagtgtaggaacacctccttcttcgagacagagggttgtggaaaaaagtgcaacgggcatggagtctgtaataataaccaaaactgccattgtctgcctggatgggccccacccttttgcaatacaccaggacacggtggttctattgactctgggcctatgcccccagaatccgtcggcccggttgtggctggcgtgttagtggctattttggtgctggccgttctgatgctcatgtattactgttgtcgtcagaataacaaactcggccagctgaagccgagcgcgttgccatctaaactccgacagcaattctcttgtccattccgcgttagccagaattctggcaccggtcacgcaaatccgacatttaaactccagaccccgcagggtaaacgcaaagtcatcaatacgccagaaatccttagaaaacccagtcagcctcccccgaggccccccccagactatttgcgaggcggatctcctcctgcgccattacccgcccacttgagccgggccgcccgcaactcccctggccccggctcccaaatcgaacgaaccgagagcagccggaggccaccccctagccggcccattccaccagctcccaactgtatagtttctcaggactttagtcgcccacgccctcctcagaaggctcttcccgcaaatcccgtgccggggagaaggtctctgcctcgccccgggggcgcaagcccactgcgacccccaggtgcaggaccacagcagtctcggccactagcagcgcttgcccccaagttcccagagtatagaagtcaacgggcgggagggatgatctcctcaaagatctag

SEQ ID NO: 228099 - DNA, 2763 bp, Artificial Sequence
  derived and/or modified sequence
atgccgggtggggctggggcagccaggctttgcctgctggcttttgctttgcagcctttgagaccgcgagccgcccgtgaacccgggtggacaatctctcggggttccgaggaaggcagcccaaaactgcagcacgagcttatcattccccagtggaaaacgtccgaatctcctgtgcgagaaaaacatccacttaaagccgaacttcgcgttatggctgagggcagagagctgattttggacctagaaaagaatgaacagctcttcgcccccagctacacagagacccattacacatcttccgggaacccacaaaccactacgaggaaacttgaagaccactgcttttaccacggaacggtccgcgaaaccgagctatcttccgtgaccctgagcacatgtcggggtatccgcgggctgatcactgttagctcaaacctatcgtatgtgattgagcccctaccagacagcaaaggacaacacctgatctatagaagtgaacatctcaaacctcctcctggcaactgcggcttcgaacattctaagccaaccacacgagactgggcactgcagttcacccagcaaactaagaagcggccaagacgcatgaaacgcgaggacttgaattctatgaagtatgtggagctgtacctcgttgctgattatcttgaatttcagaagaaccggcgagaccaggacgcgaccaagcacaagctgattgaaatagccaactacgtcgacaagttttataggtctctgaacattagaatcgccctggtagggctggaggtgtggacacacgggaatatgtgtgaagtgtcggaaaacccctatagtactctctggtcttttttgtcatggagacggaaattattggcccagaaataccatgataatgcacagctgataaccggcatgtccttccacggcacgaccatcggcctggcacctttgatggcaatgtgctccgtgtatcagtcaggaggagtgaacatggaccactccgagaacgctataggtgtggctgccactatggctcatgagatgggtcataattttgggatgacacatgactctgccgactgctgctctgcttccgcagcggacggtggctgcatcatggctgctgcgacaggtcaccccttccctaaggtttttaacgggtgcaaccggagagagctcgatagatacctacaatccggcggaggaatgtgtctgagcaatatgccagacactcgcatgctatatggcggccgccgctgtgggaatggatacctggaagatggagaggagtgtgattgcggagaggaggaagagtgcaataacccttgttgcaacgcttccaattgcacgttgaggcctggagccgaatgcgcccacgggtcatgttgccaccaatgcaagctgctggctcccggcacactgtgccgtgagcaagcgcgtcagtgtgatctgccagagttttgcacagggaagtcgccccactgccctaccaacttttatcaaatggatggaaccccatgcgaaggtggtcaagcttattgttacaacgggatgtgcttgacatatcaggagcagtgtcagcagctctgggggccaggggcgcgcccggctccagacctttgcttcgaaaaagtcaatgtcgctggggatactttcggaaattgcggcaaggacatgaacggcgaacatcgaaaatgcaatatgcgagatgctaaatgtggcaagattcagtgccaatcctcagaggcgcggccactggaatcgaatgccgttccaatcgacacgacaattattatgaatggacgccagatccaatgtagagggacccacgtttacaggggccccgaagaggaaggcgacatgctagaccctggtctggtgatgacaggaacaaagtgcgggtacaaccacatctgcttcgaaggtcaatgcaggaacacctcatttttcgagactgagggttgcgggaaaaagtgcaacgggcacggggtgtgcaacaacaatcaaaattgccactgtctgcccgggtgggcacctccgttttgcaacacacccggccacggcgggtctattgacagcggacccatgcctcctgagtctgttgggccagtcgtggcaggcgttctggtggcgattctggtgctagccgtattaatgctgatgtattattgttgtcgtcaaaacaataaactgggacaattaaagccgtccgccctgcccagcaagttgcgtcagcagtttagctgtccttttcgcgtctctcagaactcaggcacaggccacgctaaccctacttttaaacttcagacaccacagggaaagcggaaagtgataaacacacccgaaatccttcggaagccttctcagccgcctcctaggcccccacctgattacctacgtggtggctctccccctgctcccctacccgcccacctatctcgagcagcaagaaattcaccggggcctggctctcaaattgaaaggacagagagctcaaggcgtcctccaccaagcaggcccatcccacccgcccccaactgtatcgtttcacaggatttctctcgaccccggccaccacaaaaggccctgccagccaatcccgtcccggggcgacgaagcttaccgcgcccgggaggggctagcccgctgcggcctcccggagccgggccacagcagagtcggccgcttgccgccctagcccccaagttccctgagtacagaagccagcgagcgggcggtatgataagctctaaaatctag

SEQ ID NO: 228100 - DNA, 2757 bp, Artificial Sequence
  derived and/or modified sequence
atgcctgggggcgctggggccgcccggctgtgcctgctggcctttgccctgcagcccctgcggccccgggccgcccgggagcccggctggacccggggcagcgaggagggcagccccaagctgcagcacgagctgatcatcccccagtggaagaccagcgagagccctgtgcgggagaagcaccccctgaaggccgagctgcgggtgatggccgagggccgggagctgatcctggacctggagaagaatgagcagctgtttgcccccagctacacagagacccactacaccagcagcggcaacccccagaccaccaccaggaagctggaggaccactgcttctaccacggcaccgtgcgggagacagagctgagctctgtgaccctgagcacctgccggggcatccggggcctcatcaccgtgagcagcaacctgtcctatgtgattgagcccctgcctgacagcaagggccagcacctgatctacagaagtgagcacctgaagcccccacctggcaactgtggctttgagcacagcaagcccaccacccgggactgggccctgcagttcacccagcagaccaagaagaggcccaggaggatgaagcgggaggacctgaacagcatgaagtatgtggagctgtacctggtggccgactacctggagttccagaagaacagaagagaccaggatgccaccaagcacaagctgattgagatcgccaactacgtggacaagttctaccgcagcctgaacatcagaattgccctggtgggcctggaggtgtggacccacggcaacatgtgtgaggtgtctgagaacccctacagcaccctgtggagcttcctgtcctggaggaggaagctgctggcccagaagtaccatgacaatgcccagctgatcaccggcatgtccttccacggcaccaccatcggcctggcccccctgatggccatgtgcagcgtgtaccagagcggaggagtgaacatggaccacagtgaaaatgccatcggcgtggccgccaccatggcccacgagatgggccacaactttggcatgacccatgattctgctgactgctgcagcgccagcgctgctgatggcggctgcatcatggccgccgccaccggccaccccttccccaaggtgttcaacggctgcaacagaagagagctggaccgctacctgcagagcggcggcggcatgtgcctgagcaacatgccagacaccaggatgctgtatggaggaagaagatgtggaaatggctacctggaggatggagaagaatgtgactgtggggaggaggaggagtgcaacaacccctgctgcaatgccagcaactgcaccctgcggcctggagcagaatgtgcccacggcagctgctgccaccagtgcaagctgctggcccctggcaccctgtgccgggagcaggcccggcagtgtgacctgcctgagttctgcaccgggaagagcccccactgccccaccaacttctaccagatggatggcaccccctgtgagggcggccaggcctactgctacaacggcatgtgcctgacctaccaggagcagtgccagcagctgtggggccctggggcccggcctgccccagacctgtgctttgagaaggtgaatgtggccggggacacctttggaaactgtgggaaggacatgaatggagagcacaggaagtgcaacatgagagatgccaagtgtgggaagatccagtgccagagcagcgaggcccggcccctggagagcaatgctgtgcccatcgacaccaccatcatcatgaatggccggcagatccagtgccggggcacccacgtgtaccggggccctgaggaggagggggacatgctggaccccggcctggtgatgacaggcaccaagtgtggctacaaccacatctgctttgagggccagtgcaggaacaccagcttctttgaaacagagggctgtgggaagaagtgcaatggacatggagtgtgcaacaacaaccagaactgccactgcctgcccggctgggccccacccttctgcaacaccccaggccacggcggcagcattgacagcggccccatgcctcctgagagcgtgggccctgtggtggccggcgtgctggtggccatcctggtgctggccgtgctgatgctgatgtactactgctgccggcagaacaacaagctgggccagctgaagcccagcgccctgcccagcaagctgcggcagcagttcagctgccccttccgggtgtcccagaacagcggcaccggccacgccaaccccaccttcaagctgcagaccccccagggcaagaggaaggtgatcaacaccccagagatcctgaggaagcccagccagcccccacccaggcctcctccagactacctgcggggcggcagccccccagcccccctgcctgcccacctgagccgggccgccaggaacagccctggccctggcagccagattgaaagaacagagagcagccggcggcccccacccagccggcccatccccccagcccccaactgcatcgtgtcccaggacttcagccggcccaggcctccccagaaggccctgcctgccaaccctgtgcccggccgccgcagcctgcccaggcctgggggcgccagccccctgcggcccccaggagctggcccccagcagagccggcccctggccgccctggcccccaagtttcctgagtaccgcagccagagagctgggggcatgatcagcagcaagatctag

SEQ ID NO: 228101 - DNA, 2763 bp, Artificial Sequence
  derived and/or modified sequence
atgcctgggggcgctggggccgcccggctgtgcctgctggcctttgccctgcagcccctgcggccccgggccgcccgggagcccggctggaccatcagccggggcagcgaggagggcagccccaagctgcagcacgagctgatcatcccccagtggaagaccagcgagagccctgtgcgggagaagcaccccctgaaggccgagctgcgggtgatggccgagggccgggagctgatcctggacctggagaagaatgagcagctgtttgcccccagctacacagagacccactacaccagcagcggcaacccccagaccaccaccaggaagctggaggaccactgcttctaccacggcaccgtgcgggagacagagctgagctctgtgaccctgagcacctgccggggcatccggggcctcatcaccgtgagcagcaacctgtcctatgtgattgagcccctgcctgacagcaagggccagcacctgatctacagaagtgagcacctgaagcccccacctggcaactgtggctttgagcacagcaagcccaccacccgggactgggccctgcagttcacccagcagaccaagaagaggcccaggaggatgaagcgggaggacctgaacagcatgaagtatgtggagctgtacctggtggccgactacctggagttccagaagaacagaagagaccaggatgccaccaagcacaagctgattgagatcgccaactacgtggacaagttctaccgcagcctgaacatcagaattgccctggtgggcctggaggtgtggacccacggcaacatgtgtgaggtgtctgagaacccctacagcaccctgtggagcttcctgtcctggaggaggaagctgctggcccagaagtaccatgacaatgcccagctgatcaccggcatgtccttccacggcaccaccatcggcctggcccccctgatggccatgtgcagcgtgtaccagagcggaggagtgaacatggaccacagtgaaaatgccatcggcgtggccgccaccatggcccacgagatgggccacaactttggcatgacccatgattctgctgactgctgcagcgccagcgctgctgatggcggctgcatcatggccgccgccaccggccaccccttccccaaggtgttcaacggctgcaacagaagagagctggaccgctacctgcagagcggcggcggcatgtgcctgagcaacatgccagacaccaggatgctgtatggaggaagaagatgtggaaatggctacctggaggatggagaagaatgtgactgtggggaggaggaggagtgcaacaacccctgctgcaatgccagcaactgcaccctgcggcctggagcagaatgtgcccacggcagctgctgccaccagtgcaagctgctggcccctggcaccctgtgccgggagcaggcccggcagtgtgacctgcctgagttctgcaccgggaagagcccccactgccccaccaacttctaccagatggatggcaccccctgtgagggcggccaggcctactgctacaacggcatgtgcctgacctaccaggagcagtgccagcagctgtggggccctggggcccggcctgccccagacctgtgctttgagaaggtgaatgtggccggggacacctttggaaactgtgggaaggacatgaatggagagcacaggaagtgcaacatgagagatgccaagtgtgggaagatccagtgccagagcagcgaggcccggcccctggagagcaatgctgtgcccatcgacaccaccatcatcatgaatggccggcagatccagtgccggggcacccacgtgtaccggggccctgaggaggagggggacatgctggaccccggcctggtgatgacaggcaccaagtgtggctacaaccacatctgctttgagggccagtgcaggaacaccagcttctttgaaacagagggctgtgggaagaagtgcaatggacatggagtgtgcaacaacaaccagaactgccactgcctgcccggctgggccccacccttctgcaacaccccaggccacggcggcagcattgacagcggccccatgcctcctgagagcgtgggccctgtggtggccggcgtgctggtggccatcctggtgctggccgtgctgatgctgatgtactactgctgccggcagaacaacaagctgggccagctgaagcccagcgccctgcccagcaagctgcggcagcagttcagctgccccttccgggtgtcccagaacagcggcaccggccacgccaaccccaccttcaagctgcagaccccccagggcaagaggaaggtgatcaacaccccagagatcctgaggaagcccagccagcccccacccaggcctcctccagactacctgcggggcggcagccccccagcccccctgcctgcccacctgagccgggccgccaggaacagccctggccctggcagccagattgaaagaacagagagcagccggcggcccccacccagccggcccatccccccagcccccaactgcatcgtgtcccaggacttcagccggcccaggcctccccagaaggccctgcctgccaaccctgtgcccggccgccgcagcctgcccaggcctgggggcgccagccccctgcggcccccaggagctggcccccagcagagccggcccctggccgccctggcccccaagtttcctgagtaccgcagccagagagctgggggcatgatcagcagcaagatctag

SEQ ID NO: 228102 - DNA, 2757 bp, Artificial Sequence
  derived and/or modified sequence
atgcccggcggcgccggcgccgcccggctgtgcctgctggccttcgcactgcaaccactgcgccctagggccgcccgggagcccggatggacgaggggtagcgaggagggatctcctaagttgcagcatgagctcatcattccccagtggaagacttcagagtcacctgtgcgggaaaagcatccactgaaggcggagctccgggtcatggcagagggtcgtgagctgattctggaccttgagaagaacgaacagctgttcgcaccaagctataccgaaacgcattacacttcttcaggcaatcctcagacaacgacccgcaaactggaggaccattgcttctaccatggaaccgtgcgcgagacagagctctcatcggtgaccctcagcacatgtagaggtataagggggctcatcactgtgtcatcaaacctgtcatacgtgatcgagcccttgccagatagtaaaggccagcacctgatataccggtcagaacacttaaaaccaccaccggggaattgcggcttcgagcattccaagcctactactcgcgattgggctctgcagttcacacagcaaacaaagaaacggccaagacgaatgaaacgggaggaccttaacagcatgaaatacgtggagctgtatcttgtggcagactatttggaatttcaaaagaaccgacgggatcaggatgctaccaaacacaaacttattgaaattgccaattatgtggataaattctaccgctcactgaacattcggatagcgctcgtggggctggaagtatggacacatggaaacatgtgcgaggtgtccgaaaacccatactccaccctctggagctttctttcctggaggcgaaaactgctcgcgcagaagtaccacgacaacgcccaactcattaccggcatgagctttcacggaaccaccatcggcctggcccctctgatggccatgtgttctgtctatcagtcgggcggggtgaacatggatcactcagagaatgctatcggagttgccgctaccatggcacatgagatgggccataatttcggtatgactcacgattcggcagattgttgctccgcttccgcagccgacggcggttgcatcatggcggccgcaaccgggcaccctttccctaaggtattcaacggctgtaatcgtagggagctagatcgctacttacagtctggcggcggaatgtgcctgagcaacatgcctgacacgcgtatgctgtatggcggccgacgatgcggaaacggatacctggaggatggggaggaatgtgattgcggagaggaggaggagtgtaacaatccatgttgcaatgcatcaaattgcacattacgccccggggcagaatgcgctcacggctcatgctgtcatcagtgcaaacttttggcccccgggacgctgtgtagggagcaggctaggcaatgcgacctgcccgagttctgcacaggcaagtctcctcattgtccaacaaacttctatcagatggacggaacaccctgcgaaggaggccaggcatattgttataacggtatgtgtctaacttaccaggagcagtgccaacagctgtgggggccaggtgctcgcccagctcccgatctctgctttgagaaggtgaacgttgctggtgatacttttggaaactgtggcaaggatatgaacggcgaacatagaaagtgcaacatgcgggatgccaaatgcggcaagattcaatgtcagagctcggaagccagaccactggagtcaaacgccgtaccgattgacacaacaatcatcatgaacggcaggcagatccagtgccgtggcacccatgtgtacagggggcccgaggaggagggggatatgctagaccccggactggtgatgaccgggacaaaatgcggatataaccacatttgcttcgagggtcagtgcagaaataccagcttctttgaaaccgagggttgtggaaagaagtgcaacgggcacggagtgtgtaataataatcagaactgccactgcttgccaggctgggctcccccgttctgtaacacacctggtcatggagggtccatagacagtgggccaatgccccccgagtctgtaggcccagtcgttgccggcgtcctggtcgccatcttagtcttagctgtgctcatgttaatgtattattgctgtagacagaataacaagctgggacaactgaagccctcagccctcccatcaaaactgagacagcagttcagttgtccatttcgggtgtcccaaaactctggcacggggcacgctaacccaacattcaagctgcaaaccccgcagggcaagagaaaggttatcaacacccccgagatccttcggaagcctagtcagcctccacctcgccctcctccggattatctgaggggaggatcccccccagcgcccctgccagcccatctgtctcgagcagcaaggaatagccctgggccagggtcccaaatcgaaaggaccgagtcttcgagaaggccccccccttccagacctattccacccgcccctaattgcattgtaagccaagacttctcccgtccccggccaccacagaaagcccttccagcgaaccccgtgccaggacggagatcgctgccccgcccagggggggcttcccctctgagacctccgggggctggaccacagcagtctaggcccctggccgccctagccccaaaatttcctgagtatagatcccagagagccggtgggatgatcagtagcaagatatag

SEQ ID NO: 228103 - DNA, 2763 bp, Artificial Sequence
  derived and/or modified sequence
atgcccggcggcgccggcgccgcccggctgtgcctgctggccttcgccctccagcctctgaggccacgggcggcccgagaaccggggtggacaattagcaggggttccgaggagggcagccccaaacttcagcacgagctcattatcccacagtggaagacaagcgagagtccggtgcgggaaaaacatcccttgaaggccgagctgcgggttatggcagaaggacgagagcttatcctagacctagagaaaaacgagcagttgttcgcaccttcatataccgagactcactacacatcatctgggaatcctcagacgacaactaggaaactcgaagatcattgcttctaccacggaacagtccgcgagacagaactgagcagcgttacgctgtcgacctgccgcgggatacgaggtctgatcacagtgtcttccaacctctcctatgtgatcgagccattgccggacagcaagggccaacacctgatctacaggtctgagcacttaaagccaccccctggcaattgcggcttcgaacactcaaagccaacaacacgtgattgggctctccagttcacccagcagaccaagaagcggccgcgacgaatgaagcgagaggacctcaattcaatgaaatacgttgaactttatctcgtagctgactacctagagtttcaaaaaaacagacgtgatcaggatgctaccaaacacaagctcatagagatcgcaaactatgtcgataaattctataggtctctgaatatccgaatcgctctagtaggactcgaggtatggacacatggcaatatgtgcgaggtgagtgaaaacccttatagcacattatggagctttctgagctggagacggaagctgctggcgcaaaaatatcacgacaatgcacagctcatcaccgggatgagttttcatggcacgaccatcggactggctcccctcatggcgatgtgttcggtctaccagtctggcggggtaaatatggatcattccgagaatgccattggagtagctgcaacgatggctcacgagatgggtcacaactttggcatgacacacgactccgctgattgttgcagtgcatctgccgccgacggcggatgcataatggctgcggctaccgggcatcccttcccaaaagtattcaatggctgcaaccggcgggagctcgatcgctaccttcagtccggtggcgggatgtgtctctcgaatatgccagatacacggatgttatatggcgggaggagatgtggtaatggctacctggaggatggcgaggaatgcgactgtggtgaggaggaggagtgcaataacccatgttgcaacgccagcaactgtactttacgacccggtgctgaatgcgcccatggctcctgctgccaccaatgcaagttgctggcacctggaaccctatgccgtgagcaagcccgccagtgtgatttgccagaattctgtacgggtaaatcaccccactgtcctacaaacttctaccagatggatggtaccccctgcgagggcggtcaggcctattgctacaatggaatgtgcctgacataccaggagcaatgccagcagctttggggccccggggccaggcccgctcctgacctgtgttttgagaaagtgaacgtggccggagacacatttggaaactgcggcaaggatatgaacggggaacatcgaaaatgtaatatgagagacgccaaatgtggaaagattcaatgtcagtcctctgaagcccggcccctcgagtcaaatgccgtaccaatcgatacaacaattatcatgaacgggcgccagatacaatgtcgtggcacccacgtatacaggggacctgaggaggaaggagatatgctggatcctggactcgttatgacaggaacaaagtgtggatataatcacatttgttttgaaggacagtgtaggaacacaagcttctttgaaaccgagggatgcggtaagaagtgtaacggccatggggtgtgcaataataaccagaattgtcactgtctgccaggctgggccccccccttctgcaatacgcctgggcacggcggttccattgactctggacctatgccaccagagtccgtgggccccgtggtggccggagtcctagtcgccatacttgtcctggccgtcctgatgctgatgtattattgttgccggcagaacaacaagctgggccagctaaaacccagcgcactaccctcaaagcttagacaacagttctcatgccctttccgcgtatctcaaaattccgggaccgggcacgctaacccaacttttaaattgcagactcctcagggcaagcgaaaagtcatcaatacaccagaaatactgcgaaagccaagtcaaccccctccacggcctccccccgattacctgaggggcggctccccgccagctccgctgcctgctcatctcagccgggcggcacgcaacagcccagggccagggagtcagattgagcgcactgagagctcacgcagacccccaccgtctcgacccattccaccagcaccaaattgcattgtgagccaggatttcagccgtccaaggcccccccagaaagcactgccagccaatcccgtaccagggcggcgcagtctgccacgtcctgggggagctagcccactgaggccccctggcgctggacctcaacagtctcgccctctagccgccctcgccccgaagttccccgagtaccgtagtcagagggcaggagggatgattagctctaaaatctag

SEQ ID NO: 228104 - DNA, 2757 bp, Artificial Sequence
  derived and/or modified sequence
atgccaggcggagcgggagctgcgaggctgtgtctcctcgcattcgctcttcagcctttgcgacctcgagccgcacgcgaaccgggttggactcgcggttctgaagaaggatcacccaaactgcagcatgagctgataatcccgcagtggaagacgtctgaatctcctgtccgggagaagcacccactgaaggccgagctgcgtgtcatggccgaaggcagggagctaatcctcgatctcgagaagaacgaacaattgttcgctccatcttacactgagacccactacacctcctctggaaaccctcagacaacaacccgcaagctggaagaccattgcttttaccacggaacagttagagaaaccgaactgagctctgtgacactgtctacctgtagaggaatccgcggactgattactgtgagtagtaacctgagttacgtgattgagcctctgccagattctaagggtcagcacctgatttacagatctgaacatctcaaacccccacccggaaattgcggcttcgagcactcgaagcccacaactagagattgggccctgcaattcacacagcagacaaagaaacggccacgccgaatgaaaagagaggacctaaacagcatgaagtacgtggagctctacctggttgccgactaccttgaattccagaaaaataggagggatcaggatgctactaagcacaagctgatcgagatcgcgaattacgtggataaattttaccgctctttgaatatacggatcgcccttgttggactcgaggtctggacacacggaaacatgtgcgaggtgtcagagaacccttattccactctctggtctttcctctcatggcgtcgcaaactgcttgcgcagaagtaccatgataatgcccagttgatcacaggtatgtctttccatggcaccaccatcggtctcgcaccattaatggctatgtgcagcgtgtaccagtctggtggagttaacatggaccattcagaaaatgcaatcggcgtggcagctacaatggcacatgaaatgggccacaactttggaatgacccacgattctgcagattgttgcagtgcctctgctgcagacgggggatgcatcatggctgccgctaccgggcacccgtttcctaaggtcttcaacggttgtaatcgcagagagctggatagatatctgcagagtggcggagggatgtgtctctccaacatgccagatacgagaatgctgtatggcggacggaggtgcgggaacggctatctggaagacggcgaagagtgcgactgtggcgaggaggaagagtgtaacaacccctgctgcaatgcctctaattgcacacttcgtcccggtgcggagtgtgctcacggtagctgttgtcatcagtgcaagctgttggcacccggaaccctctgccgtgagcaggcgagacagtgtgatctgcccgagttctgcaccggtaagtctccccattgtccaacaaacttctaccagatggatgggaccccttgcgaaggcggtcaggcttattgctacaatgggatgtgcctgacctatcaggagcaatgtcaacagctttggggcccaggagccagaccagcacctgatttgtgttttgaaaaggtgaatgttgccggagacacttttggtaactgcggaaaagatatgaatggagagcacaggaagtgcaatatgcgcgacgccaagtgcggaaaaatacagtgtcaatctagcgaagccagaccgctggagtccaatgccgtcccgatcgatactacaataatcatgaacgggcgtcagatccagtgcagaggtactcatgtatatcgaggaccggaagaggagggcgacatgctcgaccctgggttggtcatgaccggcaccaaatgtggatacaaccacatatgcttcgaaggccagtgtcgcaacacctccttttttgaaacagaagggtgcggcaaaaaatgcaatggccatggggtctgcaacaacaaccagaactgtcactgtctgccgggttgggctccccctttctgcaacacgcctgggcatggaggttccattgatagtggcccaatgccccctgagtccgtagggcctgtagtggccggagtgttagtggccatccttgtccttgccgtcttaatgctaatgtactactgttgcaggcaaaacaataagctgggacaactgaaaccatctgccctgccatcaaagctgaggcagcaatttagttgtcccttccgagtctcccagaattccggaacaggccatgcaaacccgacattcaagctccagaccccacagggcaagcggaaggtgattaacactccagaaattttgcgcaagccgtcccagcctccaccgaggcctccccctgactatctccgagggggaagcccgcctgcgccactgcccgctcatctctcgagggcagccagaaatagccccggtcctgggtcgcaaatcgagaggacagaatcttctcgtcggccaccaccgagccgcccaatccccccagccccaaactgtattgtatcacaggatttcagccgtccccgaccaccacagaaggctctacctgccaatcctgtacccggaaggagaagcttacctagacctggaggcgcatctcctcttcgccctcctggcgctgggccacagcagtcgcgccctcttgcagctctggctcctaaatttcccgagtatcgttctcagagggctggcggaatgatctcttctaaaatctag

SEQ ID NO: 228105 - DNA, 2763 bp, Artificial Sequence
  derived and/or modified sequence
atgcctgggggtgccggagcagctcgtttgtgcctgctggctttcgccttacaacccctgcgcccacgtgcagcacgcgagcccggatggaccatctctaggggatctgaggagggcagccccaagctgcagcatgaactgattattccgcaatggaagaccagcgagtcgcccgtgcgggagaaacatcctcttaaggcggagctgagggtgatggcagaagggagggagctgatccttgacctggaaaagaatgagcagctgtttgccccttcttatacagaaacgcattataccagctcaggcaatcctcagactactacgagaaaactggaggatcattgtttttaccacggtaccgtccgcgaaacagagctgtcttccgtgactctgtcaacctgtcgcggtatccgcggtttaattacagtgagtagtaacctatcctacgtgatagaaccactcccagattcaaaaggacagcacctgatctatagaagcgagcacctaaagcccccacccggaaactgcggtttcgaacattctaagccaactactagagattgggctttgcagtttacccaacagacaaaaaagcgtcctcggagaatgaaacgggaggatcttaatagcatgaaatacgtcgagctgtacctagtagctgactacctagaattccagaaaaatcggagagaccaggatgcaaccaaacacaagttaattgaaattgctaactatgtggataagttctatagatctctcaacatccgtattgctcttgtgggccttgaggtgtggacccatggaaatatgtgtgaagtttcagagaacccctattccacattgtggtctttcctgagttggagaaggaaactgcttgcccaaaagtatcacgacaatgcacagcttattaccggaatgagttttcatggcaccaccatcggcttagctcctctcatggccatgtgtagtgtttaccagtcaggcggtgttaacatggatcacagcgaaaatgcaattggggttgcggctacgatggcccatgagatgggccataacttcggaatgacccacgattcagcggactgctgctcagcttcggcagcagacgggggatgcatcatggctgcagcaaccggacatccttttcccaaggtgttcaatggatgtaacagaagagagttggaccggtacctgcagagcggaggcggaatgtgtctctcaaatatgccagacacgcgtatgctgtacgggggacggcgttgcgggaacggatatctggaggacggggaggagtgcgattgcggggaagaggaggagtgtaacaacccctgctgcaatgcatcaaattgtactttacggccaggcgcagagtgtgcacacggttcttgctgccaccagtgtaagctcctcgcaccaggcaccctgtgtcgagagcaggccagacaatgcgatctccccgagttttgtacgggcaagagcccccattgccctaccaacttctaccagatggatggcacaccgtgtgaggggggacaggcttactgttacaacgggatgtgcctaacatatcaggagcagtgtcaacaactgtggggcccaggtgctcggcctgcccctgatctgtgctttgagaaggtcaatgtggccggagacacgttcggtaattgcgggaaggacatgaacggggagcaccggaagtgtaatatgagagacgcaaagtgcggcaagatacagtgccagtccagcgaagcccgacccttggagtcaaacgcagtacccattgataccacaatcataatgaacggaaggcagattcaatgccgcggaactcacgtgtacagaggcccagaggaagagggcgacatgcttgatcccggactggtgatgactgggacaaagtgtggttacaatcatatctgcttcgaagggcagtgccggaatacgtctttcttcgagacggaggggtgcggaaaaaaatgcaatggtcatggtgtctgcaataataaccagaactgccattgtctccctggttgggcgcctcccttctgtaacacacctggacacggtggctccatcgattccggcccaatgccccctgaatcagtggggcctgtggtggccggtgttcttgtcgccatactagtgctggcggtcctcatgctcatgtattattgttgccgacagaataacaaactgggccagctcaaaccatccgctttgcccagcaaactccggcagcagttcagctgccccttccgcgtgtcccagaatagtgggactggtcatgccaatcctacatttaagctgcagactccgcagggcaagcgcaaagtgattaatacccctgagattctgcgcaagccctctcagccacctccacgaccaccacctgattaccttcggggtgggtctccacccgctcctctcccagcccacctatcccgggctgctagaaatagtcccggaccagggtcccagattgagagaacagaatcctcgcgacgcccaccacccagcagacctatcccacctgcgcctaattgcatagttagtcaagacttttcccgaccccgacccccacagaaggctctccccgctaaccccgtgcctggaaggcgctccctaccgaggcccggaggtgcttccccgctgcgaccccctggcgctggtccacagcaatctcggcctctcgcggctctggcacctaagttcccagagtaccggtcgcaaagagcgggtggcatgattagctcaaaaatatag

SEQ ID NO: 228106 - DNA, 2757 bp, Artificial Sequence
  derived and/or modified sequence
atgcccggcggcgccggcgccgccagactgtgcctgctggccttcgccctgcagcccctgagacccagagccgccagagagcccggctggaccagaggcagcgaggagggcagccccaagctgcagcacgagctgatcatcccccagtggaagaccagcgagagccccgtgagagagaagcaccccctgaaggccgagctgagagtgatggccgagggcagagagctgatcctggacctggagaagaacgagcagctgttcgcccccagctacaccgagacccactacaccagcagcggcaacccccagaccaccaccagaaagctggaggaccactgcttctaccacggcaccgtgagagagaccgagctgagcagcgtgaccctgagcacctgcagaggcatcagaggcctgatcaccgtgagcagcaacctgagctacgtgatcgagcccctgcccgacagcaagggccagcacctgatctacagaagcgagcacctgaagcccccccccggcaactgcggcttcgagcacagcaagcccaccaccagagactgggccctgcagttcacccagcagaccaagaagagacccagaagaatgaagagagaggacctgaacagcatgaagtacgtggagctgtacctggtggccgactacctggagttccagaagaacagaagagaccaggacgccaccaagcacaagctgatcgagatcgccaactacgtggacaagttctacagaagcctgaacatcagaatcgccctggtgggcctggaggtgtggacccacggcaacatgtgcgaggtgagcgagaacccctacagcaccctgtggagcttcctgagctggagaagaaagctgctggcccagaagtaccacgacaacgcccagctgatcaccggcatgagcttccacggcaccaccatcggcctggcccccctgatggccatgtgcagcgtgtaccagagcggcggcgtgaacatggaccacagcgagaacgccatcggcgtggccgccaccatggcccacgagatgggccacaacttcggcatgacccacgacagcgccgactgctgcagcgccagcgccgccgacggcggctgcatcatggccgccgccaccggccaccccttccccaaggtgttcaacggctgcaacagaagagagctggacagatacctgcagagcggcggcggcatgtgcctgagcaacatgcccgacaccagaatgctgtacggcggcagaagatgcggcaacggctacctggaggacggcgaggagtgcgactgcggcgaggaggaggagtgcaacaacccctgctgcaacgccagcaactgcaccctgagacccggcgccgagtgcgcccacggcagctgctgccaccagtgcaagctgctggcccccggcaccctgtgcagagagcaggccagacagtgcgacctgcccgagttctgcaccggcaagagcccccactgccccaccaacttctaccagatggacggcaccccctgcgagggcggccaggcctactgctacaacggcatgtgcctgacctaccaggagcagtgccagcagctgtggggccccggcgccagacccgcccccgacctgtgcttcgagaaggtgaacgtggccggcgacaccttcggcaactgcggcaaggacatgaacggcgagcacagaaagtgcaacatgagagacgccaagtgcggcaagatccagtgccagagcagcgaggccagacccctggagagcaacgccgtgcccatcgacaccaccatcatcatgaacggcagacagatccagtgcagaggcacccacgtgtacagaggccccgaggaggagggcgacatgctggaccccggcctggtgatgaccggcaccaagtgcggctacaaccacatctgcttcgagggccagtgcagaaacaccagcttcttcgagaccgagggctgcggcaagaagtgcaacggccacggcgtgtgcaacaacaaccagaactgccactgcctgcccggctgggccccccccttctgcaacacccccggccacggcggcagcatcgacagcggccccatgccccccgagagcgtgggccccgtggtggccggcgtgctggtggccatcctggtgctggccgtgctgatgctgatgtactactgctgcagacagaacaacaagctgggccagctgaagcccagcgccctgcccagcaagctgagacagcagttcagctgccccttcagagtgagccagaacagcggcaccggccacgccaaccccaccttcaagctgcagaccccccagggcaagagaaaggtgatcaacacccccgagatcctgagaaagcccagccagcccccccccagacccccccccgactacctgagaggcggcagcccccccgcccccctgcccgcccacctgagcagagccgccagaaacagccccggccccggcagccagatcgagagaaccgagagcagcagaagacccccccccagcagacccatcccccccgcccccaactgcatcgtgagccaggacttcagcagacccagacccccccagaaggccctgcccgccaaccccgtgcccggcagaagaagcctgcccagacccggcggcgccagccccctgagaccccccggcgccggcccccagcagagcagacccctggccgccctggcccccaagttccccgagtacagaagccagagagccggcggcatgatcagcagcaagatctag

SEQ ID NO: 228107 - DNA, 2763 bp, Artificial Sequence
  derived and/or modified sequence
atgcccggcggcgccggcgccgccagactgtgcctgctggccttcgccctgcagcccctgagacccagagccgccagagagcccggctggaccatcagcagaggcagcgaggagggcagccccaagctgcagcacgagctgatcatcccccagtggaagaccagcgagagccccgtgagagagaagcaccccctgaaggccgagctgagagtgatggccgagggcagagagctgatcctggacctggagaagaacgagcagctgttcgcccccagctacaccgagacccactacaccagcagcggcaacccccagaccaccaccagaaagctggaggaccactgcttctaccacggcaccgtgagagagaccgagctgagcagcgtgaccctgagcacctgcagaggcatcagaggcctgatcaccgtgagcagcaacctgagctacgtgatcgagcccctgcccgacagcaagggccagcacctgatctacagaagcgagcacctgaagcccccccccggcaactgcggcttcgagcacagcaagcccaccaccagagactgggccctgcagttcacccagcagaccaagaagagacccagaagaatgaagagagaggacctgaacagcatgaagtacgtggagctgtacctggtggccgactacctggagttccagaagaacagaagagaccaggacgccaccaagcacaagctgatcgagatcgccaactacgtggacaagttctacagaagcctgaacatcagaatcgccctggtgggcctggaggtgtggacccacggcaacatgtgcgaggtgagcgagaacccctacagcaccctgtggagcttcctgagctggagaagaaagctgctggcccagaagtaccacgacaacgcccagctgatcaccggcatgagcttccacggcaccaccatcggcctggcccccctgatggccatgtgcagcgtgtaccagagcggcggcgtgaacatggaccacagcgagaacgccatcggcgtggccgccaccatggcccacgagatgggccacaacttcggcatgacccacgacagcgccgactgctgcagcgccagcgccgccgacggcggctgcatcatggccgccgccaccggccaccccttccccaaggtgttcaacggctgcaacagaagagagctggacagatacctgcagagcggcggcggcatgtgcctgagcaacatgcccgacaccagaatgctgtacggcggcagaagatgcggcaacggctacctggaggacggcgaggagtgcgactgcggcgaggaggaggagtgcaacaacccctgctgcaacgccagcaactgcaccctgagacccggcgccgagtgcgcccacggcagctgctgccaccagtgcaagctgctggcccccggcaccctgtgcagagagcaggccagacagtgcgacctgcccgagttctgcaccggcaagagcccccactgccccaccaacttctaccagatggacggcaccccctgcgagggcggccaggcctactgctacaacggcatgtgcctgacctaccaggagcagtgccagcagctgtggggccccggcgccagacccgcccccgacctgtgcttcgagaaggtgaacgtggccggcgacaccttcggcaactgcggcaaggacatgaacggcgagcacagaaagtgcaacatgagagacgccaagtgcggcaagatccagtgccagagcagcgaggccagacccctggagagcaacgccgtgcccatcgacaccaccatcatcatgaacggcagacagatccagtgcagaggcacccacgtgtacagaggccccgaggaggagggcgacatgctggaccccggcctggtgatgaccggcaccaagtgcggctacaaccacatctgcttcgagggccagtgcagaaacaccagcttcttcgagaccgagggctgcggcaagaagtgcaacggccacggcgtgtgcaacaacaaccagaactgccactgcctgcccggctgggccccccccttctgcaacacccccggccacggcggcagcatcgacagcggccccatgccccccgagagcgtgggccccgtggtggccggcgtgctggtggccatcctggtgctggccgtgctgatgctgatgtactactgctgcagacagaacaacaagctgggccagctgaagcccagcgccctgcccagcaagctgagacagcagttcagctgccccttcagagtgagccagaacagcggcaccggccacgccaaccccaccttcaagctgcagaccccccagggcaagagaaaggtgatcaacacccccgagatcctgagaaagcccagccagcccccccccagacccccccccgactacctgagaggcggcagcccccccgcccccctgcccgcccacctgagcagagccgccagaaacagccccggccccggcagccagatcgagagaaccgagagcagcagaagacccccccccagcagacccatcccccccgcccccaactgcatcgtgagccaggacttcagcagacccagacccccccagaaggccctgcccgccaaccccgtgcccggcagaagaagcctgcccagacccggcggcgccagccccctgagaccccccggcgccggcccccagcagagcagacccctggccgccctggcccccaagttccccgagtacagaagccagagagccggcggcatgatcagcagcaagatctag

SEQ ID NO: 228108 - DNA, 6481 bp, Artificial Sequence
  derived and/or modified sequence
agacgcgcctccaccgccgggcagtgggcaggtatggctgagggcgtgtgagcgccgagcgctaagggccgccgccaccatgccagggggcgcaggcgccgcccggctctgcttgctggcgtttgccctgcagcccctccggccgcgggcggcgcgggagcctggatggacaagaggaagtgaggaaggcagccccaagctgcagcatgaacttatcatacctcagtggaagacttcagaaagccccgtgagagaaaagcatccactcaaagctgagctcagggtaatggctgaggggcgagaactgatcctggacctggagaagaatgagcaactttttgctccttcctacacagaaacccattatacttcaagtggtaaccctcaaaccaccacacggaaattggaggatcactgcttttaccacggcacggtgagggagacagaactgtccagcgtcacgctcagcacttgccgaggaattagaggactgattacggtgagcagcaacctcagctacgtcatcgagcccctccctgacagcaagggccaacaccttatttacagatctgaacatctcaagccgcccccgggaaactgtgggttcgagcactccaagcccaccaccagggactgggctcttcagtttacacaacagaccaagaagcgacctcgcaggatgaaaagggaagatttaaactccatgaagtatgtggagctttacctcgtggctgattatttagagtttcagaagaatcgacgagaccaggacgccaccaaacacaagctcatagagatcgccaactatgttgataagttttaccgatccttgaacatccggattgctctcgtgggcttggaagtgtggacccacgggaacatgtgtgaagtttcagagaatccatattctaccctctggtcctttctcagttggaggcgcaagctgcttgcccagaagtaccatgacaacgcccaattaatcacgggcatgtccttccacggcaccaccatcggcctggcccccctcatggccatgtgctctgtgtaccagtctggaggagtcaacatggaccactccgagaatgccattggcgtggctgccaccatggcccacgagatgggccacaactttggcatgacccatgattctgcagattgctgctcggccagtgcggctgatggtgggtgcatcatggcagctgccactgggcacccctttcccaaagtgttcaatggatgcaacaggagggagctggacaggtatctgcagtcaggtggtggaatgtgtctctccaacatgccagacaccaggatgttgtatggaggccggaggtgtgggaacgggtatctggaagatggggaagagtgtgactgtggagaagaagaggaatgtaacaacccctgctgcaatgcctctaattgtaccctgaggccgggggcggagtgtgctcacggctcctgctgccaccagtgtaagctgttggctcctgggaccctgtgccgcgagcaggccaggcagtgtgacctcccggagttctgtacgggcaagtctccccactgccctaccaacttctaccagatggatggtaccccctgtgagggcggccaggcctactgctacaacggcatgtgcctcacctaccaggagcagtgccagcagctgtggggacccggagcccgacctgcccctgacctctgcttcgagaaggtgaatgtggcaggagacacctttggaaactgtggaaaggacatgaatggtgaacacaggaagtgcaacatgagagatgcgaagtgtgggaagatccagtgtcagagctctgaggcccggcccctggagtccaacgcggtgcccattgacaccactatcatcatgaatgggaggcagatccagtgccggggcacccacgtctaccgaggtcctgaggaggagggtgacatgctggacccagggctggtgatgactggaaccaagtgtggctacaaccatatttgctttgaggggcagtgcaggaacacctccttctttgaaactgaaggctgtgggaagaagtgcaatggccatggggtctgtaacaacaaccagaactgccactgcctgccgggctgggccccgcccttctgcaacacaccgggccacgggggcagtatcgacagtgggcctatgccccctgagagtgtgggtcctgtggtagctggagtgttggtggccatcttggtgctggcggtcctcatgctgatgtactactgctgcagacagaacaacaaactaggccaactcaagccctcagctctcccttccaagctgaggcaacagttcagttgtcccttcagggtttctcagaacagcgggactggtcatgccaacccaactttcaagctgcagacgccccagggcaagcgaaaggtgatcaacactccggaaatcctgcggaagccctcccagcctcctccccggccccctccagattatctgcgtggtgggtccccacctgcaccactgccagctcacctgagcagggctgctaggaactccccagggcccgggtctcaaatagagaggacggagtcgtccaggaggcctcctccaagccggccaattccccccgcaccaaattgcatcgtttcccaggacttctccaggcctcggccgccccagaaggcactcccggcaaacccagtgccaggccgcaggagcctccccaggccaggaggtgcatccccactgcggccccctggtgctggccctcagcagtcccggcctctggcagcacttgccccaaagtttccagaatacagatcacagagggctggagggatgattagctcgaaaatctagacctgtccaaggggcttctccctttccttgagctctctggacactgcagaggacccatggccatggaaccctgaagaagcatgtctggccgcctctgagctcctcccaccctcctccaggaacctccacatctccaaaaatctccctgttgactcagtgcctcctcggcttccttggaagcccagagggactatgatctgatggcctctaggtgttgttttgtgcaatatacagccccaggtagggaggggagagtatgaggagggtgactggcagcttctcctccagactcctagccccgaggtgctgatggagatgctcaaggccagcaagcccctcaggccagcacttcgcttgcagaagccatccattcactcctggggtgcagggcacgcaagagagcttcccattgcttctgctctcctcagaggtcccgggctggatggaggctggtacttacccaccccttttagcttttagggattaaggaagggtcaagccagccactgctgtggccctgcccagggcttggttgagggaacggcttctggctgtatggctgcatgtgacaagccacgtcccctcccacctctccccaaacccctgcatccctgtattcacacgggtcactctgactcagacaggtactattcgtaggcagtgtagacagcaggaggagcaccgggcttgggcttcctctgagccgtgatgccaaaggttgcgactcctgactctggataatttttagttgctctttgttttctctgccgcactttcctggtgccccacgcttttctctcttccttcccctctcattctccctctaatgtgtggtgctttggtgagcaaaccctcagcagtcctgaccttcgggtgaccaggtgcttgtgacctacaagtcagagtcctctctcacagtcggccactggatttccctcactggctctcaggagtgtgaccagagtagacttggggcatggccattggggtcatatgtttatttttcattgtgttttgtgacctcagcagggtgggggtcttcctccttactctaagctaaatctaggtgaggtttccccttagggagcccagctatttacaaagtacacacgagggagcaggctggtcattgacttcgggctggaccgttgccctctgagcagagaacagacccatttctgggagctgcccgagatcactggagaaggcagccagcagcagctgcactggaacagtcagagcagggagcctcttcctcaacccagctttttgtcattcacttccttttgttctctctctggtcactgcccttacctgaccctcacagaaagagagctctgagcaggtgagggggtctgcggtggctcctgtcttccctgcagcagggaaggagggccgtgtggtgctttgctagataggacggtttttgcaaagcacctggagatgtttgctgggagatagactcccactccacaaaggtgctgggtggctctccggacaggagctggcctgactctcactcctctgaggctttcctggggcctcctcccatcctgccatgagcaattgtttgctcttgaaaacctcactgcaaggctgaggctgagcttctgattcaccaccccagggcctccttatagttctctgcacacaataggtgcttcttggatgttcttgggtttggaaataagtggaaaatacgggatgtacccctgggggaaaagcctgggttgggtttagaaagatctcaggaaaatgagtttctcttccctcagggtggctgtgatacaggttccccatgtccttgccgtgggtcatccttgctgtgggtcatccttgctgtggagatccattccccacctttcctgtggcccaaccttttatttaaatgtgctaccctctgcctcaaggcttggttcctggaaagtaaaggtgaaaacatcccctttcacccctctgcaaaacaaacaagcaacatcctcaaaacccaaccccatgcctcacagagcttcctgtggcttctccagcctttctccctcacatcaggaggtagatagctctgaaatgacagcgccacagccatagtgactgcatgagccatctgaacctgcagtccaccctccctggaaccacaccagaaagagacctgggttgtcgttttcttgctttttgttttgttttgttttattattttcatatcacctccatcccataaagttgtactgtgaactggaagatggtggaatgttttggaatttgatagactttcggcaaccagttctactaatgcttcactcctggctctgttcagggaggctgcccaggaggaagactggccattatgcatccccttttctttccagtgcccagtatgctgttttgaggtgtcaaatacaaataaatctgggcttagggaaggagagaccttattccaaagcacgattgcagaaggggaaagggaatattgcaaaagggagaggaaggggccttatgggaatagtgaaaaggctcagaccgaccgatggcaagatctgcaagcgtctcaaagcccaggcagaaaaggacttttcttttattggaagaagtaaacatggctagaaagaaccacgttcagggaatgacgttgtgcccagcctttttttttttttttttttttttgtctccaggggaggggctgtttgctggctcaggctgaggatggcccaaagtccagggtctggtggggaggagggaagcttaactcaagtttgggttagtgagttagcaagctctttgtgcagatggggatgtaggtaaatctttttaaaagtgaaattaacctcctgccaattttacaacccaagaatttttttttaagggccttggagccatctctaaaacaaacctcaagggatttagtgccctgtctccctgtctctagaagccttagcctgggcacctggctcaatcttgtaactgcctgctagccatagattcctttcagccttgctgacttctccctataaaagtaaagcctttttctgccccagctctgagacacttgcagatcttaaggtctgagacttgctgattttctggttggagtgtttttttgtattgccatagtcccttccccctgaagcaatagcccctccccacctcctgcaatacgcctttccaatctttattggaagtctctccctgcctacttcctaatttattcttatttgacagagggtatggaagacttgcaatttgaaaactggggaccagttccaaagtcagtaattgtgttaaccacgtgtataacagctctgctggacacccaagaaagccatgggaacgccaactggaaaggtccccttccccaggggagcctgcgaaggagaggttctgtagaatccaagcccacatttccaaagtcacccccaacgcgtcctctcacaccgtccactgtgcgtttgtatgtgtctgggatccagggcaatgtgaattttctttttatttgggagattgttcacggaaaacagatcttcttctctcttgtccacctattaattgtttacaatatttgtacatctatgcaaaatacttgaatgggccatggtgccttttttccttgttagtatttaattaaaaatgaattgtttgtcatttgcaatgtta

SEQ ID NO: 228109 - DNA, 6472 bp, Artificial Sequence
  derived and/or modified sequence
gccgggcagtgggcaggtatggctgagggcgtgtgagcgccgagcgctaagggccgccgccaccatgccagggggcgcaggcgccgcccggctctgcttgctggcgtttgccctgcagcccctccggccgcgggcggcgcgggagcctggatggacaatctctagaggaagtgaggaaggcagccccaagctgcagcatgaacttatcatacctcagtggaagacttcagaaagccccgtgagagaaaagcatccactcaaagctgagctcagggtaatggctgaggggcgagaactgatcctggacctggagaagaatgagcaactttttgctccttcctacacagaaacccattatacttcaagtggtaaccctcaaaccaccacacggaaattggaggatcactgcttttaccacggcacggtgagggagacagaactgtccagcgtcacgctcagcacttgccgaggaattagaggactgattacggtgagcagcaacctcagctacgtcatcgagcccctccctgacagcaagggccaacaccttatttacagatctgaacatctcaagccgcccccgggaaactgtgggttcgagcactccaagcccaccaccagggactgggctcttcagtttacacaacagaccaagaagcgacctcgcaggatgaaaagggaagatttaaactccatgaagtatgtggagctttacctcgtggctgattatttagagtttcagaagaatcgacgagaccaggacgccaccaaacacaagctcatagagatcgccaactatgttgataagttttaccgatccttgaacatccggattgctctcgtgggcttggaagtgtggacccacgggaacatgtgtgaagtttcagagaatccatattctaccctctggtcctttctcagttggaggcgcaagctgcttgcccagaagtaccatgacaacgcccaattaatcacgggcatgtccttccacggcaccaccatcggcctggcccccctcatggccatgtgctctgtgtaccagtctggaggagtcaacatggaccactccgagaatgccattggcgtggctgccaccatggcccacgagatgggccacaactttggcatgacccatgattctgcagattgctgctcggccagtgcggctgatggtgggtgcatcatggcagctgccactgggcacccctttcccaaagtgttcaatggatgcaacaggagggagctggacaggtatctgcagtcaggtggtggaatgtgtctctccaacatgccagacaccaggatgttgtatggaggccggaggtgtgggaacgggtatctggaagatggggaagagtgtgactgtggagaagaagaggaatgtaacaacccctgctgcaatgcctctaattgtaccctgaggccgggggcggagtgtgctcacggctcctgctgccaccagtgtaagctgttggctcctgggaccctgtgccgcgagcaggccaggcagtgtgacctcccggagttctgtacgggcaagtctccccactgccctaccaacttctaccagatggatggtaccccctgtgagggcggccaggcctactgctacaacggcatgtgcctcacctaccaggagcagtgccagcagctgtggggacccggagcccgacctgcccctgacctctgcttcgagaaggtgaatgtggcaggagacacctttggaaactgtggaaaggacatgaatggtgaacacaggaagtgcaacatgagagatgcgaagtgtgggaagatccagtgtcagagctctgaggcccggcccctggagtccaacgcggtgcccattgacaccactatcatcatgaatgggaggcagatccagtgccggggcacccacgtctaccgaggtcctgaggaggagggtgacatgctggacccagggctggtgatgactggaaccaagtgtggctacaaccatatttgctttgaggggcagtgcaggaacacctccttctttgaaactgaaggctgtgggaagaagtgcaatggccatggggtctgtaacaacaaccagaactgccactgcctgccgggctgggccccgcccttctgcaacacaccgggccacgggggcagtatcgacagtgggcctatgccccctgagagtgtgggtcctgtggtagctggagtgttggtggccatcttggtgctggcggtcctcatgctgatgtactactgctgcagacagaacaacaaactaggccaactcaagccctcagctctcccttccaagctgaggcaacagttcagttgtcccttcagggtttctcagaacagcgggactggtcatgccaacccaactttcaagctgcagacgccccagggcaagcgaaaggtgatcaacactccggaaatcctgcggaagccctcccagcctcctccccggccccctccagattatctgcgtggtgggtccccacctgcaccactgccagctcacctgagcagggctgctaggaactccccagggcccgggtctcaaatagagaggacggagtcgtccaggaggcctcctccaagccggccaattccccccgcaccaaattgcatcgtttcccaggacttctccaggcctcggccgccccagaaggcactcccggcaaacccagtgccaggccgcaggagcctccccaggccaggaggtgcatccccactgcggccccctggtgctggccctcagcagtcccggcctctggcagcacttgccccaaagtttccagaatacagatcacagagggctggagggatgattagctcgaaaatctagacctgtccaaggggcttctccctttccttgagctctctggacactgcagaggacccatggccatggaaccctgaagaagcatgtctggccgcctctgagctcctcccaccctcctccaggaacctccacatctccaaaaatctccctgttgactcagtgcctcctcggcttccttggaagcccagagggactatgatctgatggcctctaggtgttgttttgtgcaatatacagccccaggtagggaggggagagtatgaggagggtgactggcagcttctcctccagactcctagccccgaggtgctgatggagatgctcaaggccagcaagcccctcaggccagcacttcgcttgcagaagccatccattcactcctggggtgcagggcacgcaagagagcttcccattgcttctgctctcctcagaggtcccgggctggatggaggctggtacttacccaccccttttagcttttagggattaaggaagggtcaagccagccactgctgtggccctgcccagggcttggttgagggaacggcttctggctgtatggctgcatgtgacaagccacgtcccctcccacctctccccaaacccctgcatccctgtattcacacgggtcactctgactcagacaggtactattcgtaggcagtgtagacagcaggaggagcaccgggcttgggcttcctctgagccgtgatgccaaaggttgcgactcctgactctggataatttttagttgctctttgttttctctgccgcactttcctggtgccccacgcttttctctcttccttcccctctcattctccctctaatgtgtggtgctttggtgagcaaaccctcagcagtcctgaccttcgggtgaccaggtgcttgtgacctacaagtcagagtcctctctcacagtcggccactggatttccctcactggctctcaggagtgtgaccagagtagacttggggcatggccattggggtcatatgtttatttttcattgtgttttgtgacctcagcagggtgggggtcttcctccttactctaagctaaatctaggtgaggtttccccttagggagcccagctatttacaaagtacacacgagggagcaggctggtcattgacttcgggctggaccgttgccctctgagcagagaacagacccatttctgggagctgcccgagatcactggagaaggcagccagcagcagctgcactggaacagtcagagcagggagcctcttcctcaacccagctttttgtcattcacttccttttgttctctctctggtcactgcccttacctgaccctcacagaaagagagctctgagcaggtgagggggtctgcggtggctcctgtcttccctgcagcagggaaggagggccgtgtggtgctttgctagataggacggtttttgcaaagcacctggagatgtttgctgggagatagactcccactccacaaaggtgctgggtggctctccggacaggagctggcctgactctcactcctctgaggctttcctggggcctcctcccatcctgccatgagcaattgtttgctcttgaaaacctcactgcaaggctgaggctgagcttctgattcaccaccccagggcctccttatagttctctgcacacaataggtgcttcttggatgttcttgggtttggaaataagtggaaaatacgggatgtacccctgggggaaaagcctgggttgggtttagaaagatctcaggaaaatgagtttctcttccctcagggtggctgtgatacaggttccccatgtccttgccgtgggtcatccttgctgtgggtcatccttgctgtggagatccattccccacctttcctgtggcccaaccttttatttaaatgtgctaccctctgcctcaaggcttggttcctggaaagtaaaggtgaaaacatcccctttcacccctctgcaaaacaaacaagcaacatcctcaaaacccaaccccatgcctcacagagcttcctgtggcttctccagcctttctccctcacatcaggaggtagatagctctgaaatgacagcgccacagccatagtgactgcatgagccatctgaacctgcagtccaccctccctggaaccacaccagaaagagacctgggttgtcgttttcttgctttttgttttgttttgttttattattttcatatcacctccatcccataaagttgtactgtgaactggaagatggtggaatgttttggaatttgatagactttcggcaaccagttctactaatgcttcactcctggctctgttcagggaggctgcccaggaggaagactggccattatgcatccccttttctttccagtgcccagtatgctgttttgaggtgtcaaatacaaataaatctgggcttagggaaggagagaccttattccaaagcacgattgcagaaggggaaagggaatattgcaaaagggagaggaaggggccttatgggaatagtgaaaaggctcagaccgaccgatggcaagatctgcaagcgtctcaaagcccaggcagaaaaggacttttcttttattggaagaagtaaacatggctagaaagaaccacgttcagggaatgacgttgtgcccagcctttttttttttttttttttttttgtctccaggggaggggctgtttgctggctcaggctgaggatggcccaaagtccagggtctggtggggaggagggaagcttaactcaagtttgggttagtgagttagcaagctctttgtgcagatggggatgtaggtaaatctttttaaaagtgaaattaacctcctgccaattttacaacccaagaatttttttttaagggccttggagccatctctaaaacaaacctcaagggatttagtgccctgtctccctgtctctagaagccttagcctgggcacctggctcaatcttgtaactgcctgctagccatagattcctttcagccttgctgacttctccctataaaagtaaagcctttttctgccccagctctgagacacttgcagatcttaaggtctgagacttgctgattttctggttggagtgtttttttgtattgccatagtcccttccccctgaagcaatagcccctccccacctcctgcaatacgcctttccaatctttattggaagtctctccctgcctacttcctaatttattcttatttgacagagggtatggaagacttgcaatttgaaaactggggaccagttccaaagtcagtaattgtgttaaccacgtgtataacagctctgctggacacccaagaaagccatgggaacgccaactggaaaggtccccttccccaggggagcctgcgaaggagaggttctgtagaatccaagcccacatttccaaagtcacccccaacgcgtcctctcacaccgtccactgtgcgtttgtatgtgtctgggatccagggcaatgtgaattttctttttatttgggagattgttcacggaaaacagatcttcttctctcttgtccacctattaattgtttacaatatttgtacatctatgcaaaatacttgaatgggccatggtgccttttttccttgttagtatttaattaaaaatgaattgtttgtcatttgcaatgtta

SEQ ID NO: 228110 - protein, 246 aa, Artificial Sequence
  derived and/or modified sequence
MAGAPDERRRGPAAGEQLQQQHVSCQVFPERLAQGNPQQGFFSSFFTSNQKCQLRLLKTLETNPYVKLLLDAMKHSGCAVNKDRHFSCEDCNGNVSGGFDASTSQIVLCQNNIHNQAHMNRVVTHELIHAFDHCRAHVDWFTNIRHLACSEVRAANLSGDCSLVNEIFRLHFGLKQHHQTCVRDRATLSILAVRNISKEVAKKAVDEVFESCFNDHEPFGRIPHNKTYARYAHRDFENRDRYYSNI

SEQ ID NO: 228111 - DNA, 741 bp, Artificial Sequence
  derived and/or modified sequence
atggccggcgcccccgacgagagaagaagaggccccgccgccggcgagcagctgcagcagcagcacgtgagctgccaggtgttccccgagagactggcccagggcaacccccagcagggcttcttcagcagcttcttcaccagcaaccagaagtgccagctgagactgctgaagaccctggagaccaacccctacgtgaagctgctgctggacgccatgaagcacagcggctgcgccgtgaacaaggacagacacttcagctgcgaggactgcaacggcaacgtgagcggcggcttcgacgccagcaccagccagatcgtgctgtgccagaacaacatccacaaccaggcccacatgaacagagtggtgacccacgagctgatccacgccttcgaccactgcagagcccacgtggactggttcaccaacatcagacacctggcctgcagcgaggtgagagccgccaacctgagcggcgactgcagcctggtgaacgagatcttcagactgcacttcggcctgaagcagcaccaccagacctgcgtgagagacagagccaccctgagcatcctggccgtgagaaacatcagcaaggaggtggccaagaaggccgtggacgaggtgttcgagagctgcttcaacgaccacgagcccttcggcagaatcccccacaacaagacctacgccagatacgcccacagagacttcgagaacagagacagatactacagcaacatctag

SEQ ID NO: 228112 - DNA, 741 bp, Artificial Sequence
  derived and/or modified sequence
atggctggtgcccccgacgaacggcgcagggggccagcagctggcgagcaactgcagcaacagcatgtatcatgccaggtgtttcctgagagactggcccaggggaacccacagcaaggattcttctcctctttctttacttccaaccagaaatgccaactgaggctgctgaagacactggaaacaaacccctatgtgaagctactccttgacgctatgaagcattcaggctgcgccgttaacaaggacaggcacttctcatgtgaggactgcaacggaaatgtgtcagggggcttcgatgccagcacgagtcagatcgtgttgtgccagaataatattcataaccaggcccacatgaacagagtggtgacacacgaattgatccacgccttcgaccactgtcgcgcccatgtggattggtttactaatatcaggcacctggcatgctccgaagtgcgcgcagcgaacctgagcggagactgttctctggtgaatgaaattttcaggctccatttcgggctcaaacaacaccatcagacctgtgtgcgggatagggcaacattaagcatcctggccgtgaggaatatttctaaggaagtcgcgaagaaagccgtggacgaagtctttgagtcttgtttcaacgaccacgaaccattcgggagaatcccccacaataagacctatgctcgatatgcccaccgggattttgagaatagggacaggtactacagcaacatttag

SEQ ID NO: 228113 - DNA, 741 bp, Artificial Sequence
  derived and/or modified sequence
atggccggggccccagatgagaggagaagaggccctgctgctggggagcagctgcagcagcagcacgtgtcctgccaggtgtttcctgagcggctggcccagggcaacccccagcagggcttcttcagcagcttcttcaccagcaaccagaagtgccagctgcggctgctgaagaccctggagaccaacccctacgtgaagctgctgctggatgccatgaagcacagcggctgtgctgtgaacaaggacagacacttcagctgtgaggactgcaatggaaatgtgtctgggggctttgatgccagcaccagccagatcgtgctgtgccagaacaacatccacaaccaggcccacatgaacagagtggtgacccatgagctgattcatgcctttgaccactgccgggcccacgtggactggttcaccaacatccgccacctggcctgcagcgaggtgcgggccgccaacctgagcggggactgcagcctggtgaatgagatcttccggctgcacttcggcctgaagcagcaccaccagacctgtgtgcgggaccgggccaccctgagcatcctggccgtgaggaacatcagcaaggaggtggccaagaaggctgtggatgaggtgtttgagagctgcttcaatgaccacgagcccttcggccgcatcccccacaacaagacctacgcccgctatgcccaccgggactttgaaaatagagaccgctactacagcaacatctag

SEQ ID NO: 228114 - DNA, 741 bp, Artificial Sequence
  derived and/or modified sequence
atggccggcgcccccgacgagcggcggcggggccccgccgccggcgaacagctccagcagcaacatgtgagttgtcaggttttcccggaacgcctggcccaaggaaatcctcaacaaggcttcttctcctctttttttacctctaaccagaagtgtcagcttaggctgctcaaaaccttagagactaatccatacgtgaaactgctattggatgccatgaagcattcagggtgcgcagttaataaggataggcatttcagttgtgaggattgtaacgggaatgtctccggcgggtttgacgcctcaacaagccagatcgtgttgtgccagaacaacatccataaccaggctcatatgaatcgcgtcgtgactcatgagctgattcatgcattcgaccattgcagggcacacgtcgactggtttacgaacattagacacctggcttgcagcgaagtgcgggctgccaacctgtctggagactgctccttggttaatgaaatcttcaggctccactttgggttgaaacaacaccaccagacttgtgtccgcgacagggccacgctctcaatcctggcagttaggaatatctcgaaggaggtagccaagaaggctgttgacgaggttttcgagagctgtttcaacgaccacgaaccatttggccggatcccccacaacaagacctatgctaggtatgcccaccgggacttcgaaaacagggacaggtactatagtaacatctag

SEQ ID NO: 228115 - DNA, 741 bp, Artificial Sequence
  derived and/or modified sequence
atggccggagctcctgacgaaagacgcaggggtcccgctgcaggggagcagctgcagcagcagcacgtgagctgccaggtgttccctgagcggcttgcccaaggcaatcctcagcagggttttttttcgtcattcttcacatcaaatcaaaagtgccagttgagactgcttaagacactagaaacgaacccctacgttaaattgctgctagatgcaatgaaacactctggttgtgcggtcaataaggaccgccatttcagttgcgaggattgcaatgggaacgtgtctggcggatttgacgcctcgacgagccagattgtgttgtgtcagaataacattcataatcaagctcatatgaatcgtgtggtgacacatgaactcatccatgcctttgaccactgccgcgcacacgtggactggtttacaaacattagacacctcgcctgctcagaagttcgagcagccaacctgagtggtgattgtagcttggtgaacgagatttttaggttacactttggacttaagcaacaccatcagacatgtgtgagagatcgtgccaccttaagtatcctggcagtgcgtaatatctctaaagaggtcgcaaaaaaagccgttgacgaggtcttcgaaagctgttttaacgatcatgaaccgtttggcaggatccctcataataaaacatacgccagatacgcacatcgggatttcgagaatcgcgatagatactattccaatatctag

SEQ ID NO: 228116 - DNA, 1245 bp, Artificial Sequence
  derived and/or modified sequence
ggctgcccttcttccctgcggagggagggcctgggcggtcgcgttggcgggagggaggttacctttcccagtctcgctctggccgcctgagccaggaggaagcagcggcgaggtctgcgggaggcatggcgggagctccggacgagcgccggcggggccccgcggcaggggagcagctgcagcagcaacacgtctcttgccaggtcttccccgagcgtctggcccaggggaatccccagcaagggttcttctccagcttcttcaccagcaaccagaagtgccagcttaggctcctgaagacgctggagacaaatccatatgtcaaacttctgcttgatgctatgaaacactcaggttgtgctgttaacaaagatagacacttttcttgcgaagactgtaatggaaatgtcagtggaggttttgatgcttcaacatctcagatagttttgtgccagaataatatccataatcaggcccatatgaacagagtggtcacacacgagcttattcatgcatttgatcattgtcgtgcccatgtcgactggttcaccaacatcagacatttggcgtgctcagaggttcgagctgctaaccttagtggagactgctcacttgtcaatgaaatattcaggttacattttggattaaaacaacaccaccagacttgtgtgcgagacagagccactctttctatcctggctgttaggaatatcagcaaagaagtagctaaaaaggctgttgatgaagtttttgaatcttgtttcaatgaccatgaaccttttggaaggatcccacataacaagacttatgcaagatatgctcacagagactttgaaaaccgtgatcggtattattcaaatatatgagcacaatgacatttttatattacagagcttccatcatcatgaagaaaaaaaaatttggttctcaagtgaacaaacatataaaatgtaaacaatccctacaatccagataaaacagagaagactgtgattctagcatattatcagaaaaagtaactatggcaaaaaatgaaactgctttaaactccaaggcagaaattgtatctttatagctaaccatttagtaaataaatacattacatttttgtattttagtcatttgtttttattacatgtgattattttaaaatttgattatgaaacctgtgaagtgtgctcttccatgatgttgataggtgaccactgttggtatttacattaaatgtaaagaaatgtgtactga

SEQ ID NO: 228117 - protein, 138 aa, Artificial Sequence
  derived and/or modified sequence
MKFTTLLFLAAVAGALVYAEDASSDSTGADPAQEAGTSKPNEEISGPAEPASPPETTTTAQETSAAAVQGTAKVTSSRQELNPLKSIVEKSILLTEQALAKAGKGMHGGVPGGKQFIENGSEFAQKLLKKFSLLKPWA

SEQ ID NO: 228118 - DNA, 417 bp, Artificial Sequence
  derived and/or modified sequence
atgaagttcaccaccctgctcttcctggctgccgtagccggtgcactggtgtacgccgaagatgccagcagtgattcaactggcgctgaccctgctcaggaagctggtaccagtaaaccaaacgaggagatcagtgggccagcggagcccgccagtccccctgagacaacaaccacggctcaggagacttccgccgcagccgtgcagggcacggccaaagtgacgtcatctagacaggagctgaatcccctgaagtctatcgtggagaagagcatcctacttactgagcaggctctggctaaagccggaaagggtatgcacggaggcgtgcccggaggaaaacaattcatagagaacggcagcgaatttgcccagaaactcctgaagaaattttcactgctgaaaccctgggcctag

SEQ ID NO: 228119 - DNA, 551 bp, Artificial Sequence
  derived and/or modified sequence
attccccagaccttctgcagattctgtggttatactcactcctcatcccaaagaatgaaatttaccactctcctcttcttggcagctgtagcaggggccctggtctatgctgaagatgcctcctctgactcgacgggtgctgatcctgcccaggaagctgggacctctaagcctaatgaagagatctcaggtccagcagaaccagcttcacccccagagacaaccacaacagcccaggagacttcggcggcagcagttcaggggacagccaaggtcacctcaagcaggcaggaactaaaccccctgaaatccatagtggagaaaagtatcttactaacagaacaagcccttgcaaaagcaggaaaaggaatgcacggaggcgtgccaggtggaaaacaattcatcgaaaatggaagtgaatttgcacaaaaattactgaagaaattcagtctattaaaaccatgggcatgagaagctgaaaagaatgggatcattggacttaaagccttaaatacccttgtagcccagagctattaaaacgaaagcatcca

SEQ ID NO: 228120 - DNA, 417 bp, Artificial Sequence
  derived and/or modified sequence
atgaagttcaccaccctgctcttcctggccgctgtggccggggccctggtgtatgcagaagatgccagcagtgacagcactggagctgaccctgcccaggaggccggcaccagcaagcccaatgaggagatcagcggccctgctgagcccgccagccccccagagaccaccaccacagcccaggagaccagcgctgctgctgtgcagggcacagccaaggtgaccagcagccggcaggagctgaaccccctgaagagcatcgtggagaagagcatcctgctgacagagcaggccctggccaaggccggcaagggcatgcatggaggagtgcctgggggcaagcagttcattgaaaatggaagtgaatttgcccagaagctgctgaagaagttcagcctgctgaagccctgggcctag

SEQ ID NO: 228121 - DNA, 417 bp, Artificial Sequence
  derived and/or modified sequence
atgaagttcaccaccctgctgttcctggccgccgtggccggcgccctagtatacgctgaagatgcttccagtgatagcactggcgccgaccccgcacaggaggcggggacttccaaaccaaacgaggaaatcagcggccccgctgagcccgcatcaccccccgagactaccacaacggcccaagagaccagcgctgctgcagttcaaggcacagcaaaagtcacatccagtagacaggagcttaacccccttaaatcaatagtggagaagagcatcctgctcacggaacaagccctggcaaaggctggaaagggtatgcacggcggcgtgcccggtgggaagcagttcatagagaatggctctgagttcgcgcaaaagttactgaagaaattctctctgctgaaaccttgggcctag

SEQ ID NO: 228122 - DNA, 417 bp, Artificial Sequence
  derived and/or modified sequence
atgaagttcacgactctgctgttcttggccgcagtcgccggtgccttggtgtatgcagaagacgcgtcatctgattccactggagctgacccggctcaagaggcgggaacctccaagcccaatgaagagatttctggccctgcagaacctgcgtccccgccagagactacgaccacggcacaggaaacttctgccgctgccgttcaaggcactgctaaggtgaccagctcacgccaggagcttaatcccctcaaatccatcgtcgaaaagagcatccttttaaccgagcaggcactggccaaagctggcaaaggtatgcacggcggagtgcctggcggaaaacagttcatcgaaaacggcagtgaatttgcacagaaactgctgaagaagttttccctgttaaagccatgggcctag

SEQ ID NO: 228123 - DNA, 417 bp, Artificial Sequence
  derived and/or modified sequence
atgaagttcaccaccctgctgttcctggccgccgtggccggcgccctggtgtacgccgaggacgccagcagcgacagcaccggcgccgaccccgcccaggaggccggcaccagcaagcccaacgaggagatcagcggccccgccgagcccgccagcccccccgagaccaccaccaccgcccaggagaccagcgccgccgccgtgcagggcaccgccaaggtgaccagcagcagacaggagctgaaccccctgaagagcatcgtggagaagagcatcctgctgaccgagcaggccctggccaaggccggcaagggcatgcacggcggcgtgcccggcggcaagcagttcatcgagaacggcagcgagttcgcccagaagctgctgaagaagttcagcctgctgaagccctgggcctag

SEQ ID NO: 228124 - protein, 192 aa, Artificial Sequence
  derived and/or modified sequence
MVRAGAVGAHLPASGLDIFGDLKKMNKRQLYYQVLNFAMIVSSALMIWKGLIVLTGSESPIVVVLSGSMEPAFHRGDLLFLTNFREDPIRAGEIVVFKVEGRDIPIVHRVIKVHEKDNGDIKFLTKGDNNEVDDRGLYKEGQNWLEKKDVVGRARGFLPYVGMVTIIMNDYPKFKYALLAVMGAYVLLKRES

SEQ ID NO: 228125 - protein, 156 aa, Artificial Sequence
  derived and/or modified sequence
MVRAGAVGAHLPASGLDIFGDLKKMNKRQLYYQVLNFAMIVSSALMIWKGLIVLTGSESPIVVVLSGSMEPAFHRGDLLFLTNFREDPIRAGEIVVFKVEGRDIPIVHRVIKVHEKDNGDIKFLTKGDNNEVDDRGLYKEGQNWLEKKDVVGRARG

SEQ ID NO: 228126 - DNA, 579 bp, Artificial Sequence
  derived and/or modified sequence
atggtgagagccggcgccgtgggcgcccacctgcccgccagcggcctggacatcttcggcgacctgaagaagatgaacaagagacagctgtactaccaggtgctgaacttcgccatgatcgtgagcagcgccctgatgatctggaagggcctgatcgtgctgaccggcagcgagagccccatcgtggtggtgctgagcggcagcatggagcccgccttccacagaggcgacctgctgttcctgaccaacttcagagaggaccccatcagagccggcgagatcgtggtgttcaaggtggagggcagagacatccccatcgtgcacagagtgatcaaggtgcacgagaaggacaacggcgacatcaagttcctgaccaagggcgacaacaacgaggtggacgacagaggcctgtacaaggagggccagaactggctggagaagaaggacgtggtgggcagagccagaggcttcctgccctacgtgggcatggtgaccatcatcatgaacgactaccccaagttcaagtacgccctgctggccgtgatgggcgcctacgtgctgctgaagagagagagctag

SEQ ID NO: 228127 - DNA, 579 bp, Artificial Sequence
  derived and/or modified sequence
atggtccgtgcgggggccgttggcgcgcacttgcccgccagcggactggacatctttggggatctgaagaaaatgaataagcggcagctgtattatcaggtgctcaatttcgcgatgatcgttagttcagctctcatgatctggaaaggccttattgtcttgaccggctccgagtctcccatcgtagtcgtcctttccggctcaatggagcctgcgtttcaccggggtgatctcctgtttcttacaaacttcagagaagacccgattagagccggagaaatcgtagtgttcaaggtggaaggtagggatatcccaatagtgcatagagtcattaaggtgcatgagaaggacaacggagatatcaaatttctcaccaaaggggataacaatgaggtcgatgatcgcggactctacaaggaaggtcagaattggttggagaagaaagacgtggtcggacgggcccggggctttctgccctatgttgggatggttaccatcatcatgaacgactaccctaagttcaagtatgccttactggccgtcatgggcgcctacgtcctactgaaaagagaaagctag

SEQ ID NO: 228128 - DNA, 579 bp, Artificial Sequence
  derived and/or modified sequence
atggtgcgcgcaggtgctgtcggggctcacttaccagcgtcaggcctagacatattcggggatttgaagaagatgaacaaaaggcagctctactatcaagtgctgaatttcgctatgatcgtgagcagcgcactgatgatatggaaaggattaatagtcttaactggatcagagagccccattgtggtcgtcctttctgggagcatggagcccgccttccaccgtggggacctcctgtttttaacgaattttcgcgaagaccctatccgagcaggagagatcgtggttttcaaggtcgaaggccgggatataccaatcgtgcacagagtgatcaaggtgcatgagaaggacaacggcgatattaaattcctaaccaagggcgacaataacgaggtcgacgaccgaggcttgtataaagagggccagaattggcttgagaagaaagatgtcgttggcagagctcgcggatttttaccctacgtcggcatggtgacaatcatcatgaatgactatcctaagtttaagtacgctttgcttgcagtgatgggcgcctatgtgttattgaaacgcgagagctag

SEQ ID NO: 228129 - DNA, 579 bp, Artificial Sequence
  derived and/or modified sequence
atggtgcgggccggggctgtgggcgcccacctgcctgccagcggcctggacatctttggagacctgaagaagatgaacaagaggcagctgtactaccaggtgctgaactttgccatgattgtgtcctctgccctgatgatctggaagggcctcatcgtgctgactggaagtgagagccccatcgtggtggtgctgagcggctccatggagcccgccttccacagaggagacctgctcttcctgaccaacttccgggaggaccccatccgggccggggagatcgtggtgttcaaggtggagggccgggacatccccatcgtgcacagggtcatcaaggtgcatgagaaggacaacggggacatcaagttcctgaccaagggggacaacaatgaggtggatgaccggggcctgtacaaggagggccagaactggctggagaagaaggatgtggtgggccgggcccggggcttcctgccctacgtgggcatggtgaccatcatcatgaatgactaccccaagttcaagtatgccctgctggccgtgatgggcgcctacgtgctgctgaagcgggagagctag

SEQ ID NO: 228130 - DNA, 579 bp, Artificial Sequence
  derived and/or modified sequence
atggtgcgggccggcgccgtgggcgcccacctgcccgccagcggccttgacatctttggagaccttaagaaaatgaataaaagacaattgtactaccaggtgctgaacttcgccatgattgtgagttccgccttgatgatctggaaaggactgattgtgctgaccggctctgagtcccccattgtcgtggtgctctcaggctctatggaaccagcctttcaccggggcgacctgctatttcttactaactttcgggaagatcccattagggctggggaaattgtagtgttcaaggtggagggccgcgatattccgatcgtgcaccgagtcattaaagttcacgagaaagataacggggatataaaatttttaactaagggggacaacaatgaggtggacgatagaggcctttataaggagggccagaattggttggagaaaaaggacgtcgtcggccgcgcccgaggttttttgccttatgtgggcatggttactatcattatgaacgactaccctaagtttaagtacgctttactggctgtgatgggagcttacgtgctacttaaacgcgaatcatag

SEQ ID NO: 228131 - DNA, 579 bp, Artificial Sequence
  derived and/or modified sequence
atggtgcgggccggcgccgtgggcgcccacctgcccgccagcggcttggacatcttcggggacttaaaaaaaatgaataaacggcagttgtattatcaggtgttaaattttgctatgattgtatccagtgccctaatgatctggaaggggcttatcgtcctgactggatcagagtccccgattgtggtggttctctcaggatcaatggagccagcatttcaccgcggcgatttgctgtttctgacaaattttcgagaggaccccattcgggctggcgagatcgtcgtttttaaggtggaggggcgggacattcccattgtccaccgtgtgataaaagtgcacgagaaggataatggagacataaagtttcttactaagggggacaacaacgaggtggacgaccggggtctctacaaagagggtcaaaactggctggaaaagaaagatgttgtgggacgggcgcgaggttttctgccctacgttggtatggtcacaattattatgaatgactaccctaagttcaagtatgcactgctggccgtcatgggggcctacgtcctgctgaagagggagtcatag

SEQ ID NO: 228132 - DNA, 579 bp, Artificial Sequence
  derived and/or modified sequence
atggtgagagctggggctgttggagctcacctacccgctagtggcctggatatttttggcgacctaaaaaagatgaacaagcggcaactatactatcaggtgcttaacttcgccatgatagtttccagtgcactgatgatctggaaggggctcattgtactgaccggcagtgagagcccaattgtggttgtcctaagtggaagcatggaaccggcattccaccgtggggacctcctcttccttactaattttagagaagacccaatcagggccggagaaattgtggtttttaaggttgagggtcgtgatatccctattgtgcaccgcgtcatcaaggtgcacgaaaaggataatggcgacattaaatttctcaccaagggcgacaataacgaggtagatgataggggtctctataaagaaggtcagaattggctggaaaagaaggatgtggtgggtcgggcaagaggattcctcccctacgtgggcatggtcactatcatcatgaatgattaccctaagttcaagtacgccctgcttgcggtgatgggggcatacgtcctactaaagcgggagtcatag

SEQ ID NO: 228133 - DNA, 579 bp, Artificial Sequence
  derived and/or modified sequence
atggtgcgggcaggcgcagtgggcgcacacttgccggcaagcggcctggatatcttcggagatctgaaaaaaatgaataaacgccagttgtactatcaggtcctcaatttcgccatgatcgtctccagcgccctgatgatatggaaaggcctcatcgtgctgaccgggagtgaatctccaattgtagtagtccttagcggaagcatggaaccggcttttcacaggggtgacttgcttttcttgaccaattttagggaggaccccattcgggctggagaaatagtggtgtttaaggtggaaggtcgcgacatccctatcgttcacagggtcattaaggtgcatgagaaggacaatggagacattaagtttctgaccaaaggtgataacaacgaggtggatgatcggggattgtacaaagaaggccaaaactggctcgagaaaaaagatgtggttggtcgagctcgcggattcctgccgtatgtgggtatggtcaccataattatgaacgattaccctaagttcaagtatgcactattagccgtgatgggagcatatgttctgcttaaaagggagtcttag

SEQ ID NO: 228134 - DNA, 824 bp, Artificial Sequence
  derived and/or modified sequence
ggacgctgggccggtgggcgggggccggcaggtgctccgcagccgtctgtgccacccagagccggcgggccgctaggtccccggagaccctgctatggtgcgtgcgggcgccgtgggggctcatctccccgcgtccggcttggatatcttcggggacctgaagaagatgaacaagcgccagctctattaccaggttttaaacttcgccatgatcgtgtcttctgcactcatgatatggaaaggcttgatcgtgctcacaggcagtgagagccccatcgtggtggtgctgagtggcagtatggagccggcctttcacagaggagacctcctgttcctcacaaatttccgggaagacccaatcagagctggtgaaatagttgtttttaaagttgaaggacgagacattccaatagttcacagagtaatcaaagttcatgaaaaagataatggagacatcaaatttctgactaaaggagataataatgaagttgatgatagaggcttgtacaaagaaggccagaactggctggaaaagaaggacgtggtgggaagagcaagagggtttttaccatatgttggtatggtcaccataataatgaatgactatccaaaattcaagtatgctcttttggctgtaatgggtgcatatgtgttactaaaacgtgaatcctaaaatgagaagcagttcctgggaccagattgaaatgaattctgttgaaaaagagaaaaactaatatatttgagatgttccattttctgtataaaagggaacagtgtggagatgtttttgtcttgtccaaataaaagattcaccagtaaagatg

SEQ ID NO: 228135 - DNA, 1202 bp, Artificial Sequence
  derived and/or modified sequence
ctttcctcgctgcagtcatccaatagccaagatacacggctaggtgatttgcgagcgggagttaggtgtcctcttggcgcctgaccagagtcgggaaattcagctcctcttgagtagtcccttccccgagttgccccccgaggtatgcggggtcactcgctgctcgatgttccctccgaagggtcggacaaggctccggagccctgtagctgccctccctaggagccccgggtcttcactggccgaggtgcccaccccgcagcattctgggagtggtagttttcttccttcaggttcattcctggctggccagtgcccaagactggcgagactacgattcccagacgcccaagcgagtcgccggtcacgtggccgcaaggacgctgggccggtgggcgggggccggcaggtgctccgcagccgtctgtgccacccagagccggcgggccgctaggtccccggagaccctgctatggtgcgtgcgggcgccgtgggggctcatctccccgcgtccggcttggatatcttcggggacctgaagaagatgaacaagcgccagctctattaccaggttttaaacttcgccatgatcgtgtcttctgcactcatgatatggaaaggcttgatcgtgctcacaggcagtgagagccccatcgtggtggtgctgagtggcagtatggagccggcctttcacagaggagacctcctgttcctcacaaatttccgggaagacccaatcagagctggtgaaatagttgtttttaaagttgaaggacgagacattccaatagttcacagagtaatcaaagttcatgaaaaagataatggagacatcaaatttctgactaaaggagataataatgaagttgatgatagaggcttgtacaaagaaggccagaactggctggaaaagaaggacgtggtgggaagagcaagagggtttttaccatatgttggtatggtcaccataataatgaatgactatccaaaattcaagtatgctcttttggctgtaatgggtgcatatgtgttactaaaacgtgaatcctaaaatgagaagcagttcctgggaccagattgaaatgaattctgttgaaaaagagaaaaactaatatatttgagatgttccattttctgtataaaagggaacagtgtggagatgtttttgtcttgtccaaataaaagattcaccagtaaagatg

SEQ ID NO: 228136 - protein, 478 aa, Artificial Sequence
  derived and/or modified sequence
MNPPSGPRVPPSPTQEPSCMATPAPPSWWDSSQSSISSLGRLPSISPTAPGTWAAAWVPLPTVDVPDHAHYTLGTVILLVGLTGMLGNLTVIYTFCRSRSLRTPANMFIINLAVSDFLMSFTQAPVFFTSSLYKQWLFGETGCEFYAFCGALFGISSMITLTAIALDRYLVITRPLATFGVASKRRAAFVLLGVWLYALAWSLPPFFGWSAYVPEGLLTSCSWDYMSFTPAVRAYTMLLCCFVFFLPLLIIIYCYIFIFRAIRETGRALQTFGACKGNGESLWQRQRLQSECKMAKIMLLVILLFVLSWAPYSAVALVAFAGYAHVLTPYMSSVPAVIAKASAIHNPIIYAITHPKYRVAIAQHLPCLGVLLGVSRRHSRPYPSYRSTHRSTLTSHTSNLSWISIRRRQESLGSESEVGWTHMEAAAVWGAAQQANGRSLYGQGLEDLEAKAPPRPQGHEAETPGKTKGLIPSQDPRM

SEQ ID NO: 228137 - DNA, 1437 bp, Artificial Sequence
  derived and/or modified sequence
atgaacccccccagcggccccagagtgccccccagccccacccaggagcccagctgcatggccacccccgccccccccagctggtgggacagcagccagagcagcatcagcagcctgggcagactgcccagcatcagccccaccgcccccggcacctgggccgccgcctgggtgcccctgcccaccgtggacgtgcccgaccacgcccactacaccctgggcaccgtgatcctgctggtgggcctgaccggcatgctgggcaacctgaccgtgatctacaccttctgcagaagcagaagcctgagaacccccgccaacatgttcatcatcaacctggccgtgagcgacttcctgatgagcttcacccaggcccccgtgttcttcaccagcagcctgtacaagcagtggctgttcggcgagaccggctgcgagttctacgccttctgcggcgccctgttcggcatcagcagcatgatcaccctgaccgccatcgccctggacagatacctggtgatcaccagacccctggccaccttcggcgtggccagcaagagaagagccgccttcgtgctgctgggcgtgtggctgtacgccctggcctggagcctgccccccttcttcggctggagcgcctacgtgcccgagggcctgctgaccagctgcagctgggactacatgagcttcacccccgccgtgagagcctacaccatgctgctgtgctgcttcgtgttcttcctgcccctgctgatcatcatctactgctacatcttcatcttcagagccatcagagagaccggcagagccctgcagaccttcggcgcctgcaagggcaacggcgagagcctgtggcagagacagagactgcagagcgagtgcaagatggccaagatcatgctgctggtgatcctgctgttcgtgctgagctgggccccctacagcgccgtggccctggtggccttcgccggctacgcccacgtgctgaccccctacatgagcagcgtgcccgccgtgatcgccaaggccagcgccatccacaaccccatcatctacgccatcacccaccccaagtacagagtggccatcgcccagcacctgccctgcctgggcgtgctgctgggcgtgagcagaagacacagcagaccctaccccagctacagaagcacccacagaagcaccctgaccagccacaccagcaacctgagctggatcagcatcagaagaagacaggagagcctgggcagcgagagcgaggtgggctggacccacatggaggccgccgccgtgtggggcgccgcccagcaggccaacggcagaagcctgtacggccagggcctggaggacctggaggccaaggccccccccagaccccagggccacgaggccgagacccccggcaagaccaagggcctgatccccagccaggaccccagaatgtag

SEQ ID NO: 228138 - DNA, 1437 bp, Artificial Sequence
  derived and/or modified sequence
atgaatccaccgtcaggaccacgggtgccaccaagtcccacccaggagccaagttgtatggctacacctgcacccccttcttggtgggactcttcccagagttctatctccagtcttgggcgcttgcccagtatctcaccgacagctcctggaacttgggcagccgcctgggtcccactgccaaccgtggacgttccggatcatgcccactatacgctgggtacagttatcctcctcgtaggcctcaccggcatgctgggcaacctgacagtgatctacacattttgtaggtctagaagcctacgcacccccgccaacatgttcattatcaacctggccgtctctgactttctcatgtccttcactcaggccccagttttttttacttccagtttgtacaaacaatggctgtttggtgaaaccggctgcgaattttatgccttttgtggagccctgtttggaatctcgtctatgataactctgactgccatcgctctggacagatacctcgttatcacccggccactcgctaccttcggggtcgctagcaagaggcgtgccgcctttgtgctgctcggggtgtggctgtacgccctggcctggtctctccccccattcttcgggtggtccgcctatgtgccagagggactcctgacctcatgttcgtgggactatatgtccttcacaccagcagtgcgggcctatacgatgctcttatgttgcttcgtattcttcctgccccttctgatcattatatattgttacatcttcatatttagggctataagagaaaccggccgtgccctgcaaaccttcggggcctgtaaagggaacggcgaaagcctgtggcagagacagcgtttacaatcagaatgcaaaatggcaaaaattatgctgctggtgattctcctctttgtcctttcctgggccccatattccgccgtagctttagtggcatttgcgggatacgcccacgtgttaaccccatacatgagctctgtacccgcggtgatagccaaggcatctgctattcataatcccataatttacgctattacccaccctaagtatagggttgccattgctcagcatcttccctgtctgggggtcctcttgggtgtctcacgccggcattcacgtccctatccatcttatcgatctacccaccgcagcaccctgacttcacacaccagtaacctttcctggatttcaattcgccggcgtcaggaatcacttggaagcgagagtgaagttggctggacccatatggaagctgccgctgtttggggcgctgcccagcaggcgaacggacgatctctctacgggcagggcctcgaagacttggaagcaaaggcccctccccgacctcaggggcatgaggcggagacccctggtaagactaagggacttataccctctcaggacccacgcatgtag

SEQ ID NO: 228139 - DNA, 1437 bp, Artificial Sequence
  derived and/or modified sequence
atgaaccccccatctggcccccgggtgccccccagccccacccaggagcccagctgcatggccaccccagcccctccttcctggtgggacagcagccagagcagcatcagcagcctgggccgcctgcccagcatcagccccacagcccctggcacctgggccgccgcctgggtgcccctgcccaccgtggatgtgcctgaccacgcccactacaccctgggcaccgtcatcctgctggtgggcctgaccggcatgctgggcaacctgaccgtcatctacaccttctgccgcagccgcagcctgcggaccccagccaacatgttcatcatcaacctggccgtgtctgacttcctgatgtccttcacccaggcccctgtgttcttcaccagcagcctgtacaagcagtggctgtttggagaaacaggctgtgagttctacgccttctgtggggccctgtttggcatcagctccatgatcaccctgacagccatcgccctggaccgctacctggtgatcacccggcccctggccacctttggagtggccagcaagagaagagctgcctttgtgctgctgggcgtgtggctgtatgccctggcctggagcctgccccccttcttcggctggagcgcctacgtgcctgagggcctgctgaccagctgctcctgggactacatgtccttcaccccagctgtgcgggcctacaccatgctgctgtgctgctttgtgttcttcctgcccctgctgatcatcatctactgctacatcttcatcttccgggccatccgggagaccggccgggccctgcagaccttcggggcctgcaagggaaatggagagagcctgtggcagaggcagaggctgcagagcgagtgcaagatggccaagatcatgctgctggtgatcctgctgtttgtgctgtcctgggccccctacagcgctgtggccctggtggcctttgctggctacgcccacgtgctgaccccctacatgagctctgtgcctgctgtgattgccaaggccagcgccatccacaaccccatcatctatgccatcacccaccccaagtacagagtggccatcgcccagcacctgccctgcctgggcgtgctgctgggcgtgagccgccgccacagccggccctaccccagctaccgcagcacccacaggagcaccctgaccagccacaccagcaacctgtcctggatcagcatcagaagacggcaggagagcctgggcagcgagagcgaggtgggctggacccacatggaggccgctgctgtgtggggcgccgcccagcaggccaacggccgcagcctgtatggccagggcctggaggacctggaggccaaggccccaccccggccccagggccatgaagctgagacccctgggaagaccaagggcctcatccccagccaggaccccaggatgtag

SEQ ID NO: 228140 - DNA, 1437 bp, Artificial Sequence
  derived and/or modified sequence
atgaacccccccagcggcccccgggtgccccccagccccacccaggaaccatcctgcatggctactcctgcccctcctagctggtgggattcctcccaatcaagcatcagcagcctgggccgcctcccatccatcagcccaaccgcccccggcacgtgggcagctgcatgggtccccctccccaccgtagacgtgccggaccatgcacactacactctcggaacagttatcttgctggtgggtctgacgggaatgttgggaaacctgacagtgatctatactttttgcagatcacgatctctgcggacccccgccaatatgtttatcattaatcttgccgtctctgactttctgatgagcttcacacaggcccctgtgttttttacgtccagcctgtacaaacagtggctgtttggggagactgggtgcgaattctacgctttttgtggggcactgtttggcatcagctcaatgattacactaactgccatcgccttagataggtatctggtcataacgcgacctctagccaccttcggcgtggcttccaaacgccgggccgccttcgtgctcctgggcgtttggctgtatgctctagcctggtcactgcctccattctttgggtggagcgcttatgtcccagagggtctgctgacttcttgttcttgggactacatgtctttcacaccggcagtccgggcttatacgatgctgctgtgctgcttcgtcttctttctgccactccttataattatttattgttacatcttcattttccgagccattagagagacaggacgcgctctgcagacatttggcgcctgtaagggcaacggtgagagcctgtggcagcgccaaaggcttcagagcgaatgtaagatggctaagatcatgctgctcgtgattttgctgtttgtcctctcctgggctccatatagcgccgtggcattggtggcattcgccggatacgcccacgtgctgacaccgtatatgtctagtgtgcccgccgtaatcgccaaagcatcggccatccacaatcccataatatacgccataacgcatcccaaatatcgggttgctattgcgcagcatctgccctgcttgggagtcctactgggggtctctagaaggcatagcagaccctacccgtcgtaccggtcaacacatcgcagtactttaaccagccacacatccaatttgtcatggatttccatcagacggaggcaggaatctttaggatccgaaagcgaggttgggtggacgcacatggaggccgcagcggtctggggagctgctcagcaggctaacggaagatccctgtatggccagggactggaagacttggaagccaaggcccccccccgtccacagggccacgaggcagaaacgcccggcaagacgaagggactgataccttcacaagatccccgcatgtag

SEQ ID NO: 228141 - DNA, 2308 bp, Artificial Sequence
  derived and/or modified sequence
agcagctccaggctggatctgcgccggacacaggagaaagcagcgggtaggctaagcaggggtgctgaggatggaggaaagttgggaggctgagcacagctgaagtcctgagctccctgtgcccttgacttctctgtgggctcgagcaaggaccatcccaactcaggatgaaccctccttcggggccaagagtcccgcccagcccaacccaagagcccagctgcatggccaccccagcaccacccagctggtgggacagctcccagagcagcatctccagcctgggccggcttccatccatcagtcccacagcacctgggacttgggctgctgcctgggtccccctccccacggttgatgttccagaccatgcccactataccctgggcacagtgatcttgctggtgggactcacggggatgctgggcaacctgacggtcatctataccttctgcaggagcagaagcctccggacacctgccaacatgttcattatcaacctcgcggtcagcgacttcctcatgtccttcacccaggcccctgtcttcttcaccagtagcctctataagcagtggctctttggggagacaggctgcgagttctatgccttctgtggagctctctttggcatttcctccatgatcaccctgacggccatcgccctggaccgctacctggtaatcacacgcccgctggccacctttggtgtggcgtccaagaggcgtgcggcatttgtcctgctgggcgtttggctctatgccctggcctggagtctgccacccttcttcggctggagcgcctacgtgcccgaggggttgctgacatcctgctcctgggactacatgagcttcacgccggccgtgcgtgcctacaccatgcttctctgctgcttcgtgttcttcctccctctgcttatcatcatctactgctacatcttcatcttcagggccatccgggagacaggacgggctctccagaccttcggggcctgcaagggcaatggcgagtccctgtggcagcggcagcggctgcagagcgagtgcaagatggccaagatcatgctgctggtcatcctcctcttcgtgctctcctgggctccctattccgctgtggccctggtggcctttgctgggtacgcacacgtcctgacaccctacatgagctcggtgccagccgtcatcgccaaggcctctgcaatccacaaccccatcatttacgccatcacccaccccaagtacagggtggccattgcccagcacctgccctgcctgggggtgctgctgggtgtatcacgccggcacagtcgcccctaccccagctaccgctccacccaccgctccacgctgaccagccacacctccaacctcagctggatctccatacggaggcgccaggagtccctgggctcggagagtgaggtgggctggacacacatggaggcagcagctgtgtggggagctgcccagcaagcaaatgggcggtccctctacggtcagggtctggaggacttggaagccaaggcaccccccagaccccagggacacgaagcagagactccagggaagaccaaggggctgatccccagccaggaccccaggatgtaggacgcccactggctctccctttcttctgagacacatccagcccccccacgtctccctcatatacacagacccaggattatgctgtgagcctgcaggctttggaagtggccctgtcacccgtgctgcacgggattcacagccccagccccatggcccctctccacacctcaaaactcctgccccataacgtcctccgcatccactttccagctcagcagccgcacccgaggctcagcctgaggggtatgtgcccaggccctcccacttcccgagttgtctgcctctcctcaaatgctgtgtgctgcaattgtccaggcgatgacaatggtgatggctccagagaacacaccagctatttatgagcctctgcccccaggctgggcctgtcactggcataggaaggccagccccgcatctcccactgccaacagctgaagccgagcacagacctccctttgcacgctggaacagttactcacctgtggcttcttcccccagtgtaccgttccactgtggcccacattcttgtgcacgcgggcatttgcaggcacgctctcgcgtagttacctatctgaatgcacaccaagcacatgcgtgcacactctgcgtctgtgattcatttcatgtagtggtctaagctcctcccagggctgtgtggatctgacagggtataggaaaataaaaagcggagaaggtgtcttcag

SEQ ID NO: 228142 - DNA, 1437 bp, Artificial Sequence
  derived and/or modified sequence
atgaaccccccttccgggccaagggtgcctccctcacccactcaagaacccagctgtatggctacaccagctcccccttcctggtgggactctagtcaatcttccatctcatctctaggaagactgccaagcataagcccaactgcgcctgggacttgggcagccgcttgggttcctctgcccacagtggatgtgccggaccatgctcactacaccttgggaaccgtgattctcttggtgggtctgacaggtatgctgggcaatctgaccgtaatatataccttctgtagatccagatctttaaggaccccagcaaatatgtttataatcaatcttgccgtgtcggacttccttatgagctttacccaggcccctgttttctttacttcctctctgtacaaacaatggcttttcggcgaaaccggatgcgaattctacgctttctgtggagccttgttcggaatttctagtatgatcacgctaactgccattgctttggacaggtacttggtgattaccagacctctggccactttcggcgtggcttctaagagaagagccgctttcgtgcttctgggggtgtggctctatgccctggcctggtctttacctccctttttcggatggagcgcctacgtgcccgagggacttctcacaagctgctcttgggattacatgagcttcacgcctgctgtccgagcctacactatgctgttgtgctgtttcgtgtttttcttgcctctgctgatcattatctactgctacattttcattttcagagctatccgagaaacggggcgtgctctgcagaccttcggggcatgtaaggggaatggtgagtcactctggcagcggcaacgcctgcagtccgagtgcaagatggccaagatcatgcttctcgtgattctcctttttgtgctgagctgggctccttatagtgccgtcgcccttgttgcatttgccggatacgctcacgtattgactccttatatgagtagtgtcccagccgtgattgcaaaggcgtctgcaatccataacccaataatctatgccattactcatcccaagtatcgtgtcgccatcgcacagcacctaccttgcctcggcgtgctgctgggcgtttcccgcaggcattctaggccctacccctcataccgttctacacatagatcaaccctcacttcccacaccagcaaccttagttggatctcaatcaggagacggcaggaaagcctcgggagcgaaagcgaagtcggttggactcatatggaggcggcagccgtctggggtgccgctcagcaggctaatggccgttccctctacggacaaggcttggaggacttggaagccaaggcgcctccaagaccccaggggcacgaggcagaaaccccaggcaagacgaaggggctgatacctagtcaggacccaaggatgtag

SEQ ID NO: 228143 - protein, 316 aa, Artificial Sequence
  derived and/or modified sequence
MAAPEAPPLDRVFRTTWLSTECDSHPLPPSYRKFLFETQAADLAGGTTVAAGNLLNESEKDCGQDRRAPGVQPCRLVTMTSVVKTVYSLQPPSALSGGQPADTQTRATSKSLLPVRSKEVDVSKQLHSGGPENDVTKITKLRRENGQMKATDTATRRNVRKGYKPLSKQKSEEELKDKNQLLEAVNKQLHQKLTETQGELKDLTQKVELLEKFRDNCLAILESKGLDPALGSETLASRQESTTDHMDSMLLLETLQEELKLFNETAKKQMEELQALKVKLEMKEERVRFLEQQTLCNNQVNDLTTALKEMEQLLEM

SEQ ID NO: 228144 - DNA, 951 bp, Artificial Sequence
  derived and/or modified sequence
atggccgcaccggaagcaccccccctggaccgagtcttcagaactacgtggctgtctacagagtgtgactcccacccgttgcccccatcatatagaaagttcctgttcgagacccaggccgctgaccttgcaggtggaactaccgtggccgccgggaaccttctcaacgagagtgaaaaagactgcggccaggatagacgagctccgggtgtacaaccttgtcgcctggtgactatgacatccgttgtaaagaccgtctactccctgcaacctccctccgcgctgagtggcggacagcccgccgacactcagacgagagctacctcaaagtcgttgctgcccgttagaagcaaggaggtcgacgtgtctaaacagcttcatagcggggggccagaaaatgatgtgacaaaaattacaaagctgcggcgggaaaacgggcagatgaaagcgactgacacggctaccaggagaaacgttaggaagggctataagcccctgagtaaacagaaaagcgaagaggaactcaaggataaaaaccagttgttggaggcagtaaacaaacagcttcaccagaagctgactgaaacacaaggcgagctaaaggacttaacgcagaaagtagaactattggaaaagtttagggataactgcctcgccatcttggagtctaaggggctggatccagcactagggtcagaaacactggcttccaggcaggagtcaacaacggaccatatggactccatgctgcttcttgagacactgcaggaagagctgaaactgttcaacgagactgcaaagaagcagatggaagaactacaagcactgaaagttaagctggagatgaaggaagagcgcgtgcgctttttagaacaacaaacactgtgcaacaaccaggtcaatgatttgactacagccctgaaagagatggagcagctgttggaaatgtag

SEQ ID NO: 228145 - DNA, 951 bp, Artificial Sequence
  derived and/or modified sequence
atggccgcccctgaggccccacccctggacagagtcttccgcaccacctggctgagcacagaatgtgacagccaccccctgccccccagctacaggaagttcctgtttgagacccaggccgctgacctggccggcggcaccaccgtggccgccggcaacctgctgaatgaaagtgagaaggactgtggccaggaccggcgggcccctggggtgcagccctgccgcctggtgaccatgacctctgtggtgaagacagtgtacagcctgcagcccccatctgccctgagcggcggccagcctgctgacacccagacccgggccaccagcaagagcctgctgcctgtgcgcagcaaggaggtggatgtgtccaagcagctgcacagcggcggcccagaaaatgatgtgaccaagatcaccaagctgcggcgggagaatggccagatgaaggccacagacacagccaccaggagaaatgtgaggaagggctacaagcccctgagcaagcagaagtctgaggaggagctgaaggacaagaaccagctgctggaggccgtgaacaagcagctgcaccagaagctgacagagacccagggcgagctgaaggacctgacccagaaggtggagctgctggagaagttccgggacaactgcctggccatcctggagagcaagggcctggaccctgccctgggcagcgagaccctggccagccggcaggagagcaccacagaccacatggacagcatgctgctgctggagaccctgcaggaggagctgaagctgttcaatgaaacagccaagaagcagatggaggagctgcaggccctgaaggtgaagctggagatgaaggaggagcgggtgcgcttcctggagcagcagaccctgtgcaacaaccaggtgaatgacctgaccacagccctgaaggagatggagcagctgctggagatgtag

SEQ ID NO: 228146 - DNA, 951 bp, Artificial Sequence
  derived and/or modified sequence
atggccgcccccgaggccccccccctggaccgggtgttccggaccacgtggcttagtacagagtgtgactctcaccctttaccaccttcatacagaaaatttctgttcgaaacacaagcagccgacctggcagggggaactacagtggccgcaggaaacctgttgaacgaatccgaaaaggactgcggccaagaccgccgtgcccctggtgtacaaccttgccgtctggtcactatgacatctgtggtgaaaaccgtctactcgctgcaacccccaagcgccttatctgggggccagcctgctgacactcagacgcgcgccacatcaaaaagcctgctccctgttcgaagtaaagaagttgatgtgagcaagcagctgcactcaggtggtcccgagaatgacgtgactaaaataaccaagttaaggagggaaaatggacagatgaaggctacagacaccgccactaggcgcaacgtcaggaagggctataagccactctcaaagcagaagtccgaagaggagctgaaggataaaaatcagttgctagaggcagttaataagcagctccaccaaaagctcactgaaactcagggcgagctcaaggacttaacccagaaggtggagctcttggagaaattcagggataactgtctggctatcctcgagtcaaagggactggatcctgccctgggatctgagacccttgcaagcaggcaagaaagcactactgaccacatggactctatgctgttgctcgagacactacaggaagaactgaagttgtttaacgagacagccaaaaagcaaatggaggagttgcaggcacttaaagtgaaactcgagatgaaggaggagagagtcaggttcctggagcaacagacactctgtaacaatcaggtcaatgacctcaccaccgccctaaaggagatggaacagttattggaaatgtag

SEQ ID NO: 228147 - DNA, 951 bp, Artificial Sequence
  derived and/or modified sequence
atggccgctccagaggccccaccgctggacagggttttccgcaccacctggctgtccaccgagtgcgacagccatcctttacccccttcatatcgaaagtttctttttgagacgcaggccgcagacctcgccggaggcaccaccgtggccgcaggcaatcttctgaacgaaagtgagaaggactgcggtcaggatcggcgtgccccaggtgttcagccgtgcaggctcgtgactatgacgtctgtggtcaaaactgtatacagtctgcaaccaccatccgctctgagtggaggacagcccgctgatacacagacaagagctacctccaaaagtctcctgccagtgagatctaaggaggtagacgtgagtaagcaattacactccggcggacccgagaacgatgtgaccaaaataactaaattgcggcgtgagaacggacagatgaaggccaccgacacagccactaggcggaatgtgagaaagggctataagccgctctccaagcagaagtccgaagaggaacttaaagacaagaaccagctgttagaggccgttaacaagcagctgcaccaaaagctcacggaaacgcagggggagcttaaggacctcacacagaaagtggaacttctggaaaaatttagggacaattgcctggcaatattggaaagtaaaggactggatccggcactaggcagcgaaaccctggcctctcggcaggaatcgaccacggatcatatggatagcatgctcctcctggagaccttgcaggaggagctcaagctgttcaatgagaccgctaagaaacagatggaagaactccaagctctgaaagtgaaactggaaatgaaggaggaacgagtccgatttctggagcagcaaacgctgtgtaacaaccaggttaacgatttgacaacggccctaaaggaaatggagcagctgcttgagatgtag

SEQ ID NO: 228148 - DNA, 1714 bp, Artificial Sequence
  derived and/or modified sequence
attagctccattcaagcctacaaattgcatcaccctcctcctctgcccagacctgggggctccaacacctttcgctaggtctggctctggcctctgagcgaaccttccgtacagtatggcggctcccgaagccccgcccctggacagagttttccgtacaacatggctgtctacagagtgcgattcccacccacttccgcctagctaccggaagtttctatttgaaacccaggcggccgacttagccggtggcacgacagttgctgcagggaatcttttaaacgagagcgagaaggactgcgggcaggaccggcgggctcctggggttcagccgtgccgcctcgttacgatgaccagtgtggttaagacagtgtatagcctgcagcccccctctgcgctgagcggcggccagccggcagacacacaaactcgggccacttctaagagtctcttacctgttaggtccaaagaagtcgatgtttccaaacagcttcattcaggaggtccagagaatgatgttacaaaaatcaccaaactgagacgagagaatgggcaaatgaaagctactgacactgccaccagaaggaatgtcagaaaaggctacaaaccactgagtaagcaaaaatcagaggaagagctcaaggacaagaaccagctgttagaagccgtcaacaagcagttgcaccagaagttgactgaaactcagggagagctgaaggacctgacccagaaggtagagctgctggagaagtttcgggacaactgtttggcaattttggagagcaagggccttgatccagctttaggcagtgagaccctggcatcacgacaagaatccactactgatcacatggactctatgttgctgttagaaactttgcaagaggagctgaagctttttaacgaaacagccaaaaagcagatggaggagttacaggccttaaaggtaaagctggagatgaaagaggaaagagtccgattcctagaacagcaaaccttatgtaacaatcaagtaaatgatttaacaacagcccttaaggaaatggagcagctattagaaatgtaagaagaagcaagtggccagatggctccctcttgggcataaaatctcagaggaagctacttaggacatcatcttggccatgatcttctgggactcaccatctccagaatgaaaacaatttctacagtagacttaaggacagtttatgctgaaatggcaattcctcatttaagcaagttttcccaaccttcaggttggtcagccctcctgagcctcacaggtggataattgaggcctacaagagaggggagcctaggagcttggattgaccttctagtcaaccacctgacttcagcacaccattacaatcgggagactaaaccaacaaccagaggatctaaaatgtcacattcagattttcaggaagaaaatcttcattacagtggagcacaaatgttccatacaagacatcattgaggagccatgctgtccccttctaacctgaaacacattctttcccatcctggttgggcttctgtacctccttattaatttatgaacctgaagttgcttgaagtgttttgggcttaataaatggggtgaaagtataggtagcagtaacacctacatgaaacaatacaccttggatcttttaatctaaattacttttcttttttaagtctacttttaaaataaatacttctgtaaata

SEQ ID NO: 228149 - DNA, 951 bp, Artificial Sequence
  derived and/or modified sequence
atggccgcccccgaggccccccccctggacagagtgttcagaaccacctggctgagcaccgagtgcgacagccaccccctgccccccagctacagaaagttcctgttcgagacccaggccgccgacctggccggcggcaccaccgtggccgccggcaacctgctgaacgagagcgagaaggactgcggccaggacagaagagcccccggcgtgcagccctgcagactggtgaccatgaccagcgtggtgaagaccgtgtacagcctgcagccccccagcgccctgagcggcggccagcccgccgacacccagaccagagccaccagcaagagcctgctgcccgtgagaagcaaggaggtggacgtgagcaagcagctgcacagcggcggccccgagaacgacgtgaccaagatcaccaagctgagaagagagaacggccagatgaaggccaccgacaccgccaccagaagaaacgtgagaaagggctacaagcccctgagcaagcagaagagcgaggaggagctgaaggacaagaaccagctgctggaggccgtgaacaagcagctgcaccagaagctgaccgagacccagggcgagctgaaggacctgacccagaaggtggagctgctggagaagttcagagacaactgcctggccatcctggagagcaagggcctggaccccgccctgggcagcgagaccctggccagcagacaggagagcaccaccgaccacatggacagcatgctgctgctggagaccctgcaggaggagctgaagctgttcaacgagaccgccaagaagcagatggaggagctgcaggccctgaaggtgaagctggagatgaaggaggagagagtgagattcctggagcagcagaccctgtgcaacaaccaggtgaacgacctgaccaccgccctgaaggagatggagcagctgctggagatgtag

SEQ ID NO: 228150 - protein, 617 aa, Artificial Sequence
  derived and/or modified sequence
METLESELTCPICLELFEDPLLLPCAHSLCFNCAHRILVSHCATNESVESITAFQCPTCRHVITLSQRGLDGLKRNVTLQNIIDRFQKASVSGPNSPSETSAEKVLCQFCDQDPAQDAVKTCVTCEVSYCDECLKATHPNKKPFTGHRLIEPIPDSHIRGLMCLEHEDEKQNLESNLTNLIKRNTELETLLAKLIQTCQHVEVNASRQEAKLTEECDLLIEIIQQRRQIIGTKIKEGKVMRLRKLAQQIANCKQCIERSASLISQAEHSLKENDHARFLQTAKNITERVSMATASSQVLIPEINLNDTFDTFALDFSREKKLLECLDYLTAPNPPTIREELCTASYDTITVHWTSDDEFSVVSYELQYTIFTGQANVVSLCNSADSWMIVPNIKQNHYTVHGLQSGTKYIFMVKAINQAGSRSSEPGKLKTNSQPFKLDPKSAHRKLKVSHDNLTVERDESSSKKSHTPERFTSQGSYGVAGNVFIDSGRHYWEVVISGSTWYAIGLAYKSAPKHEWIGKNSASWALCRCNNNWVVRHNSKEIPIEPAPHLRRVGILLDYDNGSIAFYDALNSIHLYTFDVAFAQPVCPTFTVWNKCLTIITGLPIPDHLDCTEQLP

SEQ ID NO: 228151 - DNA, 1854 bp, Artificial Sequence
  derived and/or modified sequence
atggaaacgctagaatctgaacttacatgccccatctgtttggaactgttcgaagaccctcttttacttccatgcgcccacagtctgtgttttaattgtgcccaccgcatactcgtgtcccattgtgctacaaatgaaagtgttgaatctattacggcattccagtgtcctacttgtcggcatgttattactttaagtcagcgtggactggatggccttaagcggaacgtaactctgcagaacatcattgacagattccagaaggccagtgttagcggcccgaatagcccctcagagaccagcgctgagaaggtcttatgtcagttttgcgaccaggatcccgcgcaagatgccgtgaagacctgcgtaacctgcgaggtgagttattgtgatgaatgcctgaaagctacgcacccaaataaaaaaccattcacaggtcatcggctgatagaacccatccctgactcccatatccggggcctgatgtgcctggagcatgaagatgaaaagcagaacttggagtctaatctgaccaatcttatcaagcggaatactgagctggagacactgcttgccaagctaatccagacttgccaacatgtggaggtgaatgccagtagacaagaggctaaacttacagaagagtgcgatctcttgatagaaataatccagcagaggcgtcaaattattggaacaaagatcaaagagggtaaggtgatgcgacttaggaagttagctcagcaaattgcaaattgtaaacagtgcatcgagcgttccgcgagcctgatttcccaagccgaacacagtctgaaagagaacgatcacgcacgttttctccagacagccaagaacatcacagagagagtgtccatggcgaccgcaagcagccaggttcttatccctgagattaacctcaatgacacatttgatacgtttgccctggatttttctcgtgagaaaaagttgctggagtgcctcgactacctgacagcacccaatcctccaacgatcagggaagaattatgcacagcatcctatgatactattactgtgcattggacgtctgacgacgagttctctgtcgtgtcatatgaacttcaatacactatctttacagggcaggcgaatgtcgtttctctgtgcaactcagccgatagctggatgattgttccgaacatcaagcagaatcactataccgtacacggtctgcagagcgggacaaaatacatttttatggtgaaagctatcaaccaggccgggtcgcggagtagtgagccaggtaaactgaagacgaattcccagccattcaagctagatcccaaatctgcccatcgaaaactgaaagtgtcccacgacaacctcaccgtagagcgagacgaaagctcctctaaaaagagccacacccccgaacgattcacaagccaggggagctacggagtcgctggtaatgtattcatcgattcaggcagacactattgggaagttgtcatctccggatcaacctggtatgccattgggctggcctacaagtccgcaccaaagcacgagtggatagggaaaaactccgcttcctgggccctctgccgctgtaataacaattgggtggtgcgccacaatagtaaggagattcctattgaacccgcaccccacttaagaagagtgggcatccttctggactatgacaacggttcaatagctttttacgatgcactcaacagtatccacctgtacaccttcgatgtcgcttttgcacagcctgtctgtccaacctttaccgtctggaacaagtgcctcacgataatcaccggtctgcctattccagaccacctcgactgcaccgagcagcttccttag

SEQ ID NO: 228152 - DNA, 1854 bp, Artificial Sequence
  derived and/or modified sequence
atggagaccctggagagcgagctgacctgccccatctgcctggagctgtttgaggaccccctgctgctgccctgtgcccacagcctgtgcttcaactgtgcccaccgcatcctggtgagccactgtgccaccaatgaatctgtggagagcatcacagccttccagtgccccacctgcagacatgtgatcaccctgagccagaggggcctggatggcctgaagagaaatgtgaccctgcagaacatcatcgaccgcttccagaaggcctctgtgtctggccccaacagccccagcgagaccagcgctgagaaggtgctgtgccagttctgtgaccaggaccctgcccaggatgctgtgaagacctgtgtgacctgtgaggtgtcctactgtgatgagtgcctgaaggccacccaccccaacaagaagcccttcaccggccacaggctcatcgagcccatcccagacagccacatccggggcctgatgtgcctggagcatgaagatgagaagcagaacctggagagcaacctgaccaacctgatcaagaggaacacagagctggagaccctgctggccaagctgatccagacctgccagcacgtggaggtgaatgccagccggcaggaggccaagctgacagaagaatgtgacctgctgattgagatcatccagcagaggcggcagatcatcggcaccaagatcaaggagggcaaggtgatgaggctgaggaagctggcccagcagatcgccaactgcaagcagtgcatcgagaggtctgccagcctcatcagccaggccgagcacagcctgaaggaaaatgaccacgcccgcttcctgcagacagccaagaacatcacagagcgggtgtccatggccacagccagcagccaggtgctgatccctgagatcaacctgaatgacacctttgacacctttgccctggacttcagccgggagaagaagctgctggagtgcctggactacctgacagcccccaacccccccaccatccgggaggagctgtgcacagccagctatgacaccatcaccgtgcactggaccagtgatgatgagttctctgtggtgtcctatgagctgcagtacaccatcttcaccggccaggccaacgtggtgtccctgtgcaacagcgctgacagctggatgattgtgcccaacatcaagcagaaccactacacagtgcacggcctgcagagcggcaccaagtacatcttcatggtgaaggccatcaaccaggccggcagccgcagcagcgagcccgggaagctgaagaccaacagccagcccttcaagctggaccccaagagcgcccacaggaagctgaaggtgtcccatgacaacctgactgtggagagagatgagagcagcagcaagaagagccacaccccagagcgcttcaccagccagggcagctatggagtggccggaaatgtgttcatcgacagcggccgccactactgggaggtggtgatcagcggcagcacctggtacgccatcggcctggcctacaagagcgcccccaagcatgagtggattggcaagaacagcgcctcctgggccctgtgccgctgcaacaacaactgggtggtgcgccacaacagcaaggagatccccattgaaccagccccccacctgcggcgggtgggcatcctgctggactatgacaatggcagcatcgccttctatgatgccctgaacagcatccacctgtacacctttgatgtggcctttgcccagcctgtgtgccccaccttcaccgtgtggaacaagtgcctgaccatcatcaccggcctgcccatcccagaccacctggactgcacagagcagctgccctag

SEQ ID NO: 228153 - DNA, 5666 bp, Artificial Sequence
  derived and/or modified sequence
atggaaacactggagtcagaactgacctgccctatttgtctggagctctttgaggaccctcttctactgccctgcgcacacagcctctgcttcaactgcgcccaccgcatcctagtatcacactgtgccaccaacgagtctgtggagtccatcaccgccttccagtgccccacctgccggcatgtcatcaccctcagccagcgaggtctagacgggctcaagcgcaacgtcaccctacagaacatcatcgacaggttccagaaagcatcagtgagcgggcccaactctcccagcgagacctccgccgagaaggtcctctgccagttttgtgaccaggatcctgcccaggacgctgtgaagacctgtgtcacttgtgaagtatcctactgtgacgagtgcctgaaagccactcacccgaataagaagccctttacaggccatcgtctgattgagccaattccggactctcacatccgggggctgatgtgcttggagcatgaggatgagaagcaaaacttagagagtaacctcaccaaccttattaagaggaacacagaactggagacccttttggctaaactcatccaaacctgtcaacatgttgaagtcaatgcatcacgtcaagaagccaaattgacagaggagtgtgatcttctcattgagatcattcagcaaagacgacagattattggaaccaagatcaaagaagggaaggtgatgaggcttcgcaaactggctcagcagattgcaaactgcaaacagtgcattgagcggtcagcatcactcatctcccaagcggaacactctctgaaggagaatgatcatgcgcgtttcctacagactgctaagaatatcaccgagagagtctccatggcaactgcatcctcccaggttctaattcctgaaatcaacctcaatgacacatttgacacctttgccttagatttttcccgagagaagaaactgctagaatgtctggattaccttacagctcccaaccctcccacaattagagaagagctctgcacagcttcatatgacaccatcactgtgcattggacctccgatgatgagttcagcgtggtctcctacgagctccagtacaccatattcaccggacaagccaacgtcgttagtctgtgtaattcggctgatagctggatgatagtacccaacatcaagcagaaccactacacggtgcacggtctgcagagcggcaccaagtacatcttcatggtcaaggccatcaaccaggcgggcagccgcagcagtgagcctgggaagttgaagacaaacagccaaccatttaaactggatcccaaatctgctcatcgaaaactgaaggtgtcccatgataacttgacagtagaacgtgatgagtcatcatccaagaagagtcacacacctgaacgcttcaccagccaggggagctatggagtagctggaaatgtgtttattgatagtggccggcattattgggaagtggtcataagtggaagcacatggtatgccattggtcttgcttacaaatcagccccgaagcatgaatggattgggaagaactctgcttcctgggcgctctgccgctgcaacaataactgggtggtgagacacaatagcaaggaaatccccattgagcctgccccccacctccggcgcgtgggcatcctgctggactatgataacggctctatcgccttttatgatgctttgaactccatccacctctacaccttcgacgtcgcatttgcgcagcctgtttgccccaccttcaccgtgtggaacaagtgtctgacgattatcactgggctccctatcccagaccatttggactgcacagagcagctgccgtgagcgtctggccacatggagctgctttctggggaacagtaaggttcaggccactatttaggggactgagaaagcacaggcttcatgagtgtaatgaaatctcaccagaagtgtcccgaaatcggctcagatagggctcaaaacaagagattcctctccttttactgtgtcttgtattaagtacgggctttaataatttctttaatttttttgtatttagaggaaaatctatagattatttataagagaaacataatcaggattacaacttttaggaattacttggttttgcacattaagaggcccataagtttatcagctatttacaaccttcatttcatcacaatctgtgggcttacaaaaaaacaaaaacttttgtagttttgtatgttactcatcttcttacctgatatcccatgatgatcccatggtaggtcttctcacctcgatggtgcataacaggatgtgtttgaacctagtaggggaggaaacaggctttcttactctggtttaatttgaagtgttttaattgtgatgtcaaaaagttgtatcagatcaactaaaatggagagcaagacagagaatgaaaagagttgattttggacctcggaccttgccgtggctaaatctttaccttctcatagctgatgggataatgttggaaagaaaggttctgaatcctttggccacattttgccctgcttctctcagggttaagggttctggaagaacattaagaatgagattgcaattgaaaatagtcattttgaatcctattgattattcaaaaattcaggctgatttgtcttttatcagaggtaggattctgttttatagtatagaatctactttatccttccttttaatagttcctttagacctgtgaaatttcttcactacatttaatagttctcctatttcccgctcccccatatcaattttccttttgtctccggggctgagtaaataaacatgttctgtcacaaatagcagcaccactttggattgattttgctctccaggacatcagcacatggccctgatcagcactaccacatccaaacataagtcactgaaaaacacttaatatttatgagttggtaatgacaagggacattgtataaagtactatttgctagattcatgcctcaaaagttattataaacagacctttattaaacacatcttgaaagatgtagaagtccctctatagtctagtatagtttacaatagagttgtaagaccaaaaaaaaaaaaaaaaaattcaaactcgttattcaggaacctgcttataaaatgtcagctgggattctttgcatgccaatctgatgcgttggaatggtccatgaattaaggctttcttgagcagttcttggcccagaactctggcattggttctagtttgatgaagggcatgacctctataaatggtttcaattgctaaaatatttacctgggatactgggtcagccattttgactgagcagactagtggatttagacattgtttttagttattttgtttttaaccaaatcaaccaactgcctccctgaaataagtcaatgaactcattgtttcagcatcacgtggccaaaggtcatgtgattgcaaatctggatttcaagggaggccaagccagcttcctgggtccttccatcctcttccctagcagacactctcctttttcttaacagatagattctatatatttactatattatttatacccagatgaatattttgatagatacctaagacaatttcacatctaaaagatggacgcctcaatggaaaaaaaacaatctttctctggaaaccttataggtttttctttttattacaatataaaagcaatgtgtgtttgccttctctgagtaaactgaaagggttgtctcagtaatttttacatacattttgggtaactggataatggatattttaatgcactttgtacactaacaggttctaaataaaagggtctaaaactcagcttctgagtttttaaaatcacggtctccaggtaccaataaatgctacagtttgccttatgatgttaacataaaacacttagtagaaggacaatatttccatgaaaataatgtttttcaatattaagaagttactactcaaattttcacagtaagccatttagggtatgtttggctatttttataaggacatgagagattatgtcataattttgttgtggaagtctcactcttggctaacttaaaagcattgtggatagtagcagttactagttccaggttgtcatatttacaggaaaatatgtatatggtgaaaggccaccgtgtttaattactataatgatgtagaaaagattcccgtgtgaattttttttttgaaagtctaaaaaatgtatgctgtaaaaatttgctgcagtgtaattttgcattctctttaaactgattgaggtcacagtattttattatttggggtcctcaccacaggaaacactgcgatacaggggcaaaagagatggcagtgccaattaaattaatacaacaaaatcaatgcagcaccaaccaagactgccaggtctggtgtcatgggtatgcccagagcccaggagttcagaagggccctaagcctgatttaatgctctgctgttgatgtcttgaaattcttaacaatttttgaacaaggggcctgcgttttcacttcgcactgggccttgcaaattacatagcgagtgctcataaaagaactcagaaacgtggtacctctcttcctggtggatacaaataaagaaatctggatccaaagttgaaagttgctggcgatatcattcaagtaggactctaaatagtggattaagatgagggtgggcctgggtgaagattctttccagctttaaaagaaagtgacttcaaaaactgactgcaaatattgacgatggtttctgctggaggaaaagaaacagcttgaatacagacaggcttttttattacggtactgatatattgaccttaaacttgctgaggaactgaactaacgtcctccagtgaccgtggaattccatctcagctccaggaacatgcagatacctgcaaagagacacgcatatatgctggcatacatgtgcatttggtgttgggaagttgaccatctggtctatcttaataaaatggtaaaaagcacaccaagacaatgatgggggcaggaggatgtttttgaaaacagcgcttctcaaccagtgctcgattttgccccccaggagacatttggcaatgcaatggcaacttttggttgtcgcagccggggaagggaagctaccagcatctagtgcgtagaggtcatggacgccgttaaacatcctacagtgcaagcgcagcccccgaccacgaagagttgtcttgctcaaatatcaacagtgctgcagtgtagaaacttgatcgttggttttcttttaatgcaaaactctcataaaaacctttcacttttcctgtcattgattatatgcttgatacacccaaaaagaaaaggggaggggcaccaattcacctacactccagtggctccatcacctttaaaaatatttataaaatagttccaaaaatctgatatctgaaaagcaatccaagcctgtgtaaatgggaatcactgataagtatcatcatctgtatcagcttggcttggacatgaaaaattgattctctttatgtcactccttgcacctggacaaattcaatccccggtacttaagtcacactgccaagccctcggccctgactattgtcttgattgctgttcctttctggttcaaaataaaatcatttttgtggcaccaaga

SEQ ID NO: 228154 - DNA, 1854 bp, Artificial Sequence
  derived and/or modified sequence
atggagaccctggagagcgagctgacctgccccatctgcctggagctgttcgaggaccctctgctgctgccatgcgctcatagcctctgctttaactgtgctcatcgaattctagtatcacattgcgccacgaatgagtcagttgagagtattacggccttccagtgcccaacatgccgacacgttataacactctcgcagcggggcctggacggccttaagcgcaacgtgaccctacagaacataatagaccgattccagaaagccagcgtatccggccctaactcccccagtgagacttctgccgagaaggttctgtgccagttctgcgaccaagatcccgctcaggacgctgtcaagacctgtgtaacatgcgaagttagttactgtgacgaatgcttaaaggccactcatccgaacaaaaagccctttacggggcataggctgatcgaacccatcccagattcgcatattagaggtctcatgtgcctcgaacatgaagatgagaaacagaaccttgaatctaacctcacaaatctaataaagagaaatacagaactcgaaactctgctcgccaagttaatccagacatgccagcacgttgaggttaatgctagtcgccaggaggcaaagctaacagaagagtgcgatctgcttatagaaatcatccagcaacgcagacaaatcatcggaacaaagatcaaggaaggcaaagttatgcgcttgcgcaagctcgctcagcaaattgcgaattgtaagcagtgtatcgaaagaagtgcctctctgatatcccaggcagagcactctctcaaagagaacgatcatgccaggttcttacaaaccgcaaaaaatatcaccgaaagggttagtatggcaacagctagcagtcaagtcctgattcccgaaattaatcttaacgacaccttcgataccttcgctctggacttctctagagagaagaaactgttggagtgcctggattatttaactgctccgaatccacccacgattagggaagagctgtgtactgctagctatgatacaatcacggtccattggacaagtgacgacgaatttagcgtggtgagctatgaactacagtacactatctttactgggcaagcgaacgtggtgtcactttgtaactcagcggatagctggatgatagtgccaaacataaagcagaatcactatactgtgcacggcttacagtctggtactaaatacattttcatggtaaaggccataaaccaagcagggtctcgctcttccgagcccggcaagctgaagacaaattcacagccctttaaacttgatcccaagtccgcccacaggaagcttaaggtctcgcacgataacctgacagtggaacgagatgaaagtagttcgaagaagagtcacacccccgagcgcttcacatcacaagggagttacggggtggccggcaacgtgtttatcgattcgggccgccattattgggaagtcgttatttctggaagcacatggtatgccattggtttggcgtataaatccgcacctaaacacgagtggatcgggaagaattctgcatcttgggccttgtgccgctgcaacaataactgggtagtgcggcacaatagtaaagaaataccgattgaacctgctccccaccttagacgcgtgggcatcctgctcgactacgacaatggctcaatcgccttttatgatgcactcaactctatccatctctacaccttcgacgtcgcctttgcccagcctgtgtgccctaccttcactgtatggaataaatgtttgaccataatcacaggtcttcccatccctgaccaccttgattgcaccgaacagttaccatag

SEQ ID NO: 228155 - DNA, 1854 bp, Artificial Sequence
  derived and/or modified sequence
atggagactctagaatcggaactgacatgccctatttgcctagaactgtttgaagatcccctactgttgccatgtgctcacagtctgtgtttcaattgcgcccaccggattctggtttcgcactgcgctactaatgagtccgtcgaaagcattacggccttccaatgtcccacttgtagacacgttattacactgtcacagcgcggactcgacggactgaaaaggaatgtgactctgcagaatatcattgatcgattccaaaaagcttccgtttcagggcctaactcaccaagcgaaacatcagcagagaaggtgctgtgccagttctgtgaccaggatccagcccaggatgcagtgaagacttgcgtaacgtgcgaggtctcatactgtgacgagtgtctgaaagctacgcatcccaacaagaagccctttaccggtcatcgccttattgagccaatcccagatagtcatatcagggggctgatgtgcctggagcatgaagacgagaagcagaacctggaaagcaatctgacaaatcttataaagcggaacacggagttagaaacactcctggccaagctgatccagacgtgccagcacgtagaggtgaacgctagcaggcaggaagctaagctgacggaagagtgtgacctgttgatcgagatcatccagcagcgcagacagattattgggaccaagatcaaggaagggaaggttatgaggctgaggaagctggcacaacagatcgcaaactgcaagcagtgcatcgagcggtccgcctccttgatttcccaggcagaacattcgctcaaggaaaacgatcatgcaagatttttgcaaacggcaaagaacatcaccgagcgggtgtcaatggccacagctagtagccaggtcttgatcccagaaatcaacttgaacgacaccttcgatacatttgcattagatttctcccgagagaaaaaactgctcgagtgcctggactacttgaccgcccctaaccccccaacaattcgtgaggagctgtgtaccgcatcctacgacaccattaccgtacattggacctcagatgacgaattctccgtggtttcttacgaattgcagtacacaatcttcactgggcaggccaacgtcgtgagtttgtgcaactctgccgattcctggatgattgtccctaacattaaacagaaccattataccgtccacggactgcaaagcgggaccaaatacattttcatggtgaaggctatcaaccaagctggcagcagatctagcgagcctgggaagttgaagacaaatagccagcctttcaaacttgacccgaagtctgcacacaggaagctcaaagtgtctcacgataacttaacagtggaacgcgacgaatcaagttctaagaagtcacacacacccgaacgcttcaccagtcaaggatcctatggtgtggctgggaacgtttttattgacagtggccgtcattattgggaagtcgttatttctgggtctacttggtacgcaattgggctggcctacaaatccgccccaaaacacgaatggatcggaaagaacagcgcatcatgggccctgtgtcggtgtaataacaactgggtggttaggcataactctaaggaaattccgatcgagcctgccccacaccttcggagggttggcatcctgctggactatgataacggctccattgcgttttacgacgcactgaatagcattcacctttacacatttgacgtggcttttgcccagcctgtgtgtccaactttcaccgtgtggaacaaatgcttaacgattattaccgggttgccgatcccggatcatttggactgtaccgagcaactcccatag

SEQ ID NO: 228156 - DNA, 1854 bp, Artificial Sequence
  derived and/or modified sequence
atggagaccctggagagcgagctgacctgccccatctgcctggagctgttcgaggaccccctgctgctgccctgcgcccacagcctgtgcttcaactgcgcccacagaatcctggtgagccactgcgccaccaacgagagcgtggagagcatcaccgccttccagtgccccacctgcagacacgtgatcaccctgagccagagaggcctggacggcctgaagagaaacgtgaccctgcagaacatcatcgacagattccagaaggccagcgtgagcggccccaacagccccagcgagaccagcgccgagaaggtgctgtgccagttctgcgaccaggaccccgcccaggacgccgtgaagacctgcgtgacctgcgaggtgagctactgcgacgagtgcctgaaggccacccaccccaacaagaagcccttcaccggccacagactgatcgagcccatccccgacagccacatcagaggcctgatgtgcctggagcacgaggacgagaagcagaacctggagagcaacctgaccaacctgatcaagagaaacaccgagctggagaccctgctggccaagctgatccagacctgccagcacgtggaggtgaacgccagcagacaggaggccaagctgaccgaggagtgcgacctgctgatcgagatcatccagcagagaagacagatcatcggcaccaagatcaaggagggcaaggtgatgagactgagaaagctggcccagcagatcgccaactgcaagcagtgcatcgagagaagcgccagcctgatcagccaggccgagcacagcctgaaggagaacgaccacgccagattcctgcagaccgccaagaacatcaccgagagagtgagcatggccaccgccagcagccaggtgctgatccccgagatcaacctgaacgacaccttcgacaccttcgccctggacttcagcagagagaagaagctgctggagtgcctggactacctgaccgcccccaacccccccaccatcagagaggagctgtgcaccgccagctacgacaccatcaccgtgcactggaccagcgacgacgagttcagcgtggtgagctacgagctgcagtacaccatcttcaccggccaggccaacgtggtgagcctgtgcaacagcgccgacagctggatgatcgtgcccaacatcaagcagaaccactacaccgtgcacggcctgcagagcggcaccaagtacatcttcatggtgaaggccatcaaccaggccggcagcagaagcagcgagcccggcaagctgaagaccaacagccagcccttcaagctggaccccaagagcgcccacagaaagctgaaggtgagccacgacaacctgaccgtggagagagacgagagcagcagcaagaagagccacacccccgagagattcaccagccagggcagctacggcgtggccggcaacgtgttcatcgacagcggcagacactactgggaggtggtgatcagcggcagcacctggtacgccatcggcctggcctacaagagcgcccccaagcacgagtggatcggcaagaacagcgccagctgggccctgtgcagatgcaacaacaactgggtggtgagacacaacagcaaggagatccccatcgagcccgccccccacctgagaagagtgggcatcctgctggactacgacaacggcagcatcgccttctacgacgccctgaacagcatccacctgtacaccttcgacgtggccttcgcccagcccgtgtgccccaccttcaccgtgtggaacaagtgcctgaccatcatcaccggcctgcccatccccgaccacctggactgcaccgagcagctgccctag

SEQ ID NO: 228157 - protein, 404 aa, Artificial Sequence
  derived and/or modified sequence
MADKVLKEKRKLFIRSMGEGTINGLLDELLQTRVLNKEEMEKVKRENATVMDKTRALIDSVIPKGAQACQICITYICEEDSYLAGTLGLSADQTSGNYLNMQDSQGVLSSFPAPQAVQDNPAMPTSSGSEGNVKLCSLEEAQRIWKQKSAEIYPIMDKSSRTRLALIICNEEFDSIPRRTGAEVDITGMTMLLQNLGYSVDVKKNLTASDMTTELEAFAHRPEHKTSDSTFLVFMSHGIREGICGKKHSEQVPDILQLNAIFNMLNTKNCPSLKDKPKVIIIQACRGDSPGVVWFKDSVGVSGNLSLPTTEEFEDDAIKKAHIEKDFIAFCSSTPDNVSWRHPTMGSVFIGRLIEHMQEYACSCDVEEIFRKVRFSFEQPDGRAQMPTTERVTLTRCFYLFPGH

SEQ ID NO: 228158 - protein, 301 aa, Artificial Sequence
  derived and/or modified sequence
MEKVKRENATVMDKTRALIDSVIPKGAQACQICITYICEEDSYLAGTLGLSADQTSGNYLNMQDSQGVLSSFPAPQAVQDNPAMPTSSGSEGNVKLCSLEEAQRIWKQKSAEIYPIMDKSSRTRLALIICNEEFDSIPRRTGAEVDITGMTMLLQNLGYSVDVKKNLTASDMTTELEAFAHRPEHKTSDSTFLVFMSHGIREGICGKKHSEQVPDILQLNAIFNMLNTKNCPSLKDKPKVIIIQACRGDSPGVVWFKDSVGVSGNLSLPTTEEFEDDAIKKAHIEKDFIAFCSSTPGKSQS

SEQ ID NO: 228159 - protein, 110 aa, Artificial Sequence
  derived and/or modified sequence
MADKVLKEKRKLFIRSMGEGTINGLLDELLQTRVLNKEEMEKVKRENATVMDKTRALIDSVIPKGAQACQICITYICEEDSYLAGTLGLSADLSNNGQVKPHTSCSHYLQ

SEQ ID NO: 228160 - DNA, 1215 bp, Artificial Sequence
  derived and/or modified sequence
atggcggataaagtactcaaagagaaaaggaagctgttcataagaagcatgggggagggcactattaacggtcttctggatgagctgttacaaactcgcgtgctgaacaaagaggagatggaaaaagtcaagagagaaaatgccacggtgatggataaaacccgggctctcatagactcagtgatcccgaagggcgcccaggcttgccagatttgcataacttatatctgtgaggaggatagctatctggccggcaccctaggcctgtcagcagatcagacatccgggaactacctcaacatgcaggacagccagggcgtgctgagcagtttccctgcccctcaggctgtgcaggacaaccctgccatgcccacgagcagtggcagtgaggggaacgtaaagctgtgcagtttggaggaagctcagaggatctggaagcaaaagtctgccgaaatttaccccatcatggataagtcttcacgcacccgcctggctttaattatttgcaatgaagagttcgatagcattcccaggaggactggcgccgaagtggatattaccggtatgacgatgctccttcagaatctgggctattcagtggacgtaaagaagaatttgaccgcatcggatatgacgaccgagctggaagccttcgcacacagacctgaacataagacaagcgattctacttttctcgtgtttatgtcccacggaattcgtgaagggatttgcggaaagaagcacagcgagcaggtccctgatattctccaacttaacgcaatctttaatatgctgaacacaaaaaactgcccgtcactcaaagataaaccgaaagtgatcattatccaggcttgtcggggtgacagcccaggagtggtgtggttcaaagatagtgtcggcgtgtctggaaacctaagcctgcctaccacagaagagtttgaggatgacgccataaagaaggcgcatatagaaaaagacttcatcgccttttgttccagcacaccggataacgttagctggcgccatcctactatgggaagtgtgttcatcgggaggctcatagagcatatgcaggagtatgcatgcagttgtgacgtcgaggagattttcagaaaggttaggttctccttcgagcaaccggacgggcgtgcccagatgcccacaactgagagagtcaccctcacgagatgcttttatttattcccagggcattag

SEQ ID NO: 228161 - DNA, 906 bp, Artificial Sequence
  derived and/or modified sequence
atggagaaggtaaaacgggaaaatgccacagtcatggacaaaactcgggcactgatcgactctgtgatccctaaaggtgcacaggcttgccagatatgtatcacctacatctgcgaggaagacagctacctggcaggaactcttggtctcagcgccgaccagaccagcggaaattatctgaacatgcaggatagtcagggagtgctgagctccttccccgccccacaggcagtgcaagataatccagcgatgcctacaagcagcggaagcgaaggtaatgtgaagctttgctccctggaggaagcacaaagaatatggaagcaaaagtctgctgaaatttaccccattatggataagagcagccgcacacggctggctttgatcatatgcaacgaggagtttgactcaatacctcggcgaaccggggctgaggtggatataacaggaatgaccatgttacttcagaacctgggatattcagtggatgtgaaaaaaaatctgaccgcaagcgacatgaccacagaattggaggcgttcgctcaccggcccgagcacaaaacttcagactctacatttctagtcttcatgtcacatggcatccgcgaagggatttgtggtaagaaacactcagaacaggtccctgacatactgcaactcaatgcgatctttaacatgcttaacactaaaaactgtccatctcttaaggacaagcccaaagttataataatacaggcttgcagaggggattcaccaggggttgtgtggttcaaagactccgtgggcgtctcagggaacctgtcactcccaactactgaggagtttgaggatgacgctatcaaaaaggctcacatagagaaagactttatcgccttctgctcctctacacccggcaaaagtcagagttag

SEQ ID NO: 228162 - DNA, 1215 bp, Artificial Sequence
  derived and/or modified sequence
atggcagacaaagtactcaaggaaaaacggaagctgttcatcaggagcatgggtgagggaaccattaacggcctgcttgatgagttgttgcagacaagggtgctaaacaaagaggaaatggagaaggtgaaacgggagaatgctaccgtcatggacaaaacccgggccctgatcgactctgtgatccccaagggggcccaagcctgtcagatttgtatcacctatatctgtgaggaagatagttacctggccggtacacttggattaagcgccgatcagactagtggcaactacctgaatatgcaggactcccagggagtgctctcctctttccccgccccgcaagctgtccaagataacccggccatgcctacgtcctccggttccgagggtaacgttaaattgtgctcattggaggaggcccagcggatttggaaacagaagtccgccgagatctatcccatcatggacaaaagcagcagaaccagacttgccctgattatctgcaacgaagaattcgactccattcctcggcgcacaggcgctgaggtggacatcactggcatgactatgttgctccagaacctggggtacagtgtggatgtaaagaagaatttaacagcgtctgacatgacaactgagcttgaggcttttgcccaccggcccgagcataagacttcagattcaacattcctggttttcatgtcccacggcattcgcgagggcatttgcgggaagaaacactctgagcaagtccccgatatcctgcagctgaacgccattttcaacatgcttaatacaaagaactgtcccagtctcaaggataaacccaaggtgatcatcatccaggcttgccggggcgatagccctggggtcgtgtggttcaaggattctgtgggggtctcagggaacctgtccttgcccacaacagaggaatttgaggacgatgctatcaaaaaagcacacatcgagaaggatttcatcgcattctgttccagcacaccagacaatgtgagctggcgtcatcccaccatgggctccgtttttattggccgccttattgagcatatgcaggaatacgcctgttcatgtgatgtcgaggagattttccgcaaggttcgcttcagcttcgaacagcctgatggacgagcccagatgcccaccacagaacgggtgaccctgacccggtgcttttacctgtttccgggacactag

SEQ ID NO: 228163 - DNA, 1215 bp, Artificial Sequence
  derived and/or modified sequence
atggctgacaaggtgctgaaggagaagaggaagctgttcatccgctccatgggagagggcaccatcaatggcctgctggatgagctgctgcagaccagggtgctgaacaaggaggagatggagaaggtgaagcgggagaatgccaccgtgatggacaagacccgggccctgattgacagcgtcatccccaagggggcccaggcctgccagatctgcatcacctacatctgtgaagaagattcctacctggccggcaccctgggcctgtctgctgaccagaccagcggcaactacctgaacatgcaggacagccagggcgtgctgagcagcttccctgccccccaggccgtgcaggacaacccagccatgcccaccagcagcggcagcgagggcaatgtgaagctgtgcagcctggaggaggcccagaggatctggaagcagaagtctgctgagatctaccccatcatggacaagagcagcaggacccggctggccctgatcatctgcaatgaggagtttgacagcatccccaggagaactggagctgaggtggacatcaccggcatgaccatgctgctgcagaacctgggctacagcgtggatgtgaagaagaacctgacagccagtgacatgaccacagagctggaggcctttgcccacaggcctgagcacaagaccagtgacagcaccttcctggtgttcatgagccacggcatccgggagggcatctgtgggaagaagcacagcgagcaggtgcctgacatcctgcagctgaatgccatcttcaacatgctgaacaccaagaactgccccagcctgaaggacaagcccaaggtgatcatcatccaggcctgccgcggggacagccctggggtggtgtggttcaaggacagcgtgggcgtgtctggcaacctgagcctgcccaccacagaggagtttgaagatgatgccatcaagaaggcccacatcgagaaggacttcatcgccttctgcagcagcaccccagacaacgtgtcctggaggcaccccaccatgggctctgtgttcatcggccgcctcatcgagcacatgcaggagtatgcctgcagctgtgatgtggaggagatcttcaggaaggtgcgcttctcctttgagcagccagatggccgggcccagatgcccaccacagagcgggtgaccctgacccgctgcttctacctgtttcctggccactag

SEQ ID NO: 228164 - DNA, 906 bp, Artificial Sequence
  derived and/or modified sequence
atggagaaggtgaagagagaaaatgccaccgtgatggacaagacccgggccctgattgattctgtcatccccaagggggcccaggcctgccagatctgcatcacctacatctgtgaggaggacagctacctggccggcaccctgggcctgtctgctgaccagaccagcggcaactacctgaacatgcaggacagccagggcgtgctgagcagcttccctgccccccaggccgtgcaggacaacccagccatgcccaccagcagcggcagcgagggcaatgtgaagctgtgcagcctggaggaggcccagaggatctggaagcagaagtctgctgagatctaccccatcatggacaagagcagcaggacccggctggccctgatcatctgcaatgaggagtttgacagcatccccaggagaactggagctgaggtggacatcaccggcatgaccatgctgctgcagaacctgggctacagcgtggatgtgaagaagaacctgacagccagtgacatgaccacagagctggaggcctttgcccacaggcctgagcacaagaccagtgacagcaccttcctggtgttcatgagccacggcatccgggagggcatctgtgggaagaagcacagcgagcaggtgcctgacatcctgcagctgaatgccatcttcaacatgctgaacaccaagaactgccccagcctgaaggacaagcccaaggtgatcatcatccaggcctgccgcggggacagccctggggtggtgtggttcaaggacagcgtgggcgtgtctggcaacctgagcctgcccaccacagaggagtttgaagatgatgccatcaagaaggcccacatcgagaaggacttcatcgccttctgcagcagcacccctgggaagagccagagctag

SEQ ID NO: 228165 - DNA, 1215 bp, Artificial Sequence
  derived and/or modified sequence
atggccgacaaggtgctgaaggagaagcggaagctgttcatccggtccatgggtgagggaaccatcaacggcctgctggatgaacttctgcaaactcgggtattgaataaggaggagatggagaaggtcaagcgcgaaaacgctaccgtgatggacaaaaccagggcactcatcgacagcgtcattccaaaaggcgcccaggcttgtcagatctgtattacctacatctgtgaagaagactcttatctcgctggaacgcttggcctcagcgccgaccagaccagcgggaattacctaaacatgcaagactcccaaggcgtactgtcttcatttcccgcgccccaggcagtccaggataaccccgccatgcccacctcctctggatcagaaggaaatgtcaaactatgcagtctcgaggaggcacaaaggatttggaaacagaaatcagccgaaatttacccgattatggataaaagctcacgcaccaggctggctctcattatctgcaacgaagagttcgactcaatcccacgacgcaccggggcagaagtggatatcacgggcatgactatgttgttacagaacctcggttactcagtcgacgtgaaaaagaatctcacagcgagcgacatgaccaccgagttggaggcgttcgcacatagaccagaacataagaccagcgatagtacattccttgtctttatgtcacacgggatcagagagggaatctgtgggaaaaagcactccgagcaggtgccagatattctccagctgaacgcaatttttaatatgttaaacaccaaaaactgtccctcattgaaggataagcccaaggttatcatcatccaggcttgccggggagacagtcctggcgtggtgtggttcaaggatagtgttggagtgtccggcaacctgtccctcccgactacagaggagtttgaggatgacgcgatcaagaaggctcatatcgagaaggactttatcgccttctgttcttcaacccctgacaatgtctcttggcgccacccgactatgggcagtgttttcattggacgactcattgagcatatgcaagaatatgcctgcagctgcgatgtggaggagatttttcggaaagtgaggttctcttttgagcagccagacggacgtgcgcagatgcctacaacagagagagttaccctgactcgatgcttctatctctttccaggtcactag

SEQ ID NO: 228166 - DNA, 906 bp, Artificial Sequence
  derived and/or modified sequence
atggagaaggtgaagcgggagaacgccaccgtgatggacaagaccagagctctgatcgatagcgttattccaaaaggcgcacaggcctgtcaaatttgtataacatatatctgtgaggaagactcctacctcgccggaacgttggggctgtctgcagaccagaccagtggaaattatctgaatatgcaggatagccagggtgtactgtctagctttcctgctccacaagctgtacaagataatccagccatgcctactagttcaggaagtgaagggaatgtaaaactctgttcgcttgaagaagcccagcggatctggaagcagaagtccgctgagatttatcctattatggataagagttctcggactagacttgctctgatcatatgtaacgaggagttcgattccatccctaggagaacaggcgctgaagtggatattacagggatgactatgctgcttcagaacctgggttactctgtggacgttaaaaagaacctgaccgcttccgacatgaccactgagcttgaggcatttgcgcacagacccgagcacaagacaagcgacagtactttcctggtgtttatgagccacggaatccgggaggggatctgcggaaaaaagcactcagagcaggtgccggatattctgcaactcaacgctattttcaatatgctgaacactaaaaactgccccagcctgaaggacaagcctaaagttatcatcatccaggcctgccgtggcgacagcccaggggtggtgtggtttaaggattctgtaggagtgtctgggaatctgagtttacccactacagaggagttcgaggatgacgccatcaaaaaggcccacattgaaaaggattttatcgccttttgctcatctacgcccggtaaatcgcagtcttag

SEQ ID NO: 228167 - DNA, 1215 bp, Artificial Sequence
  derived and/or modified sequence
atggccgacaaggtgctgaaggagaagcggaagctgttcatccggagcatgggggaagggactatcaatggcctgctggatgagctgctgcaaactagagtgctcaacaaagaagaaatggagaaagtcaaacgcgaaaacgcgacggtcatggacaagacccgcgctcttatcgactcagtgatcccaaagggagctcaggcttgtcagatctgcatcacctacatctgcgaggaggattcatatctggcaggtaccctgggtctcagcgctgaccaaacttctgggaattacctcaatatgcaggatagccagggcgtcctgtcaagctttcccgcccctcaggctgtccaggacaaccccgcaatgccaacctcctcaggttctgagggtaatgtaaagctgtgttctttggaggaagcacagcggatttggaaacagaaatccgccgagatttatccgataatggataagtcttcacgcaccaggctggctcttatcatatgtaatgaggagttcgactctatccctagacgcactggagctgaggttgacatcacaggcatgaccatgttgcttcagaacctcggctactctgtggatgtcaagaagaatctgaccgcatcagatatgactaccgagctggaagctttcgcacatagaccggagcacaagacctcagatagtacattccttgtttttatgagccatggtatcagagagggcatttgtggcaagaagcacagtgaacaggtgcctgacattctgcaacttaacgccatctttaacatgctcaatacaaagaattgcccatccctcaaagacaagcctaaggtaatcattatccaagcttgccgaggggactctcctggagtggtgtggtttaaggacagcgtcggggtcagcggcaatctctctctgcccaccacggaagagtttgaggacgacgcgatcaagaaggcgcatatagagaaagactttattgccttttgctccagcacccctgataatgtgagttggcggcatcccaccatgggatcagttttcatcggcaggctgatcgagcatatgcaggagtacgcatgcagctgcgacgtggaggagatttttagaaaggtccgcttcagctttgagcagccggatgggagagctcagatgcccacaacggagcgggttaccctgactagatgtttttacctttttcccgggcactag

SEQ ID NO: 228168 - DNA, 1215 bp, Artificial Sequence
  derived and/or modified sequence
atggcagacaaggtgcttaaggaaaagcggaaactgtttatacgctccatgggcgagggcacaatcaacgggttactggacgagctgctccagacccgtgtgctgaacaaggaagagatggaaaaggtgaagcgggagaacgcgaccgtaatggataagacaagagcactgattgattcggtaatccctaaaggcgctcaggcttgtcagatctgcattacttacatttgcgaagaagattcttacctggctgggaccctaggactcagtgctgaccagacttccggtaactaccttaacatgcaagattcacagggggtattgtctagctttcctgctccgcaggccgtgcaagacaatcccgctatgcccacctcctctggttcggaagggaacgttaaactctgctccctggaggaagcccagcgaatttggaagcagaaatccgcagagatctacccaataatggacaagtcatctagaacacgcctggccctgattatctgtaatgaggagttcgattctatcccgaggcgaaccggggctgaggtagacatcactggaatgaccatgcttctccagaacttggggtattccgtggatgtgaaaaagaatctgactgccagtgatatgaccaccgaacttgaagctttcgcccatcggccagagcacaagaccagcgacagtactttcctggtatttatgtctcacggaatacgcgaaggcatctgtggcaaaaagcatagcgaacaggtgcccgatattctgcagttaaatgcgatcttcaacatgctgaacaccaagaattgtcccagcctgaaagataaaccgaaagtcatcattattcaggcatgccgtggtgattcacccggagttgtttggttcaaggatagcgttggtgtttccgggaatctgagtctgcccacaaccgaggagtttgaggacgatgctataaagaaagcccacatcgaaaaggatttcattgctttctgctcttctacgcctgataatgtgagttggaggcacccaacaatggggtccgtgtttattggtcggttgatcgaacacatgcaagaatacgcttgttcctgcgacgttgaagaaatcttccgcaaggtgcggttctcctttgaacagcccgatggtcgcgctcagatgcccacaacagaacgggtcacgctgactcgctgcttttacctgtttccaggccactag

SEQ ID NO: 228169 - DNA, 906 bp, Artificial Sequence
  derived and/or modified sequence
atggagaaggtgaagcgggagaacgccaccgtgatggataagacgagggccttgatagacagcgtaatccccaaaggggctcaggcctgccaaatttgcatcacatatatttgcgaggaagatagttatctggcaggcacactgggccttagcgctgatcagacgtccggtaactacctcaacatgcaggattcccaaggtgtattgtctagcttccccgcacctcaggctgtgcaggataatccagcgatgccaacctcaagcggaagtgagggcaacgttaaactgtgcagcttagaggaggcacagcggatttggaagcagaagagcgccgagatttatcccattatggataaatccagccggacccgcctcgcacttatcatctgcaacgaagagtttgattcaatccccaggcgcactggcgctgaggtggacattaccggcatgactatgctcctccagaatttgggatactcagtggatgtgaagaagaacctaacggcttctgatatgacaacggagttagaagctttcgctcacaggccggaacacaagacctctgattctacattcctcgtcttcatgagccatggaattcgcgagggcatatgcggaaaaaagcactctgagcaggtgccagacattctgcagctgaacgcgatcttcaatatgctgaacacgaaaaactgtcctagtctgaaagataagcccaaagtgatcataatccaggcctgtaggggcgattcaccaggtgtcgtgtggttcaaggatagcgtcggtgtgtcaggaaacctgtccctgcccacaactgaagagttcgaagacgacgctatcaaaaaggctcatatcgagaaggactttatagccttttgcagtagcacccccggtaagtcccagagttag

SEQ ID NO: 228170 - DNA, 1215 bp, Artificial Sequence
  derived and/or modified sequence
atggccgataaagtgctgaaggagaagaggaagcttttcattcggagcatgggcgaagggaccatcaacggactcctggatgagctgctgcagacacgagtgctgaataaggaggagatggaaaaagtcaaaagagagaacgccaccgtcatggacaagacacgggcactgattgacagcgtcatcccaaagggtgcgcaggcttgccagatttgcataacctacatatgcgaagaagatagttatctggccggtacgctggggttatcagcagatcagactagcggcaactaccttaacatgcaggacagtcagggcgtactctccagcttcccggctccccaggccgtgcaggacaatccagccatgcccacctcctccggcagtgagggcaacgtgaagctgtgctccctggaggaggcgcagcgaatctggaagcagaagtctgccgaaatctacccaatcatggataagtcctccagaactaggctggccctgattatctgcaatgaggagttcgacagcattcctcggaggaccggggctgaggtcgacattactggaatgacgatgttactccaaaacctgggttatagcgtggatgtgaagaagaatctgacagccagcgacatgacaactgagctggaggccttcgcccatagacctgagcataagacgtctgattccacttttctggtctttatgtcgcatggtatccgcgagggtatctgcggcaagaaacacagtgaacaggtgccagatattcttcaactgaatgctattttcaatatgctcaacactaaaaactgtccctcgctcaaagataagcccaaggtgattattatacaggcttgccggggagattcaccaggtgttgtgtggttcaaggacagtgtgggagtctctggaaatctctcactgccaactacggaagagtttgaagatgatgcaattaaaaaggcacacatcgaaaaagattttattgcgttctgcagctctacccccgacaacgtgtcctggaggcacccgacgatgggcagcgtgttcatcggaaggcttattgagcacatgcaggaatatgcatgttcttgtgacgtcgaagagatttttcgcaaggtgaggttcagttttgaacaacccgacggtagggcccagatgcctactacagaaagagtgactctgacaaggtgcttttacctgtttccaggacattag

SEQ ID NO: 228171 - DNA, 1477 bp, Artificial Sequence
  derived and/or modified sequence
ctttaatgggaagaaaaataaagacatgcatatgcatgcacagtgagtatttcccaatacatgtacaggccctgccaaaaaggaaggcgaagcatactttcagtttcagtcacacaagaagggaggagagaaaagccatggccgacaaggtcctgaaggagaagagaaagctgtttatccgttccatgggtgaaggtacaataaatggcttactggatgaattattacagacaagggtgctgaacaaggaagagatggagaaagtaaaacgtgaaaatgctacagttatggataagacccgagctttgattgactccgttattccgaaaggggcacaggcatgccaaatttgcatcacatacatttgtgaagaagacagttacctggcagggacgctgggactctcagcagatcaaacatctggaaattaccttaatatgcaagactctcaaggagtactttcttcctttccagctcctcaggcagtgcaggacaacccagctatgcccacatcctcaggctcagaagggaatgtcaagctttgctccctagaagaagctcaaaggatatggaaacaaaagtcggcagagatttatccaataatggacaagtcaagccgcacacgtcttgctctcattatctgcaatgaagaatttgacagtattcctagaagaactggagctgaggttgacatcacaggcatgacaatgctgctacaaaatctggggtacagcgtagatgtgaaaaaaaatctcactgcttcggacatgactacagagctggaggcatttgcacaccgcccagagcacaagacctctgacagcacgttcctggtgttcatgtctcatggtattcgggaaggcatttgtgggaagaaacactctgagcaagtcccagatatactacaactcaatgcaatctttaacatgttgaataccaagaactgcccaagtttgaaggacaaaccgaaggtgatcatcatccaggcctgccgtggtgacagccctggtgtggtgtggtttaaagattcagtaggagtttctggaaacctatctttaccaactacagaagagtttgaggatgatgctattaagaaagcccacatagagaaggattttatcgctttctgctcttccacaccagataatgtttcttggagacatcccacaatgggctctgtttttattggaagactcattgaacatatgcaagaatatgcctgttcctgtgatgtggaggaaattttccgcaaggttcgattttcatttgagcagccagatggtagagcgcagatgcccaccactgaaagagtgactttgacaagatgtttctacctcttcccaggacattaaaataaggaaactgtatgaatgtctgtgggcaggaagtgaagagatccttctgtaaaggtttttggaattatgtctgctgaataataaacttttttgaaataataaatctggtagaaaaatgaaaa

SEQ ID NO: 228172 - DNA, 2001 bp, Artificial Sequence
  derived and/or modified sequence
agtttcagtcacacaagaagggaggagagaaaagccatggccgacaaggtcctgaaggagaagagaaagctgtttatccgttccatgggtgaaggtacaataaatggcttactggatgaattattacagacaagggtgctgaacaaggaagagatggagaaagtaaaacgtgaaaatgctacagttatggataagacccgagctttgattgactccgttattccgaaaggggcacaggcatgccaaatttgcatcacatacatttgtgaagaagacagttacctggcagggacgctgggactctcagcagatcaaacatctggaaattaccttaatatgcaagactctcaaggagtactttcttcctttccagctcctcaggcagtgcaggacaacccagctatgcccacatcctcaggctcagaagggaatgtcaagctttgctccctagaagaagctcaaaggatatggaaacaaaagtcggcagagatttatccaataatggacaagtcaagccgcacacgtcttgctctcattatctgcaatgaagaatttgacagtattcctagaagaactggagctgaggttgacatcacaggcatgacaatgctgctacaaaatctggggtacagcgtagatgtgaaaaaaaatctcactgcttcggacatgactacagagctggaggcatttgcacaccgcccagagcacaagacctctgacagcacgttcctggtgttcatgtctcatggtattcgggaaggcatttgtgggaagaaacactctgagcaagtcccagatatactacaactcaatgcaatctttaacatgttgaataccaagaactgcccaagtttgaaggacaaaccgaaggtgatcatcatccaggcctgccgtggtgacagccctggtgtggtgtggtttaaagattcagtaggagtttctggaaacctatctttaccaactacagaagagtttgaggatgatgctattaagaaagcccacatagagaaggattttatcgctttctgctcttccacaccagataatgtttcttggagacatcccacaatgggctctgtttttattggaagactcattgaacatatgcaagaatatgcctgttcctgtgatgtggaggaaattttccgcaaggttcgattttcatttgagcagccagatggtagagcgcagatgcccaccactgaaagagtgactttgacaagatgtttctacctcttcccaggacattaaaataaggaaactgtatgaatgtctgtgggcaggtacatgtgtatggtcgggagtgtgggaaggttgaggaaagggtactgaaagtccatttgagtcaagaactctaggtttacaggctgagaatccttaatccaaaaatttgaattttgaaatgctctaaaatccaacactgtgtgagcgcccacatgatattcaaaggaaatgtttattgaaacatttcaaattataggtttttggattagggatgctaaaccagtaagtatacagctgaattccaatatacaaaaatatctgaaatttgaaatacttctggtagcatgcattttggataagggataatcaagccatatacagaaaatactgaagtaatgcctttcttctggtcagtgcagagcacgttgctcttctcccaaagtttttcatttagaccccttttgagattcatctgatattggcctagaagtggccgtaagactacaaaccctcacttttggatgtttctctccttcacctcagcagggtatatttaaacatagcatgtggtctttccttttaaaattgtgtatgttcccattggtggtataactttataacttgcatgtctttaaccaaattctttcctatgtttttttttttaattatttctttttctcataggaagtgaagagatccttctgtaaaggtttttggaattatgtctgctgaataataaacttttttgaaataataaatctggtagaaaaatgaaaa

SEQ ID NO: 228173 - DNA, 1215 bp, Artificial Sequence
  derived and/or modified sequence
atggccgacaaggtgctgaaggagaagagaaagctgttcatcagaagcatgggcgagggcaccatcaacggcctgctggacgagctgctgcagaccagagtgctgaacaaggaggagatggagaaggtgaagagagagaacgccaccgtgatggacaagaccagagccctgatcgacagcgtgatccccaagggcgcccaggcctgccagatctgcatcacctacatctgcgaggaggacagctacctggccggcaccctgggcctgagcgccgaccagaccagcggcaactacctgaacatgcaggacagccagggcgtgctgagcagcttccccgccccccaggccgtgcaggacaaccccgccatgcccaccagcagcggcagcgagggcaacgtgaagctgtgcagcctggaggaggcccagagaatctggaagcagaagagcgccgagatctaccccatcatggacaagagcagcagaaccagactggccctgatcatctgcaacgaggagttcgacagcatccccagaagaaccggcgccgaggtggacatcaccggcatgaccatgctgctgcagaacctgggctacagcgtggacgtgaagaagaacctgaccgccagcgacatgaccaccgagctggaggccttcgcccacagacccgagcacaagaccagcgacagcaccttcctggtgttcatgagccacggcatcagagagggcatctgcggcaagaagcacagcgagcaggtgcccgacatcctgcagctgaacgccatcttcaacatgctgaacaccaagaactgccccagcctgaaggacaagcccaaggtgatcatcatccaggcctgcagaggcgacagccccggcgtggtgtggttcaaggacagcgtgggcgtgagcggcaacctgagcctgcccaccaccgaggagttcgaggacgacgccatcaagaaggcccacatcgagaaggacttcatcgccttctgcagcagcacccccgacaacgtgagctggagacaccccaccatgggcagcgtgttcatcggcagactgatcgagcacatgcaggagtacgcctgcagctgcgacgtggaggagatcttcagaaaggtgagattcagcttcgagcagcccgacggcagagcccagatgcccaccaccgagagagtgaccctgaccagatgcttctacctgttccccggccactag

SEQ ID NO: 228174 - DNA, 906 bp, Artificial Sequence
  derived and/or modified sequence
atggagaaggtgaagagagagaacgccaccgtgatggacaagaccagagccctgatcgacagcgtgatccccaagggcgcccaggcctgccagatctgcatcacctacatctgcgaggaggacagctacctggccggcaccctgggcctgagcgccgaccagaccagcggcaactacctgaacatgcaggacagccagggcgtgctgagcagcttccccgccccccaggccgtgcaggacaaccccgccatgcccaccagcagcggcagcgagggcaacgtgaagctgtgcagcctggaggaggcccagagaatctggaagcagaagagcgccgagatctaccccatcatggacaagagcagcagaaccagactggccctgatcatctgcaacgaggagttcgacagcatccccagaagaaccggcgccgaggtggacatcaccggcatgaccatgctgctgcagaacctgggctacagcgtggacgtgaagaagaacctgaccgccagcgacatgaccaccgagctggaggccttcgcccacagacccgagcacaagaccagcgacagcaccttcctggtgttcatgagccacggcatcagagagggcatctgcggcaagaagcacagcgagcaggtgcccgacatcctgcagctgaacgccatcttcaacatgctgaacaccaagaactgccccagcctgaaggacaagcccaaggtgatcatcatccaggcctgcagaggcgacagccccggcgtggtgtggttcaaggacagcgtgggcgtgagcggcaacctgagcctgcccaccaccgaggagttcgaggacgacgccatcaagaaggcccacatcgagaaggacttcatcgccttctgcagcagcacccccggcaagagccagagctag

SEQ ID NO: 228175 - protein, 311 aa, Artificial Sequence
  derived and/or modified sequence
MADKVLKEKRKLFIRSMGEAPQAVQDNPAMPTSSGSEGNVKLCSLEEAQRIWKQKSAEIYPIMDKSSRTRLALIICNEEFDSIPRRTGAEVDITGMTMLLQNLGYSVDVKKNLTASDMTTELEAFAHRPEHKTSDSTFLVFMSHGIREGICGKKHSEQVPDILQLNAIFNMLNTKNCPSLKDKPKVIIIQACRGDSPGVVWFKDSVGVSGNLSLPTTEEFEDDAIKKAHIEKDFIAFCSSTPDNVSWRHPTMGSVFIGRLIEHMQEYACSCDVEEIFRKVRFSFEQPDGRAQMPTTERVTLTRCFYLFPGH

SEQ ID NO: 228176 - DNA, 936 bp, Artificial Sequence
  derived and/or modified sequence
atggctgacaaagtgctcaaagagaagcggaagctgtttattcggtcaatgggggaggcccctcaggcagtgcaggacaaccccgcgatgccgaccagctctgggagcgaggggaacgtgaagctatgttcactggaagaggctcaaagaatttggaagcagaagagtgccgagatctatccaatcatggataagagcagtagaactcgactcgccttaatcatctgcaacgaagagttcgactctatcccccggcgtaccggggccgaagtcgatatcactggtatgactatgctcctgcagaatctgggctatagcgtcgatgtgaaaaaaaatctgaccgcaagcgatatgactacggagcttgaggctttcgcccatcggcctgagcacaaaacctccgacagtacatttctagtgtttatgtcccacgggatccgcgaaggcatctgtgggaagaagcattctgagcaggttcctgacatccttcagttaaatgctatttttaacatgctgaacaccaagaattgtccttcactgaaagacaagcccaaggtgatcattatccaggcctgcagaggagactctccaggagtcgtatggttcaaagactccgtgggagtctccggcaacttaagcttaccgacaaccgaggagtttgaggacgatgcaatcaagaaggcgcacatagaaaaggacttcatagctttctgctcatctaccccagataacgttagctggcgtcaccccaccatggggtccgtatttattggacgattgattgaacacatgcaggagtacgcctgcagctgcgacgttgaagagatatttaggaaggttcggtttagcttcgaacagcccgacggccgtgcacagatgccaacgactgagcgtgtgactcttactcgctgcttctacctgttcccgggccactag

SEQ ID NO: 228177 - DNA, 936 bp, Artificial Sequence
  derived and/or modified sequence
atggctgacaaggtgctgaaggagaagaggaagctgttcatccgctccatgggagaggccccccaggccgtgcaggacaacccagccatgcccaccagcagcggcagcgagggcaatgtgaagctgtgcagcctggaggaggcccagaggatctggaagcagaagtctgctgagatctaccccatcatggacaagagcagcaggacccggctggccctgatcatctgcaatgaggagtttgacagcatccccaggagaactggagctgaggtggacatcaccggcatgaccatgctgctgcagaacctgggctacagcgtggatgtgaagaagaacctgacagccagtgacatgaccacagagctggaggcctttgcccacaggcctgagcacaagaccagtgacagcaccttcctggtgttcatgagccacggcatccgggagggcatctgtgggaagaagcacagcgagcaggtgcctgacatcctgcagctgaatgccatcttcaacatgctgaacaccaagaactgccccagcctgaaggacaagcccaaggtgatcatcatccaggcctgccgcggggacagccctggggtggtgtggttcaaggacagcgtgggcgtgtctggcaacctgagcctgcccaccacagaggagtttgaagatgatgccatcaagaaggcccacatcgagaaggacttcatcgccttctgcagcagcaccccagacaacgtgtcctggaggcaccccaccatgggcagcgtcttcatcggccgcctgattgagcacatgcaggagtatgcctgcagctgtgatgtggaggagatcttcaggaaggtgcgcttctcctttgagcagccagatggccgggcccagatgcccaccacagagcgggtgaccctgacccgctgcttctacctgtttcctggccactag

SEQ ID NO: 228178 - DNA, 936 bp, Artificial Sequence
  derived and/or modified sequence
atggccgacaaggtgctgaaggagaagcggaagctgttcatccggtctatgggtgaggctccccaggcggtgcaagacaaccctgcaatgccaacatcttccggcagcgaaggcaacgtgaagctttgctctctggaggaagcacagagaatctggaagcagaaaagcgccgaaatatatcccataatggataagagctcacggacccgtcttgccctcattatttgtaatgaagaatttgattcaattcctcgcaggactggcgcagaggtggatataacaggcatgactatgctcctgcagaatttaggttattccgtggatgtaaaaaaaaacttgaccgcctcagatatgactacggaactggaggcttttgcacacaggccagaacataagactagcgactctacatttctggtgttcatgtctcacgggataagagaaggcatttgcggcaagaagcattcagaacaggtgccggatatactgcagcttaatgccatcttcaatatgctcaataccaagaactgtccaagcctgaaagataagcccaaggtcatcattatccaggcttgtaggggcgattctcccggagtggtgtggtttaaagattctgttggcgttagcggcaatctgagcctccccacaacagaagagtttgaggacgatgcgatcaagaaggcccatatcgagaaagatttcatcgcattctgcagcagcacacccgataatgtttcatggaggcaccccactatgggatctgtttttataggccgactgatagagcacatgcaagagtacgcctgttcttgtgacgtcgaagagatatttcgcaaggttaggttttcctttgagcagccagacggtcgtgcacagatgccgacaaccgagagagttacattgacacgatgcttttatctttttcctgggcattag

SEQ ID NO: 228179 - DNA, 936 bp, Artificial Sequence
  derived and/or modified sequence
atggctgacaaagtcttgaaggagaagagaaaactgtttatcaggtccatgggcgaagctccgcaagcagttcaagataacccggctatgccgaccagcagcggctctgaaggaaacgtgaagctgtgttccttggaagaagcccaacgcatctggaaacagaagtcagccgagatataccccatcatggataagtccagcagaactagactggcactcatcatttgtaacgaggaatttgattccatccccagaaggaccggagccgaagtagacatcaccggtatgacaatgcttttgcagaacctcgggtattcagtggatgtcaagaagaacttgactgcttcagatatgactactgaactagaagcttttgcgcacaggccggagcacaagacttctgacagtacttttctggtgttcatgtcacacggaatcagagagggcatatgtgggaaaaaacattcagaacaggttccggatattctccagcttaacgcaattttcaatatgctaaacacaaaaaactgcccctccctcaaagataagcctaaagtgataatcattcaggcctgtcgaggcgacagcccgggagttgtatggtttaaggactccgtcggagtgtctggcaatttaagtctccctaccactgaggaatttgaagatgatgccatcaaaaaggcacacattgagaaagactttatcgcgttctgctcttctactccggacaatgttagttggcgccaccccaccatgggctccgtattcatcggaagactgatcgagcacatgcaagaatacgcgtgttcctgcgacgttgaagagatcttccggaaagtacgcttttcctttgagcaaccagatggccgagcccagatgcccacaactgagcgagtgactctgactaggtgtttttatttgtttcccggacactag

SEQ ID NO: 228180 - DNA, 1061 bp, Artificial Sequence
  derived and/or modified sequence
atggccgacaaggtcctgaaggagaagagaaagctgtttatccgttccatgggtgaagctcctcaggcagtgcaggacaacccagctatgcccacatcctcaggctcagaagggaatgtcaagctttgctccctagaagaagctcaaaggatatggaaacaaaagtcggcagagatttatccaataatggacaagtcaagccgcacacgtcttgctctcattatctgcaatgaagaatttgacagtattcctagaagaactggagctgaggttgacatcacaggcatgacaatgctgctacaaaatctggggtacagcgtagatgtgaaaaaaaatctcactgcttcggacatgactacagagctggaggcatttgcacaccgcccagagcacaagacctctgacagcacgttcctggtgttcatgtctcatggtattcgggaaggcatttgtgggaagaaacactctgagcaagtcccagatatactacaactcaatgcaatctttaacatgttgaataccaagaactgcccaagtttgaaggacaaaccgaaggtgatcatcatccaggcctgccgtggtgacagccctggtgtggtgtggtttaaagattcagtaggagtttctggaaacctatctttaccaactacagaagagtttgaggatgatgctattaagaaagcccacatagagaaggattttatcgctttctgctcttccacaccagataatgtttcttggagacatcccacaatgggctctgtttttattggaagactcattgaacatatgcaagaatatgcctgttcctgtgatgtggaggaaattttccgcaaggttcgattttcatttgagcagccagatggtagagcgcagatgcccaccactgaaagagtgactttgacaagatgtttctacctcttcccaggacattaaaataaggaaactgtatgaatgtctgtgggcaggaagtgaagagatccttctgtaaaggtttttggaattatgtctgctgaataataaacttttttgaaataataaatctggtagaaaaatgaaaa

SEQ ID NO: 228181 - DNA, 936 bp, Artificial Sequence
  derived and/or modified sequence
atggccgacaaggtgctgaaggagaagagaaagctgttcatcagaagcatgggcgaggccccccaggccgtgcaggacaaccccgccatgcccaccagcagcggcagcgagggcaacgtgaagctgtgcagcctggaggaggcccagagaatctggaagcagaagagcgccgagatctaccccatcatggacaagagcagcagaaccagactggccctgatcatctgcaacgaggagttcgacagcatccccagaagaaccggcgccgaggtggacatcaccggcatgaccatgctgctgcagaacctgggctacagcgtggacgtgaagaagaacctgaccgccagcgacatgaccaccgagctggaggccttcgcccacagacccgagcacaagaccagcgacagcaccttcctggtgttcatgagccacggcatcagagagggcatctgcggcaagaagcacagcgagcaggtgcccgacatcctgcagctgaacgccatcttcaacatgctgaacaccaagaactgccccagcctgaaggacaagcccaaggtgatcatcatccaggcctgcagaggcgacagccccggcgtggtgtggttcaaggacagcgtgggcgtgagcggcaacctgagcctgcccaccaccgaggagttcgaggacgacgccatcaagaaggcccacatcgagaaggacttcatcgccttctgcagcagcacccccgacaacgtgagctggagacaccccaccatgggcagcgtgttcatcggcagactgatcgagcacatgcaggagtacgcctgcagctgcgacgtggaggagatcttcagaaaggtgagattcagcttcgagcagcccgacggcagagcccagatgcccaccaccgagagagtgaccctgaccagatgcttctacctgttccccggccactag

SEQ ID NO: 228182 - protein, 263 aa, Artificial Sequence
  derived and/or modified sequence
MADKVLKEKRKLFIRSMGEAPQAVQDNPAMPTSSGSEGNVKLCSLEEAQRIWKQKSAEIYPIMDKSSRTRLALIICNEEFDSIPRRTGAEVDITGMTMLLQNLGYSVDVKKNLTASDMTTELEAFAHRPEHKTSDSTFLVFMSHGIREGICGKKHSEQVPDILQLNAIFNMLNTKNCPSLKDKPKVIIIQACRGDNVSWRHPTMGSVFIGRLIEHMQEYACSCDVEEIFRKVRFSFEQPDGRAQMPTTERVTLTRCFYLFPGH

SEQ ID NO: 228183 - DNA, 792 bp, Artificial Sequence
  derived and/or modified sequence
atggccgataaagtgttaaaagaaaagagaaaactctttattaggagcatgggggaggctccccaggctgtgcaggacaaccccgccatgccaaccagctcgggaagtgaaggtaacgttaagctgtgtagcttagaggaagcacagcgaatctggaagcagaaatcggcggagatctatcccattatggacaagagttcacgcacacgactcgcccttattatctgcaatgaagagtttgactctatcccaagacgcacgggggccgaagttgacatcacaggaatgacgatgctactgcagaacctggggtattccgtcgacgtgaagaagaaccttacagcctcggacatgacaactgaactggaggcttttgcccatagacccgagcacaagacctccgactccacttttctagtgtttatgagccatggcattagagaagggatctgtgggaaaaaacatagtgagcaggtgccagacatcctgcagctgaatgcgattttcaacatgctgaatactaagaattgcccaagcctgaaagacaagccaaaggtgatcatcatacaggcgtgtcgtggcgacaatgtgtcttggagacaccctaccatgggttcagtgttcatcgggaggttgatcgaacatatgcaagagtacgcatgttcctgtgatgtcgaggaaatcttcagaaaggtgcgcttcagcttcgaacagcccgacggccgcgcacagatgccgactacagagagagttacactgacgagatgtttctaccttttccccgggcactag

SEQ ID NO: 228184 - DNA, 792 bp, Artificial Sequence
  derived and/or modified sequence
atggctgacaaagtgcttaaggaaaaacgcaagttattcattcggtcaatgggcgaagcccctcaagcagtgcaggataacccagccatgcctaccagttcggggtctgagggtaatgtgaaattgtgctcactggaggaagcccagcggatatggaagcagaaaagcgccgagatctaccctattatggataaaagctctcgaactcgtttggccctgattatctgcaatgaagaatttgattctatacctaggcggacgggtgcggaagttgacattaccgggatgacaatgttgctgcaaaatttgggctatagcgtagacgtgaaaaaaaacttgacggccagtgacatgaccactgagctggaggcctttgctcatcgacctgagcacaagacaagtgattctaccttcctggtttttatgagtcatggaattcgagaaggtatttgcggaaaaaaacacagtgaacaagtgcccgacatactccagttgaacgctatcttcaacatgctgaacacaaaaaattgccctagcttaaaggacaaacctaaggtaattataatacaggcctgtcgtggagataatgtatcttggcgccaccccactatgggcagcgtgttcatcggtaggttaattgaacatatgcaggaatacgcttgctcatgcgacgtggaggaaatatttagaaaagttcgcttttcctttgagcagcccgacgggcgagctcagatgcctactaccgagagggtcactttgacaaggtgcttttacttgtttccaggacactag

SEQ ID NO: 228185 - DNA, 792 bp, Artificial Sequence
  derived and/or modified sequence
atggcagataaagtgcttaaggagaaacggaagttattcatacgttccatgggagaagcccctcaggctgtccaggacaatcccgccatgcctacatcttctggatctgagggcaacgtcaagttgtgctctctcgaagaggctcaacggatctggaagcagaaatctgctgagatatatccgatcatggataaatcctcaagaactaggctggcacttatcatttgtaacgaggaatttgattctatacccaggaggaccggcgccgaggtagatatcacaggtatgaccatgttgttgcagaatctcgggtattctgtggatgtgaagaaaaatttgacggcctcagacatgacaacagagttagaagcattcgctcaccgccctgagcataagacaagtgatagcacattcctggttttcatgtctcacggcatcagagaggggatttgtggcaagaagcatagtgagcaagttcctgatattctgcaactgaacgctatatttaacatgctgaacaccaaaaactgtcctagcctcaaggataagcctaaggttatcatcatccaggcctgccgaggagataatgtttcatggcggcatcctaccatgggaagtgtcttcatcggacgattaattgaacacatgcaggagtacgcatgcagctgcgacgtggaagaaatcttccgaaaggtgcggtttagctttgaacagcccgatggcagggcgcagatgcccactacggagagggtgactctgacccgttgtttctacctcttccctggccactag

SEQ ID NO: 228186 - DNA, 792 bp, Artificial Sequence
  derived and/or modified sequence
atggctgacaaggtgctgaaggagaagaggaagctgttcatccgctccatgggagaggccccccaggccgtgcaggacaacccagccatgcccaccagcagcggcagcgagggcaatgtgaagctgtgcagcctggaggaggcccagaggatctggaagcagaagtctgctgagatctaccccatcatggacaagagcagcaggacccggctggccctgatcatctgcaatgaggagtttgacagcatccccaggagaactggagctgaggtggacatcaccggcatgaccatgctgctgcagaacctgggctacagcgtggatgtgaagaagaacctgacagccagtgacatgaccacagagctggaggcctttgcccacaggcctgagcacaagaccagtgacagcaccttcctggtgttcatgagccacggcatccgggagggcatctgtgggaagaagcacagcgagcaggtgcctgacatcctgcagctgaatgccatcttcaacatgctgaacaccaagaactgccccagcctgaaggacaagcccaaggtgatcatcatccaggcctgccgcggggacaacgtgtcctggaggcaccccaccatgggcagcgtcttcatcggccgcctgattgagcacatgcaggagtatgcctgcagctgtgatgtggaggagatcttcaggaaggtgcgcttctcctttgagcagccagatggccgggcccagatgcccaccacagagcgggtgaccctgacccgctgcttctacctgtttcctggccactag

SEQ ID NO: 228187 - DNA, 792 bp, Artificial Sequence
  derived and/or modified sequence
atggccgacaaggtgctgaaggagaagcggaagctgttcatccggtcaatgggagaggccccgcaggctgttcaggataatcctgcaatgccaacttcttcagggtcagaaggtaatgtcaagctgtgctccctggaggaagctcagcgcatctggaagcagaagtctgcggaaatttacccaattatggataagtcttcacgcacccgcttggcccttataatatgcaatgaagaatttgactccattccccggcggacaggtgcagaggtggatattacaggaatgaccatgctgctgcaaaacctggggtactccgtggatgtcaaaaagaatctgacagctagcgatatgacaaccgaacttgaggcctttgcccaccgtcctgagcataaaacctccgacagcacttttctggtgtttatgagccatggtattcgcgaagggatctgcggcaagaaacactctgagcaagtacccgatattctccagctcaacgctatctttaatatgttaaacacaaagaattgcccttctctgaaggacaaaccgaaggtgatcattatccaggcctgccgaggggataacgtgtcctggagacaccctacaatggggagcgtgtttatcggacggctgattgagcacatgcaagaatacgcctgctcttgcgatgttgaggaaatttttagaaaagtgcggttcagttttgagcagcctgatggaagagcacaaatgccaactacagagcgtgtgacacttacccgctgtttctaccttttcccggggcattag

SEQ ID NO: 228188 - DNA, 792 bp, Artificial Sequence
  derived and/or modified sequence
atggccgacaaggtgctgaaggagaagcggaagctgttcatccggtccatgggcgaagcacctcaggccgtgcaggacaatcctgctatgcccaccagttccggctctgaaggcaacgtgaaattgtgttccttagaggaggcacagcggatatggaaacagaaatcagctgagatttatccgatcatggataagagcagcagaactaggctggctctcataatttgtaacgaggagttcgattcaatccctagaagaacaggtgcagaggtggatatcaccggtatgacaatgctgctgcagaatctgggctatagcgtcgatgtaaagaaaaacctaacagcctccgatatgacaacagagttggaggcctttgctcaccgtcctgagcacaaaacctccgatagtaccttcttggtcttcatgtctcacggaatccgcgaaggaatctgcggcaagaagcactctgaacaagtccctgatattttgcagcttaacgctatttttaacatgctgaatactaaaaattgtccatctctcaaggataagccgaaagtcatcattattcaggcctgccggggcgataacgtaagctggcggcatccaactatgggatctgttttcattggccggttaatcgaacatatgcaggaatacgcatgttcgtgcgacgtcgaagagatctttcggaaagtgcgctttagtttcgagcagcctgacggcagggctcagatgcccacaactgaacgggtgacactgactaggtgcttctacctgttcccaggacattag

SEQ ID NO: 228189 - DNA, 792 bp, Artificial Sequence
  derived and/or modified sequence
atggccgacaaggtgctgaaggagaagcggaagctgttcatccggtcaatgggtgaggctcctcaagctgtccaggacaatccagcaatgccaacctccagtggctctgaaggtaatgtgaagctgtgcagtttagaagaagcccaaaggatctggaaacaaaagagcgccgagatctatcccattatggacaaaagttccagaacaagactggcccttattatatgcaatgaggaattcgactcgatacctagacgtaccggcgccgaagtcgatatcactggaatgacgatgttgctccaaaacttgggttattctgttgatgtcaagaagaacctgacagccagcgatatgactaccgaacttgaagccttcgcccacagacctgagcacaaaacttcggattctactttcctagtgtttatgtcgcacgggattagagaaggcatttgcgggaaaaagcatagcgagcaggtgcccgatatcctgcagctgaacgcgatttttaacatgctgaacaccaaaaactgtccaagcctcaaagacaagcccaaggttattatcatccaggcctgcagaggagacaatgtgagctggcggcaccctaccatgggctcagttttcattgggagattaatcgaacatatgcaggaatatgcttgtagctgcgacgtggaggaaattttccgtaaggtgagattttctttcgagcagccagatggcagagcccagatgcccacaacagagagggttaccctgactagatgtttctatctattcccaggacactag

SEQ ID NO: 228190 - DNA, 792 bp, Artificial Sequence
  derived and/or modified sequence
atggccgacaaagtactcaaggaaaaacggaagctgttcatcagatctatgggcgaagcccctcaggcagtccaggataaccctgctatgcccacatcctccggcagtgagggaaacgtgaaactctgttctctggaagaggcccagaggatctggaagcagaagtccgcggagatttaccctattatggataaatccagtcggacaagactcgcactgatcatttgtaacgaggaattcgattcaattccaaggcgcaccggagctgaggttgatattaccggaatgaccatgttgctgcaaaacctggggtattccgtggatgtgaaaaaaaatcttacggcaagtgacatgaccaccgagctggaggcatttgcccacaggccggagcacaagacatcggattcaacttttctcgtgtttatgagccacggcattcgagagggcatatgcggcaaaaaacactcggagcaggtcccggatatcctccagctcaatgccatcttcaacatgttaaatactaaaaactgccccagtcttaaggataagccaaaagtaataattattcaagcttgcaggggtgacaatgtgagctggaggcatccgaccatgggctcagtgttcattggtcggctgattgagcacatgcaggaatacgcatgttcctgcgatgttgaggagatctttcggaaggtgcgatttagtttcgagcagccagatggtcgagctcaaatgcccacaacagagagagtcacactgacaaggtgcttctacctattccccggtcactag

SEQ ID NO: 228191 - DNA, 792 bp, Artificial Sequence
  derived and/or modified sequence
atggcggacaaagtgctgaaagaaaaacggaagctgttcatcagatcaatgggcgaagcccctcaggcagttcaggacaatcccgcaatgcctacttcctcaggaagcgagggcaatgtgaagctctgttccctggaggaggcccaaagaatttggaaacagaaatctgctgaaatataccccattatggataagagctcacgaactagattggccttaattatttgtaatgaggagttcgacagcattccacgaagaacgggcgctgaagttgatatcacaggaatgaccatgctccttcaaaatctcggttactctgtggacgttaaaaaaaatctaaccgcctccgacatgaccaccgagcttgaagcattcgcgcaccggcctgagcacaagacctcagactctaccttcctagtgttcatgtctcacgggatacgcgagggtatctgcggtaaaaaacattctgaacaagtgcccgacatactccagctaaacgctatttttaatatgctgaatactaagaactgccctagtctgaaggacaaacccaaggttataatcattcaggcctgtcgcggagataatgtctcctggagacaccctactatgggctctgtcttcatcggccgactgatagagcatatgcaggagtacgcctgctcttgtgacgtggaagagatttttagaaaggttcgcttttcttttgaacaacccgatggcagggcccagatgccgacaacagaacgcgtgacgcttaccagatgtttttatctcttccccggacactag

SEQ ID NO: 228192 - DNA, 792 bp, Artificial Sequence
  derived and/or modified sequence
atggcagataaagtgttgaaggagaaacgaaagctctttatccgttccatgggcgaggcccctcaggcagtccaagacaatcccgctatgcctacctctagcggatccgaagggaatgtgaagctctgcagtttggaagaggcacagcgtatctggaaacaaaaatccgccgagatttatccaataatggataagagcagtagaacgagactagcgctgattatctgcaatgaggaattcgattctattcctcgcagaaccggtgccgaggtggatataaccggaatgactatgctgttacagaacttagggtatagcgtcgatgtgaagaagaacctgaccgcgagcgacatgactaccgaactggaggcattcgctcatcggcctgagcacaaaactagtgactccactttcctggtgtttatgtcacacggcattcgcgagggtatttgtgggaaaaagcatagtgagcaggtgcccgatatcctccagcttaatgctatattcaatatgcttaatacaaaaaactgtccgtcactgaaggataagcctaaagtcatcatcatccaggcctgccggggagacaatgtttcctggcgccaccccaccatggggtctgtattcatcgggcgtttgatcgagcatatgcaggagtacgcttgttcctgcgatgtggaggaaatatttcgtaaggtcagattttcctttgagcagcctgatgggcgagcacagatgcctacgacggaacgcgttacgttgacccgctgcttctatctgttccctggacattag

SEQ ID NO: 228193 - DNA, 921 bp, Artificial Sequence
  derived and/or modified sequence
gggaggagagaaaagccatggccgacaaggtcctgaaggagaagagaaagctgtttatccgttccatgggtgaagctcctcaggcagtgcaggacaacccagctatgcccacatcctcaggctcagaagggaatgtcaagctttgctccctagaagaagctcaaaggatatggaaacaaaagtcggcagagatttatccaataatggacaagtcaagccgcacacgtcttgctctcattatctgcaatgaagaatttgacagtattcctagaagaactggagctgaggttgacatcacaggcatgacaatgctgctacaaaatctggggtacagcgtagatgtgaaaaaaaatctcactgcttcggacatgactacagagctggaggcatttgcacaccgcccagagcacaagacctctgacagcacgttcctggtgttcatgtctcatggtattcgggaaggcatttgtgggaagaaacactctgagcaagtcccagatatactacaactcaatgcaatctttaacatgttgaataccaagaactgcccaagtttgaaggacaaaccgaaggtgatcatcatccaggcctgccgtggtgataatgtttcttggagacatcccacaatgggctctgtttttattggaagactcattgaacatatgcaagaatatgcctgttcctgtgatgtggaggaaattttccgcaaggttcgattttcatttgagcagccagatggtagagcgcagatgcccaccactgaaagagtgactttgacaagatgtttctacctcttcccaggacattaaaataaggaaactgtatgaatgtctgtgggcaggaagtgaagagatccttctgtaaaggtttttggaattatgtctgctgaataataaacttttttgaaataataaatctggt

SEQ ID NO: 228194 - DNA, 825 bp, Artificial Sequence
  derived and/or modified sequence
atggccgacaaggtcctgaaggagaagagaaagctgtttatccgttccatgggtgaagctcctcaggcagtgcaggacaacccagctatgcccacatcctcaggctcagaagggaatgtcaagctttgctccctagaagaagctcaaaggatatggaaacaaaagtcggcagagatttatccaataatggacaagtcaagccgcacacgtcttgctctcattatctgcaatgaagaatttgacagtattcctagaagaactggagctgaggttgacatcacaggcatgacaatgctgctacaaaatctggggtacagcgtagatgtgaaaaaaaatctcactgcttcggacatgactacagagctggaggcatttgcacaccgcccagagcacaagacctctgacagcacgttcctggtgttcatgtctcatggtattcgggaaggcatttgtgggaagaaacactctgagcaagtcccagatatactacaactcaatgcaatctttaacatgttgaataccaagaactgcccaagtttgaaggacaaaccgaaggtgatcatcatccaggcctgccgtggtgataatgtttcttggagacatcccacaatgggctctgtttttattggaagactcattgaacatatgcaagaatatgcctgttcctgtgatgtggaggaaattttccgcaaggttcgattttcatttgagcagccagatggtagagcgcagatgcccaccactgaaagagtgactttgacaagatgtttctacctcttcccaggacattaaaataaggaaactgtatgaatgtctgtgggcagg

SEQ ID NO: 228195 - DNA, 792 bp, Artificial Sequence
  derived and/or modified sequence
atggccgacaaggtgctgaaggagaagagaaagctgttcatcagaagcatgggcgaggccccccaggccgtgcaggacaaccccgccatgcccaccagcagcggcagcgagggcaacgtgaagctgtgcagcctggaggaggcccagagaatctggaagcagaagagcgccgagatctaccccatcatggacaagagcagcagaaccagactggccctgatcatctgcaacgaggagttcgacagcatccccagaagaaccggcgccgaggtggacatcaccggcatgaccatgctgctgcagaacctgggctacagcgtggacgtgaagaagaacctgaccgccagcgacatgaccaccgagctggaggccttcgcccacagacccgagcacaagaccagcgacagcaccttcctggtgttcatgagccacggcatcagagagggcatctgcggcaagaagcacagcgagcaggtgcccgacatcctgcagctgaacgccatcttcaacatgctgaacaccaagaactgccccagcctgaaggacaagcccaaggtgatcatcatccaggcctgcagaggcgacaacgtgagctggagacaccccaccatgggcagcgtgttcatcggcagactgatcgagcacatgcaggagtacgcctgcagctgcgacgtggaggagatcttcagaaaggtgagattcagcttcgagcagcccgacggcagagcccagatgcccaccaccgagagagtgaccctgaccagatgcttctacctgttccccggccactag

SEQ ID NO: 228196 - protein, 88 aa, Artificial Sequence
  derived and/or modified sequence
MADKVLKEKRKLFIRSMGEDNVSWRHPTMGSVFIGRLIEHMQEYACSCDVEEIFRKVRFSFEQPDGRAQMPTTERVTLTRCFYLFPGH

SEQ ID NO: 228197 - DNA, 267 bp, Artificial Sequence
  derived and/or modified sequence
atggctgacaaagtcttgaaagagaaaaggaagctctttatcagaagcatgggagaagacaacgtcagctggaggcacccaaccatgggcagcgtctttatcggcagacttattgagcatatgcaagaatatgcctgctcatgtgacgtcgaagagatcttccggaaagtcaggttctcgtttgaacagccggacggccgggcccagatgccaaccaccgagcgggtgacactgactagatgtttttacctgttccccggccattag

SEQ ID NO: 228198 - DNA, 267 bp, Artificial Sequence
  derived and/or modified sequence
atggctgacaaggtactgaaggaaaaacggaaactgttcattcgcagtatgggcgaggacaacgtctcctggaggcacccgacgatggggtccgtcttcatcgggcgcctcatcgagcacatgcaagagtacgcctgtagctgtgacgtggaggagatctttcggaaggttcgctttagttttgaacagcctgacgggcgagcacagatgcccactactgaacgagtgactctgacaagatgcttctacctgttccctgggcattag

SEQ ID NO: 228199 - DNA, 267 bp, Artificial Sequence
  derived and/or modified sequence
atggcagacaaggtgctgaaggaaaaaaggaagctctttatccgaagtatgggggaagataatgtctcttggaggcacccaacaatgggaagcgtttttatcggccggttgatcgaacatatgcaggagtatgcatgcagctgcgacgttgaagaaattttccgcaaagtgagattcagctttgagcagcctgatgggcgcgcccagatgcctaccaccgaacgagttaccctgaccagatgtttctacctgttccccggtcactag

SEQ ID NO: 228200 - DNA, 267 bp, Artificial Sequence
  derived and/or modified sequence
atggctgacaaggtgctgaaggagaagaggaagctgttcatccgctccatgggagaagataatgtgtcctggaggcaccccaccatgggctctgtgttcatcggccgcctcatcgagcacatgcaggagtatgcctgcagctgtgatgtggaggagatcttcaggaaggtgcgcttctcctttgagcagccagatggccgggcccagatgcccaccacagagcgggtgaccctgacccgctgcttctacctgtttcctggccactag

SEQ ID NO: 228201 - DNA, 267 bp, Artificial Sequence
  derived and/or modified sequence
atggccgacaaggtgctgaaggagaagcggaagctgttcatccggtctatgggggaggacaatgtctcttggagacatcccacaatgggctctgtgttcataggtagattgattgaacatatgcaggagtatgcatgctcttgcgacgtcgaagaaatttttagaaaggttaggtttagtttcgaacagccagacgggagggcccaaatgcccacgaccgagagggtgaccctcacaagatgtttttacctgttccctgggcattag

SEQ ID NO: 228202 - DNA, 267 bp, Artificial Sequence
  derived and/or modified sequence
atggccgacaaggtgctgaaggagaagcggaagctgttcatccggtccatgggtgaggataacgtgtcttggaggcatcccaccatgggatctgtcttcattggacgcctcatcgagcatatgcaggaatatgcatgttcttgcgacgttgaggagatctttcggaaagtccggtttagctttgagcagcccgacggaagagcccagatgccgactaccgagcgtgtgacgctgacacggtgcttttatttattccctgggcactag

SEQ ID NO: 228203 - DNA, 267 bp, Artificial Sequence
  derived and/or modified sequence
atggccgacaaggtgctgaaggagaagcggaagctgttcatccggtccatgggagaagataacgtcagctggagacatcccaccatggggagcgtcttcattggaaggctgattgagcatatgcaggagtacgcctgttcatgcgacgttgaagagattttccggaaggttcgtttttcatttgagcaaccagatggaagggcgcagatgccgacgaccgagagagtgaccctcactcgttgcttctatttattcccaggacactag

SEQ ID NO: 228204 - DNA, 267 bp, Artificial Sequence
  derived and/or modified sequence
atggctgataaagtgttaaaggagaagcgcaagctgttcattaggtctatgggagaagacaatgtgagctggagacacccaacaatgggttccgtattcataggcaggctaatcgagcacatgcaagaatacgcttgcagctgtgacgtggaggagatctttaggaaagtgagattcagctttgaacaacccgacggcagggcccaaatgccaactacagagcgcgtgaccctcacacggtgcttttacctgttccccggacattag

SEQ ID NO: 228205 - DNA, 267 bp, Artificial Sequence
  derived and/or modified sequence
atggctgacaaagtgctgaaggagaagcggaagctgtttatcaggtcaatgggcgaggataatgtgagctggagacaccccaccatggggtcagttttcatcgggagactgatcgagcacatgcaggaatacgcatgctcatgcgatgttgaggaaatattcagaaaggttcgcttctcatttgaacagcccgatggcagagcgcagatgcctactacagagcgcgtgacccttacacggtgcttctatctgttccctggacactag

SEQ ID NO: 228206 - DNA, 267 bp, Artificial Sequence
  derived and/or modified sequence
atggccgacaaggtgttgaaggaaaagagaaagctctttatccgctctatgggcgaggacaacgtttcatggcgccacccaaccatgggatccgtcttcatcggtagactgatcgagcacatgcaagagtacgcctgtagctgtgatgtcgaggagatctttcggaaggtgcgctttagtttcgagcagcctgacggcagggcacaaatgccaacaaccgaacgggtcaccttgactcgatgcttctatctgtttccagggcattag

SEQ ID NO: 228207 - DNA, 396 bp, Artificial Sequence
  derived and/or modified sequence
gggaggagagaaaagccatggccgacaaggtcctgaaggagaagagaaagctgtttatccgttccatgggtgaagataatgtttcttggagacatcccacaatgggctctgtttttattggaagactcattgaacatatgcaagaatatgcctgttcctgtgatgtggaggaaattttccgcaaggttcgattttcatttgagcagccagatggtagagcgcagatgcccaccactgaaagagtgactttgacaagatgtttctacctcttcccaggacattaaaataaggaaactgtatgaatgtctgtgggcaggaagtgaagagatccttctgtaaaggtttttggaattatgtctgctgaataataaacttttttgaaataataaatctggt

SEQ ID NO: 228208 - DNA, 300 bp, Artificial Sequence
  derived and/or modified sequence
atggccgacaaggtcctgaaggagaagagaaagctgtttatccgttccatgggtgaagataatgtttcttggagacatcccacaatgggctctgtttttattggaagactcattgaacatatgcaagaatatgcctgttcctgtgatgtggaggaaattttccgcaaggttcgattttcatttgagcagccagatggtagagcgcagatgcccaccactgaaagagtgactttgacaagatgtttctacctcttcccaggacattaaaataaggaaactgtatgaatgtctgtgggcagg

SEQ ID NO: 228209 - DNA, 267 bp, Artificial Sequence
  derived and/or modified sequence
atggccgacaaggtgctgaaggagaagagaaagctgttcatcagaagcatgggcgaggacaacgtgagctggagacaccccaccatgggcagcgtgttcatcggcagactgatcgagcacatgcaggagtacgcctgcagctgcgacgtggaggagatcttcagaaaggtgagattcagcttcgagcagcccgacggcagagcccagatgcccaccaccgagagagtgaccctgaccagatgcttctacctgttccccggccactag

SEQ ID NO: 228210 - protein, 127 aa, Artificial Sequence
  derived and/or modified sequence
MRPLDIVELAEPEEVEVLEPEEDFEQFLLPVINEMREDIASLTREHGRAYLRNRSKLWEMDNMLIQIKTQVEASEESALNHLQNPGDAAEGRAAKRCEKAEEKAKEIAKMAEMLVELVRRIEKSESS

SEQ ID NO: 228211 - DNA, 384 bp, Artificial Sequence
  derived and/or modified sequence
atgaggcccctggatatcgtggaactagccgagcctgaggaagtcgaggtccttgagcccgaagaagactttgagcagttcttgctgcctgtcatcaatgagatgagggaagacattgcaagtctgacccgtgagcacggaagggcgtaccttagaaatcgcagcaaactctgggagatggacaatatgcttattcagatcaaaacacaggtagaggcgtctgaggaatccgccctcaatcaccttcagaatccaggggatgccgcagaggggcgggctgctaagcggtgcgaaaaggctgaagagaaagctaaggaaatcgcaaagatggccgaaatgctggttgaattggtgcgccgaatcgagaagtccgagtctagctag

SEQ ID NO: 228212 - DNA, 384 bp, Artificial Sequence
  derived and/or modified sequence
atgagacccctggacatcgtggagttggctgagcccgaggaggtcgaggtgctggagcccgaggaggattttgagcagttcctcctgcccgtcatcaatgagatgcgtgaggacatcgcaagcctcacgagagaacatggaagagcatatctgagaaaccggagcaagttgtgggagatggacaacatgctgattcaaatcaaaacacaggtggaggcgtcagaggagtcagccttgaatcacctgcaaaacccaggagatgctgccgaggggagggcagccaaacgatgtgaaaaggcagaggaaaaggctaaagagatcgcaaagatggcagagatgctggtcgagctcgtgcggcggattgaaaagtcggagtcgtcttag

SEQ ID NO: 228213 - DNA, 384 bp, Artificial Sequence
  derived and/or modified sequence
atgaggcccctggatatcgtagaactggcagaaccagaagaagttgaggtgctggaacccgaggaggatttcgagcagttccttctgccagtgatcaatgaaatgagagaggatatcgcctcactgactagggagcacggccgggcctacctcagaaatagaagcaagttatgggagatggataacatgttgatacaaatcaaaacacaggtcgaagcttccgaggagtccgccctgaatcacttgcagaaccccggagatgccgccgagggtcgggccgccaaaagatgcgagaaagccgaagagaaggctaaggagattgcaaagatggcagagatgttagtggagctggtaaggcgcatcgaaaagagcgaatcctcctag

SEQ ID NO: 228214 - DNA, 384 bp, Artificial Sequence
  derived and/or modified sequence
atgaggcccctggacatcgtggagctggccgagcctgaggaggtggaggtgctggagcctgaggaggactttgagcagttcctgctgcccgtcatcaatgagatgagagaagatattgccagcctgacccgggagcacggccgggcctacctgaggaacagaagcaagctgtgggagatggacaacatgctgatccagatcaagacccaggtggaggccagcgaggagagcgccctgaaccacctgcagaaccctggagatgctgctgagggccgggccgccaagagatgtgagaaggccgaggagaaggccaaggagatcgccaagatggccgagatgctggtggagctggtgagaagaattgagaagtctgagagcagctag

SEQ ID NO: 228215 - DNA, 1584 bp, Artificial Sequence
  derived and/or modified sequence
ttcgccgttactctgcgcgtaagtcgcttgtccgtggcttctctgagaagaaaagttgaaaaagggtaaaagttttcaggaatattcgggctctctattgctaagcatagcgagtgtcggttttctctctccaacagacatcgctattgcggttccgaggcagtgggaagagatgcggcccctggacatcgtcgagctggcggaaccggaggaagtggaggtgctggagcccgaggaggatttcgagcagtttctgctcccggtcatcaacgagatgcgcgaggacatcgcgtcgctgacgcgcgagcacgggcgggcgtacctgcggaaccggagcaagctgtgggagatggacaatatgctcatccagatcaaaacgcaggtggaggcctcggaggagagcgccctcaaccacctccagaacccgggcgacgcggccgagggccgggcggccaagaggtgcgagaaggccgaggagaaggccaaggagattgcgaagatggcagagatgctggtggagctggtccggcggatagagaagagcgagtcgtcgtgagcgcggtcggcggtttccagccaatggattctggtcaactggtggagattggctgacaccctggagaagccgaaaccagagagccttttgttttctcttttttcctgtctatgctctgtctcacttaacactacgttttctgctatggtctgtggttgatgacctcaatatgagtttcgattgttaacgtgtttttgtttgggaagtaattttgtttgaaaatgctctcacatacaggaattagggcctagattgtaagctcttgcagcagtcacatttgttcccgggctttggtggttatttctaaatttttgaggtgctttgctatttcttgtgtgacctgatagctccctggaactttgggtctgtgtgtgacacatgagactcacagttggagttctccagctctggaggtgctgaaggagctgcattaattctggaagacgactccatgcagcaactactgaagaaaggaccagacttcaacggggagtgtggatgggccgacctggctgggactcgtgaatctggagaagagctggagaatggatagtattgtctgtatttggagactttaatttctgtgtgagaccaaaggaggagagatgtgttttgttcaaaatttaaatttgttgtggtacactatcttatgtaacctgtctggtgagtttgtttggacaacctaactcagctttatttgacatggaacctaaaatagaagataagatcttgatattctgtacaagttgatgtaataccctgatgcgttttagaggacttggcataaaatgaaagattggcaaaggcccttgaggggcttggggatgacagtatggaactgtctgcattggaccctaaactggactagaagaggcatcttcaaggttcatacgttgtccagctgtaagttcatttgagtagcagacctaacaaatatttgaggtcagaaccctaccatgttaaaacaaacaaaaacttaccatgttaataaaagtattcatttgcttgaaaagacgaaagacctaaaa

SEQ ID NO: 228216 - DNA, 384 bp, Artificial Sequence
  derived and/or modified sequence
atgcggcccctggacatcgtggagctggccgagcccgaggaggtggaagtccttgagcccgaggaagactttgagcaatttttactccctgtgataaacgagatgcgcgaggacatcgccagcctgactcgggagcacggtagggcatacctgagaaacagaagcaagctttgggaaatggacaacatgctgatccagattaaaactcaggtcgaggcctctgaagaatcagccctcaatcaccttcagaatccaggcgacgccgccgaaggaagggccgctaaaagatgcgagaaggctgaggagaaagccaaggagattgctaagatggctgagatgttagttgagctggtgaggcgcatcgagaaaagcgagagctcttag

SEQ ID NO: 228217 - DNA, 384 bp, Artificial Sequence
  derived and/or modified sequence
atgcggcccctggacatcgtggagctggccgagcccgaggaggtggaagtcttggagccagaagaagattttgaacagttcctgttaccagtcattaacgagatgagggaagacatcgcctcactgactagagaacatggcagagcctaccttcgaaatcgaagcaagctgtgggaaatggataacatgctgatacaaattaaaacacaggttgaagcatctgaagagtcagcattgaatcacttgcagaatcctggcgatgcagctgagggcagggccgccaaaagatgcgaaaaagccgaagagaaggcaaaagaaatcgccaagatggctgagatgctggtggaattggtgagacggattgaaaaatcagagtcctcctag

SEQ ID NO: 228218 - DNA, 384 bp, Artificial Sequence
  derived and/or modified sequence
atgcggcccctggacatcgtggagctggccgagcccgaggaggtggaggttctcgagccggaagaagattttgagcagtttttattaccggtgattaacgagatgcgagaagatattgcctccctgacgcgggaacacgggcgtgcctacctgcgcaatagatccaaattgtgggagatggacaatatgcttatccagatcaaaactcaggtggaggcatccgaggaatctgcgctgaaccatctgcagaatcctggtgacgctgcagaggggagagccgccaaaaggtgtgaaaaggcagaagagaaggccaaggagattgcaaaaatggcagaaatgctggttgagctcgtgcgcaggatcgagaaatccgaatctagttag

SEQ ID NO: 228219 - DNA, 384 bp, Artificial Sequence
  derived and/or modified sequence
atgcggccactcgatatagtggagcttgctgagccagaggaagtagaggtgttagaaccggaggaggacttcgagcagttcctcctgccagtcatcaacgagatgcgggaagacatcgcctcacttactagagaacacgggagagcatacctcaggaacagaagtaagttatgggaaatggacaacatgttgatccaaattaaaacccaggtggaagccagtgaggaaagcgctctgaatcatctgcagaaccccggagatgcagcagaaggacgggcagctaagagatgtgaaaaggcagaagaaaaagccaaggagatcgcaaaaatggcagagatgctggtggagctggtgcgtagaatcgagaagtctgaaagctcctag

SEQ ID NO: 228220 - DNA, 384 bp, Artificial Sequence
  derived and/or modified sequence
atgaggccactggatatagtcgagttggcggagcctgaggaagtggaggtgctagaaccagaggaggattttgagcagttcttgctacctgtcatcaacgaaatgcgcgaagatatagcttctcttactcgagagcacggcagggcctacctgcggaacagaagtaagctctgggaaatggacaacatgctaatccaaattaagactcaggtcgaggcctctgaggaatcggccctgaatcatttgcagaatccaggagatgcagcagaaggacgggcagccaagcgttgtgagaaggctgaagaaaaggccaaagaaatagctaaaatggcggagatgctggtagagttggtcagacggattgaaaagtccgagtcatcatag

SEQ ID NO: 228221 - DNA, 384 bp, Artificial Sequence
  derived and/or modified sequence
atgcggcctctggatatagtcgaacttgccgaacccgaagaagtggaagtgcttgagcccgaggaggactttgaacaattccttttgcctgtgattaacgaaatgcgcgaggacatagcctcactgactagagaacatggaagggcttacctcaggaatcggtcgaaattgtgggagatggacaatatgcttatccaaataaaaacacaggtcgaggcgtctgaggagagcgccttaaaccatctgcagaaccccggagacgctgccgagggccgagccgcaaaacgatgcgagaaagcggaagagaaggccaaggaaatcgccaaaatggctgaaatgctagtggagctggtgaggcgtatagaaaagtctgagtcatcctag

SEQ ID NO: 228222 - DNA, 563 bp, Artificial Sequence
  derived and/or modified sequence
ttttgttcgccgttactctgcgcgtaagtcgcttgtccgtggcttctctgagaagaaaagttgaaaaaggacatcgctattgcggttccgaggcagtgggaagagatgcggcccctggacatcgtcgagctggcggaaccggaggaagtggaggtgctggagcccgaggaggatttcgagcagtttctgctcccggtcatcaacgagatgcgcgaggacatcgcgtcgctgacgcgcgagcacgggcgggcgtacctgcggaaccggagcaagctgtgggagatggacaatatgctcatccagatcaaaacgcaggtggaggcctcggaggagagcgccctcaaccacctccagaacccgggcgacgcggccgagggccgggcggccaagaggtgcgagaaggccgaggagaaggccaaggagattgcgaagatggcagagatgctggtggagctggtccggcggatagagaagagcgagtcgtcgtgagcgcggtcggcggtttccagccaatggattctggtcaactggtggagattggctgacaccctggagaagccgaa

SEQ ID NO: 228223 - DNA, 2049 bp, Artificial Sequence
  derived and/or modified sequence
gtctcactctgatgcacaggctggagagcagtggcgcgatatgggctcactgcaacctccgcctcccgttttcaaacgattgtctcagcctcccaagcagctggggttacacgcgtgcaacacgacgcccggctaatttttgtatttttggtagagacggggtctcgccatgtcggccaggctggtctcgaattcctgacctcaagccatccacccacctcgcctcccaacgtgctgagattacaggcgtgagccaccgcgcctgggaagtgcgggaggcctttttaaaaaatgtaaactcgcgtgctcaagaagccctatcggagggaaacacccagaagaggccaccctccaaacacagggtaaaacaggggtgacgcacagaggtaacgggaaagcaggaacgagcgagagcgtgcggtcccgtacctgcgcgtgcctgcgtgcgcgtccgtgcggccgcgacgccgccgccggtgcctctctttctagacgtgcgcgcgcccgcagctcgcccccctgaccgtaaagaggcccggctgtgtcgtgaaaggggccgcaacgcgcagagcgctggttgacggccgggactccattttgttcgccgttactctgcgcacatcgctattgcggttccgaggcagtgggaagagatgcggcccctggacatcgtcgagctggcggaaccggaggaagtggaggtgctggagcccgaggaggatttcgagcagtttctgctcccggtcatcaacgagatgcgcgaggacatcgcgtcgctgacgcgcgagcacgggcgggcgtacctgcggaaccggagcaagctgtgggagatggacaatatgctcatccagatcaaaacgcaggtggaggcctcggaggagagcgccctcaaccacctccagaacccgggcgacgcggccgagggccgggcggccaagaggtgcgagaaggccgaggagaaggccaaggagattgcgaagatggcagagatgctggtggagctggtccggcggatagagaagagcgagtcgtcgtgagcgcggtcggcggtttccagccaatggattctggtcaactggtggagattggctgacaccctggagaagccgaaaccagagagccttttgttttctcttttttcctgtctatgctctgtctcacttaacactacgttttctgctatggtctgtggttgatgacctcaatatgagtttcgattgttaacgtgtttttgtttgggaagtaattttgtttgaaaatgctctcacatacaggaattagggcctagattgtaagctcttgcagcagtcacatttgttcccgggctttggtggttatttctaaatttttgaggtgctttgctatttcttgtgtgacctgatagctccctggaactttgggtctgtgtgtgacacatgagactcacagttggagttctccagctctggaggtgctgaaggagctgcattaattctggaagacgactccatgcagcaactactgaagaaaggaccagacttcaacggggagtgtggatgggccgacctggctgggactcgtgaatctggagaagagctggagaatggatagtattgtctgtatttggagactttaatttctgtgtgagaccaaaggaggagagatgtgttttgttcaaaatttaaatttgttgtggtacactatcttatgtaacctgtctggtgagtttgtttggacaacctaactcagctttatttgacatggaacctaaaatagaagataagatcttgatattctgtacaagttgatgtaataccctgatgcgttttagaggacttggcataaaatgaaagattggcaaaggcccttgaggggcttggggatgacagtatggaactgtctgcattggaccctaaactggactagaagaggcatcttcaaggttcatacgttgtccagctgtaagttcatttgagtagcagacctaacaaatatttgaggtcagaaccctaccatgttaaaacaaacaaaaacttaccatgttaataaaagtattcatttgcttgaaaa

SEQ ID NO: 228224 - DNA, 384 bp, Artificial Sequence
  derived and/or modified sequence
atgagacccctggacatcgtggagctggccgagcccgaggaggtggaggtgctggagcccgaggaggacttcgagcagttcctgctgcccgtgatcaacgagatgagagaggacatcgccagcctgaccagagagcacggcagagcctacctgagaaacagaagcaagctgtgggagatggacaacatgctgatccagatcaagacccaggtggaggccagcgaggagagcgccctgaaccacctgcagaaccccggcgacgccgccgagggcagagccgccaagagatgcgagaaggccgaggagaaggccaaggagatcgccaagatggccgagatgctggtggagctggtgagaagaatcgagaagagcgagagcagctag

SEQ ID NO: 228225 - protein, 429 aa, Artificial Sequence
  derived and/or modified sequence
MVFLSGNASDSSNCTQPPAPVNISKAILLGVILGGLILFGVLGNILVILSVACHRHLHSVTHYYIVNLAVADLLLTSTVLPFSAIFEVLGYWAFGRVFCNIWAAVDVLCCTASIMGLCIISIDRYIGVSYPLRYPTIVTQRRGLMALLCVWALSLVISIGPLFGWRQPAPEDETICQINEEPGYVLFSALGSFYLPLAIILVMYCRVYVVAKRESRGLKSGLKTDKSDSEQVTLRIHRKNAPAGGSGMASAKTKTHFSVRLLKFSREKKAAKTLGIVVGCFVLCWLPFFLVMPIGSFFPDFKPSETVFKIVFWLGYLNSCINPIIYPCSSQEFKKAFQNVLRIQCLCRKQSSKHALGYTLHPPSQAVEGQHKDMVRIPVGSRETFYRISKTDGVCEWKFFSSMPRGSARITVSKDQSSCTTARGHTPMT

SEQ ID NO: 228226 - DNA, 1290 bp, Artificial Sequence
  derived and/or modified sequence
atggtgtttctatcaggcaatgcctccgatagcagtaattgtactcagccacctgctcctgtgaatataagcaaggccatcctgctgggcgtgatccttggtggcttgatactgttcggggtcttaggaaatatcctcgtgatcctgtctgtggcgtgccaccggcatcttcacagcgtaacacattattatatcgtcaatcttgcagttgctgatcttctgttgaccagcaccgtgctacccttctccgccattttcgaggtgttgggctattgggccttcgggagggtattttgtaatatctgggcggctgtggacgtgctatgctgcaccgctagtatcatgggactctgtataatatccatcgatagatacattggagtcagttatccgctgagataccctaccatcgtgacacagaggaggggactgatggcattactttgcgtatgggccctgagtttagtgatcagcatcggcccgctattcggttggagacagcccgctccagaggacgagacaatctgtcagattaatgaggaaccaggctacgtgctgttctccgcactcggtagtttctacttacccctcgccatcattctagtgatgtactgccgcgtatacgtcgtggccaaacgcgagtcgaggggcctcaagagcgggcttaaaactgacaaatctgacagcgagcaagttaccctccgcatccaccggaagaacgccccagctgggggctctggaatggccagcgccaaaaccaagacacatttttccgttcgtctgttgaaattctcacgggaaaaaaaggcagccaaaaccctgggcattgtcgttggctgctttgtcctttgctggctgccattctttcttgtgatgcccatcggttccttttttcccgactttaagccaagcgaaacggtgttcaagattgtgttttggcttggatatctgaactcttgcattaaccccattatatacccatgctccagccaggaattcaagaaggcattccagaacgtgctgcgtatccagtgcttatgccggaaacagagttctaaacatgccctggggtacacgttgcacccgccctcgcaggccgtggaaggacagcataaagacatggtccgtatacctgtgggtagccgtgagactttctaccgaataagtaagactgatggtgtatgtgagtggaagtttttctcttccatgccaagagggagcgcacggattactgttagtaaagaccagtcatcgtgtacaaccgcaagaggtcacactcccatgacttag

SEQ ID NO: 228227 - DNA, 1284 bp, Artificial Sequence
  derived and/or modified sequence
atggtgttcctgtccggaaatgccagcgattcatccaattgtacccagcccccagcccccgtaaacatctcgaaggctatcttgctcggggtcatccttggaggcctaattttgttcggggtcttgggcaatatccttgtgattctgtctgtggcttgtcacaggcacctgcactcagtgacgcactattacatcgtgaatctcgccgtggccgatctgcttcttaccagcaccgtgctgcctttttctgccatcttcgaggtacttggctactgggcgttcgggagagtcttctgcaacatctgggccgcagtcgacgtactttgttgtactgccagcataatgggattatgcatcatttccattgacaggtatattggagtatcctacccccttcggtacccaacgattgtaacgcaacgccgcggtcttatggccctgttgtgcgtgtgggccctgtccctggtgattagcataggccctctctttgggtggcgccaaccagccccagaggatgaaaccatatgtcaaataaacgaagagcctgggtacgttctcttctcagccctaggcagtttctatcttcccctggctatcattttagtgatgtattgtagagtgtatgtggtggccaagagagagtctcgaggactgaagagcggcctcaagaccgacaagtccgactcagagcaggtaacccttaggatccacagaaaaaacgccccagctggcggatccggtatggcaagcgccaagaccaagacacacttttcagtccgactcttgaagttcagtcgcgagaaaaaggcagcaaagacactgggaatcgtggtggggtgcttcgtactgtgctggcttcctttcttcctcgtcatgccaatcggcagtttttttcctgattttaagccctccgaaactgtcttcaagatcgtgttctggctggggtacctcaacagctgtataaatccaataatttatccatgctccagccaggagttcaagaaggccttccagaatgttcttagaatacaatgtctgtgtcggaagcagtccagtaaacatgccctgggctacaccttgcatcccccaagccaggctgtcgagggccaacacaaagatatggtgcgtatccccgtgggcagccgggaaactttttaccgaattagcaagacagacggtgtgtgtgagtggaagtttttttcatccatgccacgtggttctgcgcgcatcaccgtgtctaaagaccagtcttcatgcacaaccgcccggtcgtccggtttctag

SEQ ID NO: 228228 - DNA, 2089 bp, Artificial Sequence
  derived and/or modified sequence
gaattccgaatcatgtgcagaatgctgaatcttcccccagccaggacgaataagacagcgcggaaaagcagattctcgtaattctggaattgcatgttgcaaggagtctcctggatcttcgcacccagcttcgggtagggagggagtccgggtcccgggctaggccagcccggcaggtggagagggtccccggcagccccgcgcgcccctggccatgtctttaatgccctgccccttcatgtggccttctgagggttcccagggctggccagggttgtttcccacccgcgcgcgcgctctcacccccagccaaacccacctggcagggctccctccagccgagaccttttgattcccggctcccgcgctcccgcctccgcgccagcccgggaggtggccctggacagccggacctcgcccggccccggctgggaccatggtgtttctctcgggaaatgcttccgacagctccaactgcacccaaccgccggcaccggtgaacatttccaaggccattctgctcggggtgatcttggggggcctcattcttttcggggtgctgggtaacatcctagtgatcctctccgtagcctgtcaccgacacctgcactcagtcacgcactactacatcgtcaacctggcggtggccgacctcctgctcacctccacggtgctgcccttctccgccatcttcgaggtcctaggctactgggccttcggcagggtcttctgcaacatctgggcggcagtggatgtgctgtgctgcaccgcgtccatcatgggcctctgcatcatctccatcgaccgctacatcggcgtgagctacccgctgcgctacccaaccatcgtcacccagaggaggggtctcatggctctgctctgcgtctgggcactctccctggtcatatccattggacccctgttcggctggaggcagccggcccccgaggacgagaccatctgccagatcaacgaggagccgggctacgtgctcttctcagcgctgggctccttctacctgcctctggccatcatcctggtcatgtactgccgcgtctacgtggtggccaagagggagagccggggcctcaagtctggcctcaagaccgacaagtcggactcggagcaagtgacgctccgcatccatcggaaaaacgccccggcaggaggcagcgggatggccagcgccaagaccaagacgcacttctcagtgaggctcctcaagttctcccgggagaagaaagcggccaaaacgctgggcatcgtggtcggctgcttcgtcctctgctggctgccttttttcttagtcatgcccattgggtctttcttccctgatttcaagccctctgaaacagtttttaaaatagtattttggctcggatatctaaacagctgcatcaaccccatcatatacccatgctccagccaagagttcaaaaaggcctttcagaatgtcttgagaatccagtgtctctgcagaaagcagtcttccaaacatgccctgggctacaccctgcacccgcccagccaggccgtggaagggcaacacaaggacatggtgcgcatccccgtgggatcaagagagaccttctacaggatctccaagacggatggcgtttgtgaatggaaatttttctcttccatgccccgtggatctgccaggattacagtgtccaaagaccaatcctcctgtaccacagcccggggacacacacccatgacatgaagccagcttcccgtccacgactgttgtccttactgcccaaggaaggggagcatgaaacccaccactggtcctgcgacccactgtctttggaatccaccccaggagcccaggagccttgcctgacacttggatttacttctttatcaagcatccatctgactaaggcacaaatccaacatgttactgttactgatacaggaaaaacagtaacttaaggaatgatcatgaatgcaaagggaaagaggaaaagagccttcagggacaaatagctcgattttttgtaaatcagtttcatacaacctccctcccccatttcattcttaaaagttaattgagaatcatcagccacgtgtagggtgtgag

SEQ ID NO: 228229 - DNA, 1290 bp, Artificial Sequence
  derived and/or modified sequence
atggtgttcctgtctggaaatgccagtgacagcagcaactgcacccagcccccagcccctgtgaacatcagcaaggccatcctgctgggcgtcatcctgggcggcctcatcctgtttggagtgctgggcaacatcctggtgatcctgtctgtggcctgccaccgccacctgcacagcgtgacccactactacatcgtgaacctggccgtggccgacctgctgctgaccagcacagtgctgcccttcagcgccatctttgaggtgctgggctactgggccttcggccgggtcttctgcaacatctgggccgctgtggatgtgctgtgctgcacagccagcatcatgggcctgtgcatcatcagcattgaccgctacatcggcgtgtcctaccccctgcgctaccccaccatcgtgacccagaggcggggcctgatggccctgctgtgtgtgtgggccctgagcctggtgatcagcatcggccccctgtttggctggaggcagcctgccccagaagatgagaccatctgccagatcaatgaggagcccggctacgtgctcttcagcgccctgggcagcttctacctgcccctggccatcatcctggtgatgtactgccgggtgtatgtggtggccaagcgggagagccggggcctgaagagcggcctgaagacagacaagagtgacagcgagcaggtgaccctgcgcatccacaggaagaatgccccagctgggggcagcggcatggccagcgccaagaccaagacccacttctctgtgcggctgctgaagttcagccgggagaagaaggccgccaagaccctgggcatcgtggtgggctgctttgtgctgtgctggctgcccttcttcctggtgatgcccatcggcagcttcttcccagacttcaagcccagcgagaccgtcttcaagatcgtgttctggctgggctacctgaacagctgcatcaaccccatcatctacccctgcagcagccaggagttcaagaaggccttccagaatgtgctgcgcatccagtgcctgtgcaggaagcagagcagcaagcacgccctgggctacaccctgcacccccccagccaggccgtggagggccagcacaaggacatggtgcgcatccctgtgggcagccgggagaccttctaccgcatcagcaagacagatggagtgtgtgagtggaagttcttcagctccatgccccggggcagcgcccgcatcaccgtgtccaaggaccagagcagctgcaccacagcccggggccacacccccatgacctag

SEQ ID NO: 228230 - DNA, 1284 bp, Artificial Sequence
  derived and/or modified sequence
atggtgttcctgtctggaaatgccagtgacagcagcaactgcacccagcccccagcccctgtgaacatcagcaaggccatcctgctgggcgtcatcctgggcggcctcatcctgtttggagtgctgggcaacatcctggtgatcctgtctgtggcctgccaccgccacctgcacagcgtgacccactactacatcgtgaacctggccgtggccgacctgctgctgaccagcacagtgctgcccttcagcgccatctttgaggtgctgggctactgggccttcggccgggtcttctgcaacatctgggccgctgtggatgtgctgtgctgcacagccagcatcatgggcctgtgcatcatcagcattgaccgctacatcggcgtgtcctaccccctgcgctaccccaccatcgtgacccagaggcggggcctgatggccctgctgtgtgtgtgggccctgagcctggtgatcagcatcggccccctgtttggctggaggcagcctgccccagaagatgagaccatctgccagatcaatgaggagcccggctacgtgctcttcagcgccctgggcagcttctacctgcccctggccatcatcctggtgatgtactgccgggtgtatgtggtggccaagcgggagagccggggcctgaagagcggcctgaagacagacaagagtgacagcgagcaggtgaccctgcgcatccacaggaagaatgccccagctgggggcagcggcatggccagcgccaagaccaagacccacttctctgtgcggctgctgaagttcagccgggagaagaaggccgccaagaccctgggcatcgtggtgggctgctttgtgctgtgctggctgcccttcttcctggtgatgcccatcggcagcttcttcccagacttcaagcccagcgagaccgtcttcaagatcgtgttctggctgggctacctgaacagctgcatcaaccccatcatctacccctgcagcagccaggagttcaagaaggccttccagaatgtgctgcgcatccagtgcctgtgcaggaagcagagcagcaagcacgccctgggctacaccctgcacccccccagccaggccgtggagggccagcacaaggacatggtgcgcatccctgtgggcagccgggagaccttctaccgcatcagcaagacagatggagtgtgtgagtggaagttcttcagctccatgccccggggcagcgcccgcatcaccgtgtccaaggaccagagcagctgcaccacagcccggagcagcggcttctag

SEQ ID NO: 228231 - DNA, 1290 bp, Artificial Sequence
  derived and/or modified sequence
atggtgttcctgagcggcaacgccagcgacagcagcaactgcacccagcctccagcacctgtaaacatcagcaaagccatcctgctcggagtgattctagggggtttaatcctctttggagttcttggcaatatattagtgatcctctccgtagcatgccatcgacacttgcacagcgtgacgcactattacatcgtcaacttggctgtggccgatctgctcctcactagcaccgtgctgcccttttccgctatcttcgaggtgctggggtactgggctttcggccgagtattttgtaacatttgggctgcggtggacgtactttgctgtaccgcttcaatcatggggctgtgcataattagcatcgatcgttatatcggtgttagctatcccctccggtatccaactatcgtgacccagcggcggggcctcatggcactgctctgtgtctgggccctgagcctggttatctctattggaccactgttcggctggagacagccagcccccgaagatgagaccatatgtcagatcaatgaggaacccggctatgttctcttcagcgctctgggctccttctacctacccctggccattattctggtaatgtactgtcgggtgtacgtggtagctaagcgagagtccagagggctcaaaagcggtctcaagaccgacaagagtgactcagagcaggtgacactgaggatccatcgcaagaatgccccagctggcggaagcggcatggcctctgctaagactaagacccacttttcagtgcgcttgctgaagttttctcgcgagaaaaaggcggccaaaaccctcggtattgtagtgggatgttttgtcttgtgctggttgcccttttttctggtgatgcccatcggctccttcttccccgactttaagccatcagaaactgtgttcaagattgtgttctggctgggttatctgaactcttgtatcaaccctattatctacccctgttcctcacaggaatttaagaaagcctttcagaatgtactgcgcattcaatgcctgtgtcggaaacaatcttccaagcacgccctcggttacactctccaccccccgtcccaagcagtagagggtcagcacaaagatatggtgaggatccccgtgggatccagagaaaccttctaccgcatttccaaaacggatggcgtatgtgagtggaagtttttctcctcaatgcctcggggttcagctagaatcacagtcagtaaggaccagagttcatgcactaccgcccgagggcacacacccatgacctag

SEQ ID NO: 228232 - DNA, 1284 bp, Artificial Sequence
  derived and/or modified sequence
atggtgttcctgagcggcaacgccagcgacagcagcaactgcacccagcctccggcccctgttaatatttcaaaagccatactgctaggagtgatactaggaggtcttatcctgtttggcgtgctggggaacatcctcgtcatcctgtccgtcgcttgtcatcggcacctccactctgttacccactattacatagtgaatttggccgtcgcggacctcctgctcacatctacagtcctcccttttagtgcaatcttcgaggtgttggggtattgggccttcggcagggtcttctgcaacatctgggccgctgtagacgttctttgttgcactgctagcattatgggcctttgcattataagcattgacaggtacattggggttagctatccgctgcgctacccaactatcgtgactcagcgccgcgggctgatggccctgctctgtgtctgggcattgagtctggtgatctcgatcggacccctgttcgggtggcgtcagccagcacctgaagacgagactatttgtcagattaacgaagagcccgggtatgtgttgttctcagccctcggctccttttacctgcctctcgccataatcctggtcatgtattgtagagtgtatgtggtagctaagagagagagcaggggactgaagagcggtcttaagactgacaagtccgatagtgaacaagtgacacttaggatacatcgcaagaatgccccagctggtggttctggaatggcctcagcaaagactaaaacccattttagtgtccgactactcaagttctctagagagaaaaaggctgctaaaactctcggcattgttgtgggctgctttgtgttgtgttggctcccattcttcttggttatgcctataggatcattcttccctgactttaaaccttccgagaccgtgtttaaaattgtgttttggcttggctaccttaactcctgtatcaatcccatcatctacccttgttcatcacaggagtttaagaaagcgtttcaaaacgtgttaagaattcagtgtttatgtcggaagcaatcatcaaagcatgctttgggctatactctgcatccaccatcacaggccgtggaaggccagcataaggacatggtgcgcataccggtcggtagccgagagacgttctaccgaattagtaagaccgacggagtctgcgagtggaagttctttagttccatgccacggggcagcgcaaggatcactgtctctaaggaccaaagtagctgcacgacagctcggtcctcagggttttag

SEQ ID NO: 228233 - DNA, 1290 bp, Artificial Sequence
  derived and/or modified sequence
atggtgttcctgtccgggaacgctagtgacagcagtaactgcacccagccacccgctccagtcaatatctctaaggccatcctattgggtgtgattctaggcggtttgattctttttggtgtgctcggtaatatcctcgtgatattgtccgttgcctgccataggcacttgcactctgtaacccactactatattgtgaatctggccgtcgccgatctcctgctgaccagcactgttctgccctttagcgctatctttgaggtgctgggatattgggctttcggacgtgttttttgtaatatctgggcggctgtggacgtcctttgttgtacagcctccataatgggactatgcattatttctatagatagatatatcggagtatcgtatcctctgagataccctacaatcgtgacacagagacgcggactgatggcactactgtgtgtgtgggctctgtcactcgttatttccattggcccactgttcggatggcgccagcctgctcctgaggacgagactatatgtcagattaatgaggagccaggctatgttctctttagtgcattggggagtttttatctgccgctcgccataattctggttatgtactgccgagtttatgtggttgcaaaaagagaatccagaggcttgaaatcaggtctaaagacagataagagcgacagcgaacaggtcacactgagaatccataggaagaatgctccagcaggaggtagtggaatggcgagtgctaagactaagacccactttagcgtgcgtctcctcaagttctcaagagagaaaaaggccgcaaaaacactgggcattgtagtaggatgcttcgtcctgtgctggctaccctttttcctagtgatgcctataggcagctttttccctgacttcaagccttctgagacagtatttaaaatcgtgttctggttgggatatctgaattcatgtatcaaccccatcatatatccatgcagcagccaagaattcaagaaagccttccagaacgtcctgcgcattcagtgtctatgccgtaagcaatccagcaaacacgccctcggctacacattacatccaccgagtcaggcggtggagggtcagcataaagacatggttagaatacctgtgggcagtcgggaaaccttttataggatctctaagacggacggcgtctgcgagtggaagtttttttcctccatgccaagagggtcagccagaatcaccgtgtccaaggaccagtccagctgtacaaccgcaaggggtcacacacccatgacttag

SEQ ID NO: 228234 - DNA, 1284 bp, Artificial Sequence
  derived and/or modified sequence
atggtatttttgtcaggaaacgcatcagatagttctaattgtacccagccacctgctcctgtgaacatctctaaggccatcctcctcggtgtgatactgggcggtttgatacttttcggcgtcctggggaatatcctagtgattctgtccgtggcctgtcatagacacttacattcagtaacgcattactacatcgtaaacctggctgtggctgacctcctgctgacgtccaccgtccttccatttagtgcgattttcgaggtgttagggtattgggcttttggtagagttttttgcaatatttgggcggctgtggacgtcctgtgctgtaccgcatcaatcatgggtctctgcataatcagcattgatcgctatatcggagtgagttaccccctccgctaccccacgatcgttacacagagaaggggactgatggcgctgctctgtgtgtgggctctttctcttgtaatttcaatcgggccattattcggatggcggcagcccgcacccgaagacgaaaccatctgtcaaatcaacgaagaaccaggctacgtactttttagtgccttgggaagcttttacttacctcttgcgatcatactcgtgatgtactgtcgggtgtatgttgtagccaagcgcgagtcgcgaggattgaaatcaggattgaaaacagacaagagcgattcggagcaggttaccctgagaatccatagaaagaacgcccctgccggaggatccggcatggcctcagccaaaacgaagacacatttctccgttaggctcttgaaattctcaagagagaagaaggcagcaaagacactgggaattgtggtaggctgtttcgtgttgtgttggctgcctttctttctggtgatgcctattggaagcttctttcccgactttaaacccagcgaaaccgtcttcaagatcgttttttggctagggtatctgaatagctgcattaatcccattatttatccatgctcgtcccaggagtttaagaaggcctttcagaatgtgttgcgcatccagtgcctgtgcagaaaacagtcctcgaagcacgctctgggttataccctccatcctccatctcaggctgtcgaaggacaacacaaagatatggtacgaatccctgtgggttctagagaaacattctaccgaatctcaaagactgacggggtatgtgagtggaagtttttctcttcaatgccgcgagggagcgctaggatcaccgtttctaaggaccagagcagctgcacaaccgccagatcctcaggattctag

SEQ ID NO: 228235 - DNA, 1290 bp, Artificial Sequence
  derived and/or modified sequence
atggtgttcctgagcggcaacgccagcgacagcagcaactgcacccagccccccgcccccgtgaacatcagcaaggccatcctgctgggcgtgatcctgggcggcctgatcctgttcggcgtgctgggcaacatcctggtgatcctgagcgtggcctgccacagacacctgcacagcgtgacccactactacatcgtgaacctggccgtggccgacctgctgctgaccagcaccgtgctgcccttcagcgccatcttcgaggtgctgggctactgggccttcggcagagtgttctgcaacatctgggccgccgtggacgtgctgtgctgcaccgccagcatcatgggcctgtgcatcatcagcatcgacagatacatcggcgtgagctaccccctgagataccccaccatcgtgacccagagaagaggcctgatggccctgctgtgcgtgtgggccctgagcctggtgatcagcatcggccccctgttcggctggagacagcccgcccccgaggacgagaccatctgccagatcaacgaggagcccggctacgtgctgttcagcgccctgggcagcttctacctgcccctggccatcatcctggtgatgtactgcagagtgtacgtggtggccaagagagagagcagaggcctgaagagcggcctgaagaccgacaagagcgacagcgagcaggtgaccctgagaatccacagaaagaacgcccccgccggcggcagcggcatggccagcgccaagaccaagacccacttcagcgtgagactgctgaagttcagcagagagaagaaggccgccaagaccctgggcatcgtggtgggctgcttcgtgctgtgctggctgcccttcttcctggtgatgcccatcggcagcttcttccccgacttcaagcccagcgagaccgtgttcaagatcgtgttctggctgggctacctgaacagctgcatcaaccccatcatctacccctgcagcagccaggagttcaagaaggccttccagaacgtgctgagaatccagtgcctgtgcagaaagcagagcagcaagcacgccctgggctacaccctgcacccccccagccaggccgtggagggccagcacaaggacatggtgagaatccccgtgggcagcagagagaccttctacagaatcagcaagaccgacggcgtgtgcgagtggaagttcttcagcagcatgcccagaggcagcgccagaatcaccgtgagcaaggaccagagcagctgcaccaccgccagaggccacacccccatgacctag

SEQ ID NO: 228236 - DNA, 1284 bp, Artificial Sequence
  derived and/or modified sequence
atggtgttcctgagcggcaacgccagcgacagcagcaactgcacccagccccccgcccccgtgaacatcagcaaggccatcctgctgggcgtgatcctgggcggcctgatcctgttcggcgtgctgggcaacatcctggtgatcctgagcgtggcctgccacagacacctgcacagcgtgacccactactacatcgtgaacctggccgtggccgacctgctgctgaccagcaccgtgctgcccttcagcgccatcttcgaggtgctgggctactgggccttcggcagagtgttctgcaacatctgggccgccgtggacgtgctgtgctgcaccgccagcatcatgggcctgtgcatcatcagcatcgacagatacatcggcgtgagctaccccctgagataccccaccatcgtgacccagagaagaggcctgatggccctgctgtgcgtgtgggccctgagcctggtgatcagcatcggccccctgttcggctggagacagcccgcccccgaggacgagaccatctgccagatcaacgaggagcccggctacgtgctgttcagcgccctgggcagcttctacctgcccctggccatcatcctggtgatgtactgcagagtgtacgtggtggccaagagagagagcagaggcctgaagagcggcctgaagaccgacaagagcgacagcgagcaggtgaccctgagaatccacagaaagaacgcccccgccggcggcagcggcatggccagcgccaagaccaagacccacttcagcgtgagactgctgaagttcagcagagagaagaaggccgccaagaccctgggcatcgtggtgggctgcttcgtgctgtgctggctgcccttcttcctggtgatgcccatcggcagcttcttccccgacttcaagcccagcgagaccgtgttcaagatcgtgttctggctgggctacctgaacagctgcatcaaccccatcatctacccctgcagcagccaggagttcaagaaggccttccagaacgtgctgagaatccagtgcctgtgcagaaagcagagcagcaagcacgccctgggctacaccctgcacccccccagccaggccgtggagggccagcacaaggacatggtgagaatccccgtgggcagcagagagaccttctacagaatcagcaagaccgacggcgtgtgcgagtggaagttcttcagcagcatgcccagaggcagcgccagaatcaccgtgagcaaggaccagagcagctgcaccaccgccagaagcagcggcttctag

SEQ ID NO: 228237 - protein, 372 aa, Artificial Sequence
  derived and/or modified sequence
MVFLSGNASDSSNCTQPPAPVNISKAILLGVILGGLILFGVLGNILVILSVACHRHLHSVTHYYIVNLAVADLLLTSTVLPFSAIFEVLGYWAFGRVFCNIWAAVDVLCCTASIMGLCIISIDRYIGVSYPLRYPTIVTQRRGLMALLCVWALSLVISIGPLFGWRQPAPEDETICQINEEPGYVLFSALGSFYLPLAIILVMYCRVYVVAKRESRGLKSGLKTDKSDSEQVTLRIHRKNAPAGGSGMASAKTKTHFSVRLLKFSREKKAAKTLGIVVGCFVLCWLPFFLVMPIGTHTHDMKPASRPRLLSLLPKEGEHETHHWSCDPLSLESTPGAQEPCLTLGFTSLSSIHLTKAQIQHVTVTDTGKTVT

SEQ ID NO: 228238 - protein, 475 aa, Artificial Sequence
  derived and/or modified sequence
MVFLSGNASDSSNCTQPPAPVNISKAILLGVILGGLILFGVLGNILVILSVACHRHLHSVTHYYIVNLAVADLLLTSTVLPFSAIFEVLGYWAFGRVFCNIWAAVDVLCCTASIMGLCIISIDRYIGVSYPLRYPTIVTQRRGLMALLCVWALSLVISIGPLFGWRQPAPEDETICQINEEPGYVLFSALGSFYLPLAIILVMYCRVYVVAKRESRGLKSGLKTDKSDSEQVTLRIHRKNAPAGGSGMASAKTKTHFSVRLLKFSREKKAAKTLGIVVGCFVLCWLPFFLVMPIGSFFPDFKPSETVFKIVFWLGYLNSCINPIIYPCSSQEFKKAFQNVLRIQCLCRKQSSKHALGYTLHPPSQAVEGQHKDMVRIPVGSRETFYRISKTDGVCEWKFFSSMPRGSARITVSKDQSSCTTARTKSRSVTRLECSGMILAHCNLRLPGSRDSPASASQAAGTTGMCHQADATRPS

SEQ ID NO: 228239 - protein, 427 aa, Artificial Sequence
  derived and/or modified sequence
MVFLSGNASDSSNCTQPPAPVNISKAILLGVILGGLILFGVLGNILVILSVACHRHLHSVTHYYIVNLAVADLLLTSTVLPFSAIFEVLGYWAFGRVFCNIWAAVDVLCCTASIMGLCIISIDRYIGVSYPLRYPTIVTQRRGLMALLCVWALSLVISIGPLFGWRQPAPEDETICQINEEPGYVLFSALGSFYLPLAIILVMYCRVYVVAKRESRGLKSGLKTDKSDSEQVTLRIHRKNAPAGGSGMASAKTKTHFSVRLLKFSREKKAAKTLGIVVGCFVLCWLPFFLVMPIGSFFPDFKPSETVFKIVFWLGYLNSCINPIIYPCSSQEFKKAFQNVLRIQCLCRKQSSKHALGYTLHPPSQAVEGQHKDMVRIPVGSRETFYRISKTDGVCEWKFFSSMPRGSARITVSKDQSSCTTARSSGF

SEQ ID NO: 228240 - DNA, 1428 bp, Artificial Sequence
  derived and/or modified sequence
atggtgttcctgtccgggaatgccagtgattcatcaaattgcacgcaacctccagcaccagtgaacatcagtaaagctatcctcttgggcgtgatcctgggcggattaatcttgttcggtgtactagggaatatcctagtgatactgagcgtggcatgccacaggcaccttcattctgtgactcattattatatcgtgaaccttgctgtggctgacctgctgctgacgagcacagttctccctttctcagcgattttcgaggtcctgggctactgggccttcggacgcgtcttttgcaatatctgggcagccgtggacgtgctatgttgcacagctagcattatgggcctgtgcattatatccattgaccggtacatcggggtgagttatcctctgcgttaccccacaatcgtaactcagagacgcggacttatggcactgctgtgtgtatgggctcttagcctcgttatctcaatcggtccactattcggctggcggcagccagctccagaggacgagacaatttgccaaattaatgaggagcccggctacgtactgtttagcgccttgggtagcttctatcttcctctcgccattattctggtgatgtactgtcgggtttacgtggtcgccaagcgagaatcacggggcctcaaaagtggactgaaaactgacaagtctgatagtgagcaggtcactcttcgcattcataggaagaatgcccccgccggcggttcggggatggcttccgccaagacgaagacacatttctccgtaaggctactcaagttctcgcgagagaagaaggccgccaagacactcggcatcgtggtagggtgctttgttctgtgctggctgcctttttttctggtaatgcccattggatcatttttccccgacttcaagccatccgagaccgtgtttaagattgttttttggctgggctatctgaacagctgcattaaccctataatctacccctgtagtagccaggagtttaaaaaagccttccagaacgtactgcggatccagtgcctgtgcaggaagcagtcttccaaacatgccctgggttatactctgcacccccctagccaagcagtggaggggcagcataaagacatggttaggatccctgtcggctctcgggaaacgttctatcgaatcagcaaaacagacggcgtgtgcgaatggaaattctttagttccatgccaaggggatctgcacgaattactgtttctaaagaccagtccagctgcaccactgctcggaccaaatccaggagcgttacacgcttagagtgcagtggaatgattctagcgcactgcaacttacggctccctgggtccagggattcacccgccagcgcctctcaggcggctggcaccacaggtatgtgtcaccaggccgatgcaacaaggccgtcctag

SEQ ID NO: 228241 - DNA, 2304 bp, Artificial Sequence
  derived and/or modified sequence
gaattccgaatcatgtgcagaatgctgaatcttcccccagccaggacgaataagacagcgcggaaaagcagattctcgtaattctggaattgcatgttgcaaggagtctcctggatcttcgcacccagcttcgggtagggagggagtccgggtcccgggctaggccagcccggcaggtggagagggtccccggcagccccgcgcgcccctggccatgtctttaatgccctgccccttcatgtggccttctgagggttcccagggctggccagggttgtttcccacccgcgcgcgcgctctcacccccagccaaacccacctggcagggctccctccagccgagaccttttgattcccggctcccgcgctcccgcctccgcgccagcccgggaggtggccctggacagccggacctcgcccggccccggctgggaccatggtgtttctctcgggaaatgcttccgacagctccaactgcacccaaccgccggcaccggtgaacatttccaaggccattctgctcggggtgatcttggggggcctcattcttttcggggtgctgggtaacatcctagtgatcctctccgtagcctgtcaccgacacctgcactcagtcacgcactactacatcgtcaacctggcggtggccgacctcctgctcacctccacggtgctgcccttctccgccatcttcgaggtcctaggctactgggccttcggcagggtcttctgcaacatctgggcggcagtggatgtgctgtgctgcaccgcgtccatcatgggcctctgcatcatctccatcgaccgctacatcggcgtgagctacccgctgcgctacccaaccatcgtcacccagaggaggggtctcatggctctgctctgcgtctgggcactctccctggtcatatccattggacccctgttcggctggaggcagccggcccccgaggacgagaccatctgccagatcaacgaggagccgggctacgtgctcttctcagcgctgggctccttctacctgcctctggccatcatcctggtcatgtactgccgcgtctacgtggtggccaagagggagagccggggcctcaagtctggcctcaagaccgacaagtcggactcggagcaagtgacgctccgcatccatcggaaaaacgccccggcaggaggcagcgggatggccagcgccaagaccaagacgcacttctcagtgaggctcctcaagttctcccgggagaagaaagcggccaaaacgctgggcatcgtggtcggctgcttcgtcctctgctggctgccttttttcttagtcatgcccattgggtctttcttccctgatttcaagccctctgaaacagtttttaaaatagtattttggctcggatatctaaacagctgcatcaaccccatcatatacccatgctccagccaagagttcaaaaaggcctttcagaatgtcttgagaatccagtgtctctgcagaaagcagtcttccaaacatgccctgggctacaccctgcacccgcccagccaggccgtggaagggcaacacaaggacatggtgcgcatccccgtgggatcaagagagaccttctacaggatctccaagacggatggcgtttgtgaatggaaatttttctcttccatgccccgtggatctgccaggattacagtgtccaaagaccaatcctcctgtaccacagcccggacgaagtctcgctctgtcaccaggctggagtgcagtggcatgatcttggctcactgcaacctccgcctcccgggttcaagagattctcctgcctcagcctcccaagcagctgggactacagggatgtgccaccaggccgacgccaccaggcccagctaatttttgtatttttagtagagacggggtttcaccatgttggccaggatgatctcgatctcttgacctcatgatctgcctgcctcagcctcccaaagtgctgggattacaggcgtgagccaccgtgcccggcccaactattttttttttttatcttttttaacagtgcaatcctttctgtggatgaaatcttgctcagaagctcaatatgcaaaagaaagaaaaacagcagggctggacggatgttgggagtggggtaagaccccaaccactcagaaccacccccccaacacacacacacattctctccatggtgactggtgaggggcctctagagggtacatagtacaccatggagcacggtttaagcaccactggactacacattcttctgtggcagttatcttaccttcccatagacacccagcccatagccattggtt

SEQ ID NO: 228242 - DNA, 1838 bp, Artificial Sequence
  derived and/or modified sequence
tgggaccatggtgtttctctcgggaaatgcttccgacagctccaactgcacccaaccgccggcaccggtgaacatttccaaggccattctgctcggggtgatcttggggggcctcattcttttcggggtgctgggtaacatcctagtgatcctctccgtagcctgtcaccgacacctgcactcagtcacgcactactacatcgtcaacctggcggtggccgacctcctgctcacctccacggtgctgcccttctccgccatcttcgaggtcctaggctactgggccttcggcagggtcttctgcaacatctgggcggcagtggatgtgctgtgctgcaccgcgtccatcatgggcctctgcatcatctccatcgaccgctacatcggcgtgagctacccgctgcgctacccaaccatcgtcacccagaggaggggtctcatggctctgctctgcgtctgggcactctccctggtcatatccattggacccctgttcggctggaggcagccggcccccgaggacgagaccatctgccagatcaacgaggagccgggctacgtgctcttctcagcgctgggctccttctacctgcctctggccatcatcctggtcatgtactgccgcgtctacgtggtggccaagagggagagccggggcctcaagtctggcctcaagaccgacaagtcggactcggagcaagtgacgctccgcatccatcggaaaaacgccccggcaggaggcagcgggatggccagcgccaagaccaagacgcacttctcagtgaggctcctcaagttctcccgggagaagaaagcggccaaaacgctgggcatcgtggtcggctgcttcgtcctctgctggctgccttttttcttagtcatgcccattgggtctttcttccctgatttcaagccctctgaaacagtttttaaaatagtattttggctcggatatctaaacagctgcatcaaccccatcatatacccatgctccagccaagagttcaaaaaggcctttcagaatgtcttgagaatccagtgtctctgcagaaagcagtcttccaaacatgccctgggctacaccctgcacccgcccagccaggccgtggaagggcaacacaaggacatggtgcgcatccccgtgggatcaagagagaccttctacaggatctccaagacggatggcgtttgtgaatggaaatttttctcttccatgccccgtggatctgccaggattacagtgtccaaagaccaatcctcctgtaccacagcccggtcttctggattttgagaagcagctgcaaggatgaacggattggtgttggcccaaattaaaaagaagagtattcagttctttcagtgtttggagaaagaagaccaaaagcatcatctcacagggagcagaatgtgaccagcctggctaatgaggaaatgagagggatcctcaacttgagaacccgctctactgaagtctgaacttggaaaaatggacacattgggtttggagtaagaattcttactctacaaaaggataaaattgtgatcacattgatgcatgatgcctaggatattaaaaatgcatgattaattaaatgttagtctaccttgtgttttaaagggacacacacccatgacatgaagccagcttcccgtccacgactgttgtccttactgcccaaggaaggggagcatgaaacccaccactggtcctgcgacccactgtctttggaatccaccccaggagcccaggagccttgcctgacacttggatttacttctttatcaagcatccatctgactaaggcacaaatccaacatgttactgttactgatacagg

SEQ ID NO: 228243 - DNA, 1428 bp, Artificial Sequence
  derived and/or modified sequence
atggtgttcctgtctggaaatgccagtgacagcagcaactgcacccagcccccagcccctgtgaacatcagcaaggccatcctgctgggcgtcatcctgggcggcctcatcctgtttggagtgctgggcaacatcctggtgatcctgtctgtggcctgccaccgccacctgcacagcgtgacccactactacatcgtgaacctggccgtggccgacctgctgctgaccagcacagtgctgcccttcagcgccatctttgaggtgctgggctactgggccttcggccgggtcttctgcaacatctgggccgctgtggatgtgctgtgctgcacagccagcatcatgggcctgtgcatcatcagcattgaccgctacatcggcgtgtcctaccccctgcgctaccccaccatcgtgacccagaggcggggcctgatggccctgctgtgtgtgtgggccctgagcctggtgatcagcatcggccccctgtttggctggaggcagcctgccccagaagatgagaccatctgccagatcaatgaggagcccggctacgtgctcttcagcgccctgggcagcttctacctgcccctggccatcatcctggtgatgtactgccgggtgtatgtggtggccaagcgggagagccggggcctgaagagcggcctgaagacagacaagagtgacagcgagcaggtgaccctgcgcatccacaggaagaatgccccagctgggggcagcggcatggccagcgccaagaccaagacccacttctctgtgcggctgctgaagttcagccgggagaagaaggccgccaagaccctgggcatcgtggtgggctgctttgtgctgtgctggctgcccttcttcctggtgatgcccatcggcagcttcttcccagacttcaagcccagcgagaccgtcttcaagatcgtgttctggctgggctacctgaacagctgcatcaaccccatcatctacccctgcagcagccaggagttcaagaaggccttccagaatgtgctgcgcatccagtgcctgtgcaggaagcagagcagcaagcacgccctgggctacaccctgcacccccccagccaggccgtggagggccagcacaaggacatggtgcgcatccctgtgggcagccgggagaccttctaccgcatcagcaagacagatggagtgtgtgagtggaagttcttcagctccatgccccggggcagcgcccgcatcaccgtgtccaaggaccagagcagctgcaccacagcccggaccaagagccgctctgtgacccggctggagtgcagcggcatgatcctggcccactgcaacctgcggctgcccggcagccgggacagccctgccagcgccagccaggccgccggcaccaccggcatgtgccaccaggctgatgccacccggcccagctag

SEQ ID NO: 228244 - DNA, 1428 bp, Artificial Sequence
  derived and/or modified sequence
atggtgttcctgagcggcaacgccagcgacagcagcaactgcacccagccacccgcacccgtcaatatctccaaggcgatacttctgggagtaatactcggaggattaatcctgttcggcgtcctcgggaatatcctcgtaattcttagcgtcgcatgtcatcggcacctgcatagcgtgacgcactattacatcgtgaacttggctgtcgccgatcttctcctgacgagcactgttttgccgtttagtgccattttcgaagtgttggggtattgggcatttggccgcgtgttctgcaatatttgggcagcagtggatgtgctatgttgtaccgctagcatcatgggtctgtgcattatctctattgaccgatatattggggtgagttaccccctgcgatatccaacaattgtgacgcaacgcaggggcctcatggctttactgtgcgtctgggcactatcactcgtgatatctataggcccgctctttggctggcggcagcccgcccctgaagacgaaactatttgtcagattaatgaggagccaggatatgtgctgtttagtgccttaggcagcttctatttacccctggccatcatcctggtgatgtactgccgggtgtacgtggtagcaaaacgagagagcaggggcctgaaatccgggctgaagacggataaatctgactcagagcaggtcactttgcggattcatagaaagaatgcccccgccggtggaagcggcatggccagcgccaagaccaagactcacttctcagtgaggctgcttaagtttagccgggaaaagaaggccgccaaaaccctggggatagttgtgggttgctttgtactgtgctggctgccattctttctggtcatgcctatcggatccttcttccctgatttcaaaccaagcgagacagtgtttaagattgtcttttggctcggctacctgaacagctgtatcaaccccataatatacccctgttcttctcaagagttcaaaaaggcttttcagaatgtgcttcgtatccagtgcctatgtagaaagcagtctagtaaacacgctctcgggtatacactgcatccgccctctcaggctgtggaaggacagcacaaggacatggtccgtattcctgtgggctcccgggaaacattctatcggataagcaaaacggacggtgtctgcgaatggaagttcttttcaagcatgccacgaggttctgcgagaatcaccgtgagtaaggaccagtcttcctgcactacagcacgcacgaagtcacgctcagttacaagactggagtgttcgggaatgatcctggcgcattgtaatctgaggttacctgggtccagggactctcccgcttctgcttctcaagcggccggcaccacaggcatgtgccatcaggcagacgctacaaggcctagctag

SEQ ID NO: 228245 - DNA, 1428 bp, Artificial Sequence
  derived and/or modified sequence
atggtttttctctccggcaatgcctctgatagctccaattgcacacagccacccgctcctgtcaatattagcaaagctatactgttaggcgtcatcctgggaggcttgattttatttggggtccttgggaacatcctggtgattctgagtgtcgcatgccaccgccatctgcactctgtgacccactactacatcgtcaatctggctgtagctgatttattgctaacttcgaccgtactcccattttcagccattttcgaggtgctgggctattgggcgttcggcagggtcttctgcaatatctgggccgctgttgacgtgctctgctgcacggcgagcatcatgggcctgtgcatcattagtattgatcggtatatcggggtgtcatacccactgcgctatcctactatagttactcagcggaggggcctcatggcgctgctctgtgtgtgggcactgagcctggttattagcattggacctttattcggctggagacaaccggcaccggaagatgagacgatctgccaaatcaatgaggagccaggctacgtcctcttttccgctctggggtctttctatctgcctctggccattattctcgtgatgtactgccgtgtttacgttgtggctaagagagagagccgcggtttgaaatccggccttaaaaccgataaaagtgactctgagcaggtcacccttcgcatccatcgcaagaatgcaccagcaggaggtagcggcatggcctctgccaagaccaaaactcacttctctgtacggctgctgaaattcagtagggaaaagaaggctgcaaaaaccttaggaatagtcgtgggctgctttgtgttgtgttggctccccttttttctggtgatgccaatcggttcattctttcctgatttcaaaccctcagaaaccgtgttcaaaatcgtgttctggctgggatatctgaattcctgcatcaacccaattatctatccgtgttcttctcaagagtttaagaaggccttccagaacgttctacggattcagtgtttatgcagaaagcagagttcaaagcatgcactcgggtataccctccacccaccaagccaagcagtggaagggcagcataaggatatggtgaggattccagtgggttctagagagaccttctatagaatatccaagacagacggagtttgcgagtggaagttttttagtagcatgcccagagggagcgccaggatcacagtgtccaaggatcagagttcttgcaccactgccaggacaaaatcacgttccgttactcgattagagtgctcaggcatgattttggctcattgcaacctgcgattaccaggttcacgggattctccggctagtgcatctcaggctgctggaacaacagggatgtgtcaccaggctgatgcgacccgaccatcatag

SEQ ID NO: 228246 - DNA, 1428 bp, Artificial Sequence
  derived and/or modified sequence
atggtgttcctgagcggcaacgccagcgacagcagcaactgcacccagccccccgcccccgtgaacatcagcaaggccatcctgctgggcgtgatcctgggcggcctgatcctgttcggcgtgctgggcaacatcctggtgatcctgagcgtggcctgccacagacacctgcacagcgtgacccactactacatcgtgaacctggccgtggccgacctgctgctgaccagcaccgtgctgcccttcagcgccatcttcgaggtgctgggctactgggccttcggcagagtgttctgcaacatctgggccgccgtggacgtgctgtgctgcaccgccagcatcatgggcctgtgcatcatcagcatcgacagatacatcggcgtgagctaccccctgagataccccaccatcgtgacccagagaagaggcctgatggccctgctgtgcgtgtgggccctgagcctggtgatcagcatcggccccctgttcggctggagacagcccgcccccgaggacgagaccatctgccagatcaacgaggagcccggctacgtgctgttcagcgccctgggcagcttctacctgcccctggccatcatcctggtgatgtactgcagagtgtacgtggtggccaagagagagagcagaggcctgaagagcggcctgaagaccgacaagagcgacagcgagcaggtgaccctgagaatccacagaaagaacgcccccgccggcggcagcggcatggccagcgccaagaccaagacccacttcagcgtgagactgctgaagttcagcagagagaagaaggccgccaagaccctgggcatcgtggtgggctgcttcgtgctgtgctggctgcccttcttcctggtgatgcccatcggcagcttcttccccgacttcaagcccagcgagaccgtgttcaagatcgtgttctggctgggctacctgaacagctgcatcaaccccatcatctacccctgcagcagccaggagttcaagaaggccttccagaacgtgctgagaatccagtgcctgtgcagaaagcagagcagcaagcacgccctgggctacaccctgcacccccccagccaggccgtggagggccagcacaaggacatggtgagaatccccgtgggcagcagagagaccttctacagaatcagcaagaccgacggcgtgtgcgagtggaagttcttcagcagcatgcccagaggcagcgccagaatcaccgtgagcaaggaccagagcagctgcaccaccgccagaaccaagagcagaagcgtgaccagactggagtgcagcggcatgatcctggcccactgcaacctgagactgcccggcagcagagacagccccgccagcgccagccaggccgccggcaccaccggcatgtgccaccaggccgacgccaccagacccagctag

SEQ ID NO: 228247 - protein, 455 aa, Artificial Sequence
  derived and/or modified sequence
MVFLSGNASDSSNCTQPPAPVNISKAILLGVILGGLILFGVLGNILVILSVACHRHLHSVTHYYIVNLAVADLLLTSTVLPFSAIFEVLGYWAFGRVFCNIWAAVDVLCCTASIMGLCIISIDRYIGVSYPLRYPTIVTQRRGLMALLCVWALSLVISIGPLFGWRQPAPEDETICQINEEPGYVLFSALGSFYLPLAIILVMYCRVYVVAKRESRGLKSGLKTDKSDSEQVTLRIHRKNAPAGGSGMASAKTKTHFSVRLLKFSREKKAAKTLGIVVGCFVLCWLPFFLVMPIGSFFPDFKPSETVFKIVFWLGYLNSCINPIIYPCSSQEFKKAFQNVLRIQCLCRKQSSKHALGYTLHPPSQAVEGQHKDMVRIPVGSRETFYRISKTDGVCEWKFFSSMPRGSARITVSKDQSSCTTARRGMDCRYFTKNCREHIKHVNFMMPPWRKGSEC

SEQ ID NO: 228248 - DNA, 1368 bp, Artificial Sequence
  derived and/or modified sequence
atggtcttcctctccggtaatgcatccgactcaagtaattgtacccagccccccgcgcctgtaaatatttccaaggcaattctgttgggcgtgatcctgggaggactaattttgttcggagttctgggaaacatactcgtcattctttctgttgcatgccacaggcatcttcactctgttactcactattacattgtgaacctcgcggttgccgatctcttgctgacatctaccgtgctcccattcagtgcaatcttcgaagtgctgggttactgggcgtttgggcgcgtgttttgcaatatctgggccgcagtcgatgttttatgctgcactgcttcaatcatggggctctgtattatttctatcgaccggtatatcggggtaagctaccctctgcgttatcctactatcgttacgcagagaagggggctgatggcgctcctatgcgtctgggcattaagcctcgtcatctctatcgggccactgtttggttggcggcagcctgctcctgaggacgaaaccatttgccagattaacgaggagccgggttatgtgttattttccgccctcggcagcttttatttgccactcgcaattatcctggtaatgtattgcagagtgtatgtagtggctaagcgagaaagcaggggcctgaagagtgggttgaagactgacaagagcgactctgagcaggtcaccctccgaattcacagaaagaatgcgccggcaggcggatccgggatggcctcagcgaaaactaagacacatttctcagtcagacttttaaaattttcgcgagaaaagaaggccgctaagactttaggtatagtcgtgggatgtttcgttctttgttggcttccatttttcctggtgatgccaattgggtccttctttcctgattttaaaccctcggaaacggtttttaagattgtcttctggcttggctatcttaacagctgtattaatcctatcatctatccatgcagtagccaggagttcaagaaggcattccagaatgttctgcggatccaatgcctttgtcggaaacagtcttccaaacatgctctgggatatacactgcacccgccatcccaagcagttgaaggacaacacaaggacatggtcagaattcccgtgggatcacgggaaaccttttaccgcattagcaagaccgacggagtttgcgaatggaaattcttttcaagcatgcctcgcggcagtgccaggattaccgtgagcaaagatcagtcttcctgtacaacagcgcgtagagggatggattgtcggtattttaccaagaactgccgggaacacattaaacacgtaaatttcatgatgcctccttggaggaaggggagtgaatgctag

SEQ ID NO: 228249 - DNA, 1765 bp, Artificial Sequence
  derived and/or modified sequence
tcatgtggccttctgagggttcccagggctggccagggttgtttcccacccgcgcgcgcgctctcacccccagccaaacccacctggcagggctccctccagccgagaccttttgattcccggctcccgcgctcccgcctccgcgccagcccgggaggtggccctggacagccggacctcgcccggccccggctgggaccatggtgtttctctcgggaaatgcttccgacagctccaactgcacccaaccgccggcaccggtgaacatttccaaggccattctgctcggggtgatcttggggggcctcattcttttcggggtgctgggtaacatcctagtgatcctctccgtagcctgtcaccgacacctgcactcagtcacgcactactacatcgtcaacctggcggtggccgacctcctgctcacctccacggtgctgcccttctccgccatcttcgaggtcctaggctactgggccttcggcagggtcttctgcaacatctgggcggcagtggatgtgctgtgctgcaccgcgtccatcatgggcctctgcatcatctccatcgaccgctacatcggcgtgagctacccgctgcgctacccaaccatcgtcacccagaggaggggtctcatggctctgctctgcgtctgggcactctccctggtcatatccattggacccctgttcggctggaggcagccggcccccgaggacgagaccatctgccagatcaacgaggagccgggctacgtgctcttctcagcgctgggctccttctacctgcctctggccatcatcctggtcatgtactgccgcgtctacgtggtggccaagagggagagccggggcctcaagtctggcctcaagaccgacaagtcggactcggagcaagtgacgctccgcatccatcggaaaaacgccccggcaggaggcagcgggatggccagcgccaagaccaagacgcacttctcagtgaggctcctcaagttctcccgggagaagaaagcggccaaaacgctgggcatcgtggtcggctgcttcgtcctctgctggctgccttttttcttagtcatgcccattgggtctttcttccctgatttcaagccctctgaaacagtttttaaaatagtattttggctcggatatctaaacagctgcatcaaccccatcatatacccatgctccagccaagagttcaaaaaggcctttcagaatgtcttgagaatccagtgtctctgcagaaagcagtcttccaaacatgccctgggctacaccctgcacccgcccagccaggccgtggaagggcaacacaaggacatggtgcgcatccccgtgggatcaagagagaccttctacaggatctccaagacggatggcgtttgtgaatggaaatttttctcttccatgccccgtggatctgccaggattacagtgtccaaagaccaatcctcctgtaccacagcccggaggggaatggattgtagatatttcaccaagaattgcagagagcatatcaagcatgtgaattttatgatgccaccgtggagaaagggttcagaatgctgatctccaggtagctggagacctaggcagtctgcaaatgaggagtcagctggaagctatggctatgtattatgtgacatcgcttgttcctaagtgaaaactggatatcccaaccttctggcccagtaggtttcatggttaagacctggtagtgagaacattttaggaactatttgcttgggcaggcaatttttcactct

SEQ ID NO: 228250 - DNA, 1368 bp, Artificial Sequence
  derived and/or modified sequence
atggtgttcctgtctggaaatgccagtgacagcagcaactgcacccagcccccagcccctgtgaacatcagcaaggccatcctgctgggcgtcatcctgggcggcctcatcctgtttggagtgctgggcaacatcctggtgatcctgtctgtggcctgccaccgccacctgcacagcgtgacccactactacatcgtgaacctggccgtggccgacctgctgctgaccagcacagtgctgcccttcagcgccatctttgaggtgctgggctactgggccttcggccgggtcttctgcaacatctgggccgctgtggatgtgctgtgctgcacagccagcatcatgggcctgtgcatcatcagcattgaccgctacatcggcgtgtcctaccccctgcgctaccccaccatcgtgacccagaggcggggcctgatggccctgctgtgtgtgtgggccctgagcctggtgatcagcatcggccccctgtttggctggaggcagcctgccccagaagatgagaccatctgccagatcaatgaggagcccggctacgtgctcttcagcgccctgggcagcttctacctgcccctggccatcatcctggtgatgtactgccgggtgtatgtggtggccaagcgggagagccggggcctgaagagcggcctgaagacagacaagagtgacagcgagcaggtgaccctgcgcatccacaggaagaatgccccagctgggggcagcggcatggccagcgccaagaccaagacccacttctctgtgcggctgctgaagttcagccgggagaagaaggccgccaagaccctgggcatcgtggtgggctgctttgtgctgtgctggctgcccttcttcctggtgatgcccatcggcagcttcttcccagacttcaagcccagcgagaccgtcttcaagatcgtgttctggctgggctacctgaacagctgcatcaaccccatcatctacccctgcagcagccaggagttcaagaaggccttccagaatgtgctgcgcatccagtgcctgtgcaggaagcagagcagcaagcacgccctgggctacaccctgcacccccccagccaggccgtggagggccagcacaaggacatggtgcgcatccctgtgggcagccgggagaccttctaccgcatcagcaagacagatggagtgtgtgagtggaagttcttcagctccatgccccggggcagcgcccgcatcaccgtgtccaaggaccagagcagctgcaccacagcccggcggggcatggactgccgctacttcaccaagaactgccgggagcacatcaagcacgtgaacttcatgatgccaccctggaggaaaggaagtgagtgctag

SEQ ID NO: 228251 - DNA, 1368 bp, Artificial Sequence
  derived and/or modified sequence
atggtgttcctgagcggcaacgccagcgacagcagcaactgcacccagccccccgccccggtgaatatctcaaaggcaatccttctcggtgttatactgggaggactaatcctctttggcgtgttgggcaatatcttggtgattctaagtgtggcatgccatcgtcatctgcactccgtcacacattattacatcgtcaatcttgccgtagcggatttactgctgacttccaccgtgctccccttttctgcgatatttgaggttctggggtactgggcatttgggcgtgtgttctgtaacatctgggcagcagtggacgtgctgtgttgtaccgccagcatcatgggcctgtgtatcatctcaatcgacaggtacataggagtgagctatcctttgcggtaccccacaatcgtgactcaacgaagaggcctgatggcactcttgtgcgtttgggccctgtcgctcgttattagcattggccccctgtttggctggcgtcagccggctcctgaagacgagacaatctgccagattaatgaagaacctggctacgtcctctttagtgcgctgggatctttttaccttcctctcgcaatcatccttgtcatgtactgccgggtttacgtggtggctaaaagggagtcaagaggactgaagagtggtctcaaaaccgataagtctgattccgagcaggtaacgctcagaattcatcgaaagaatgcgccagcaggcggaagcgggatggccagtgctaaaacgaaaacgcacttcagcgtacggttactgaaattcagtagagagaagaaagccgccaagacacttggcatagtcgtggggtgcttcgtgctgtgctggctgccattcttccttgtgatgcctatcggatctttctttcctgactttaaaccttcggaaaccgttttcaagatcgttttctggctggggtatcttaatagttgtataaatcctatcatctacccttgtagttctcaggagtttaagaaagccttccagaatgttttaagaatacaatgcctgtgccgtaaacagagttccaagcacgctttgggttataccctccatcctccatctcaggcagtggaaggccagcacaaagacatggtccggatccctgtcggtagccgagagacattttacaggatttccaagacagacggggtatgcgagtggaaatttttcagctctatgcctcgtgggagtgccagaattacggtcagtaaggatcagagcagctgtaccacagcacggcgtggaatggactgcagatacttcaccaaaaattgtcgagagcacatcaaacatgtgaattttatgatgcccccgtggcggaaaggaagtgaatgttag

SEQ ID NO: 228252 - DNA, 1368 bp, Artificial Sequence
  derived and/or modified sequence
atggtgtttctatcaggtaatgcctccgacagctctaattgtacccaaccgccagccccagtgaacatcagcaaggccatcctcttaggcgtcatcctgggcggattgatcctgtttggggttcttggtaacatcctagtgattctgtctgtcgcctgtcacaggcatctgcactctgttacccactactacatcgttaacttagctgtggccgatcttctgttaacatcaactgtcctgcctttttctgcaatctttgaagttttgggctactgggcattcggaagggtgttctgtaacatttgggccgcagttgatgtgttgtgttgcacagcatcaatcatgggtttgtgtatcatcagtatcgatcgatacattggggtctcatacccactccgctatcctactatcgttactcaacgcagagggttgatggcactgttgtgcgtctgggcgctcagcctcgttataagcatcggcccactgttcgggtggcgccagcccgctcccgaagatgaaaccatctgccagattaacgaagaacctggctacgttctgttctcagcactaggatcgttctatctccccctcgcaatcattctagtgatgtattgcagggtgtatgtcgtggccaaaagggaaagcagggggttgaaaagtggcctcaagactgacaaaagcgacagtgaacaggtaacacttcgcattcatcgcaagaacgcccctgctggcggatctggcatggcaagcgcgaaaacaaagacccacttctcagtgaggcttctgaaatttagtagagagaaaaaggcagcgaagaccttgggtattgttgtcgggtgtttcgtactttgttggctgcctttttttctagtgatgcctattggcagcttctttcccgactttaaaccctccgagacagtgtttaaaattgtcttctggttggggtacttgaactcctgcatcaatcccatcatctatccgtgcagttctcaagaattcaaaaaggcctttcagaatgtgcttcgtattcaatgcttatgccgtaagcaatcctccaaacatgcactggggtacacgcttcaccctccatcgcaggccgttgagggccaacataaagatatggtgcgtatccctgtgggcagccgggaaaccttttacagaattagcaaaacagatggagtttgtgaatggaagttcttctccagtatgcctcgcggtagtgcacgtatcacagtgtcaaaagaccagtccagttgtaccacagcccgtcggggtatggactgtagatattttaccaagaactgccgagagcatatcaaacacgtcaactttatgatgcctccatggagaaaaggaagcgagtgttag

SEQ ID NO: 228253 - DNA, 1368 bp, Artificial Sequence
  derived and/or modified sequence
atggtgttcctgagcggcaacgccagcgacagcagcaactgcacccagccccccgcccccgtgaacatcagcaaggccatcctgctgggcgtgatcctgggcggcctgatcctgttcggcgtgctgggcaacatcctggtgatcctgagcgtggcctgccacagacacctgcacagcgtgacccactactacatcgtgaacctggccgtggccgacctgctgctgaccagcaccgtgctgcccttcagcgccatcttcgaggtgctgggctactgggccttcggcagagtgttctgcaacatctgggccgccgtggacgtgctgtgctgcaccgccagcatcatgggcctgtgcatcatcagcatcgacagatacatcggcgtgagctaccccctgagataccccaccatcgtgacccagagaagaggcctgatggccctgctgtgcgtgtgggccctgagcctggtgatcagcatcggccccctgttcggctggagacagcccgcccccgaggacgagaccatctgccagatcaacgaggagcccggctacgtgctgttcagcgccctgggcagcttctacctgcccctggccatcatcctggtgatgtactgcagagtgtacgtggtggccaagagagagagcagaggcctgaagagcggcctgaagaccgacaagagcgacagcgagcaggtgaccctgagaatccacagaaagaacgcccccgccggcggcagcggcatggccagcgccaagaccaagacccacttcagcgtgagactgctgaagttcagcagagagaagaaggccgccaagaccctgggcatcgtggtgggctgcttcgtgctgtgctggctgcccttcttcctggtgatgcccatcggcagcttcttccccgacttcaagcccagcgagaccgtgttcaagatcgtgttctggctgggctacctgaacagctgcatcaaccccatcatctacccctgcagcagccaggagttcaagaaggccttccagaacgtgctgagaatccagtgcctgtgcagaaagcagagcagcaagcacgccctgggctacaccctgcacccccccagccaggccgtggagggccagcacaaggacatggtgagaatccccgtgggcagcagagagaccttctacagaatcagcaagaccgacggcgtgtgcgagtggaagttcttcagcagcatgcccagaggcagcgccagaatcaccgtgagcaaggaccagagcagctgcaccaccgccagaagaggcatggactgcagatacttcaccaagaactgcagagagcacatcaagcacgtgaacttcatgatgcccccctggagaaagggcagcgagtgctag

SEQ ID NO: 228254 - protein, 3174 aa, Artificial Sequence
  derived and/or modified sequence
MVFESVVVDVLNRFLGDYVVDLDTSQLSLGIWKGAVALKNLQIKENALSQLDVPFKVKVGHIGNLKLIIPWKNLYTQPVEAVLEEIYLLIVPSSRIKYDPLKEEKQLMEAKQQELKRIEEAKQKVVDQEQHLPEKQDTFAEKLVTQIIKNLQVKISSIHIRYEDDITNRDKPLSFGISLQNLSMQTTDQYWVPCLHDETEKLVRKLIRLDNLFAYWNVKSQMFYLSDYDNSLDDLKNGIVNENIVPEGYDFVFRPISANAKLVMNRRSDFDFSAPKINLEIELHNIAIEFNKPQYFSIMELLESVDMMAQNLPYRKFKPDVPLHHHAREWWAYAIHGVLEVNVCPRLWMWSWKHIRKHRQKVKQYKELYKKKLTSKKPPGELLVSLEELEKTLDVFNITIARQTAEVEVKKAGYKIYKEGVKDPEDNKGWFSWLWSWSEQNTNEQQPDVQPETLEEMLTPEEKALLYEAIGYSETAVDPTLLKTFEALKFFVHLKSMSIVLRENHQKPELVDIVIEEFSTLIVQRPGAQAIKFETKIDSFHITGLPDNSEKPRLLSSLDDAMSLFQITFEINPLDETVSQRCIIEAEPLEIIYDARTVNSIVEFFRPPKEVHLAQLTAATLTKLEEFRSKTATGLLYIIETQKVLDLKINLKASYIIVPQDGIFSPTSNLLLLDLGHLKVTSKSRSELPDVKQGEANLKEIMDRAYDSFDIQLTSVQLLYSRVGDNWREARKLSVSTQHILVPMHFNLELSKAMVFMDVRMPKFKIYGKLPLISLRISDKKLQGIMELIESIPKPEPVTEVSAPVKSFQIQTSTSLGTSQISQKIIPLLELPSVSEDDSEEEFFDAPCSPLEEPLQFPTGVKSIRTRKLQKQDCSVNMTTFKIRFEVPKVLIEFYHLVGDCELSVVEILVLGLGAEIEIRTYDLKANAFLKEFCLKCPEYLDENKKPVYLVTTLDNTMEDLLTLEYVKAEKNVPDLKSTYNNVLQLIKVNFSSLDIHLHTEALLNTINYLHNILPQSEEKSAPVSTTETEDKGDVIKKLALKLSTNEDIITLQILAELSCLQIFIQDQKCNISEIKIEGLDSEMIMRPSETEINAKLRNIIVLDSDITAIYKKAVYITGKEVFSFKMVSYMDATAGSAYTDMNVVDIQVNLIVGCIEVVFVTKFLYSILAFIDNFQAAKQALAEATVQAAGMAATGVKELAQRSSRMALDINIKAPVVVIPQSPVSENVFVADFGLITMTNTFHMITESQSSPPPVIDLITIKLSEMRLYRSRFINDAYQEVLDLLLPLNLEVVVERNLCWEWYQEVPCFNVNAQLKPMEFILSQEDITTIFKTLHGNIWYEKDGSASPAVTKDQYSATSGVTTNASHHSGGATVVTAAVVEVHSRALLVKTTLNISFKTDDLTMVLYSPGPKQASFTDVRDPSLKLAEFKLENIISTLKMYTDGSTFSSFSLKNCILDDKRPHVKKATPRMIGLTVGFDKKDMMDIKYRKVRDGCVTDAVFQEMYICASVEFLQTVANVFLEAYTTGTAVETSVQTWTAKEEVPTQESVKWEINVIIKNPEIVFVADMTKNDAPALVITTQCEICYKGNLENSTMTAAIKDLQVRACPFLPVKRKGKITTVLQPCDLFYQTTQKGTDPQVIDMSVKSLTLKVSPVIINTMITITSALYTTKETIPEETASSTAHLWEKKDTKTLKMWFLEESNETEKIAPTTELVPKGEMIKMNIDSIFIVLEAGIGHRTVPMLLAKSRFSGEGKNWSSLINLHCQLELEVHYYNEMFGVWEPLLEPLEIDQTEDFRPWNLGIKMKKKAKMAIVESDPEEENYKVPEYKTVISFHSKDQLNITLSKCGLVMLNNLVKAFTEAATGSSADFVKDLAPFMILNSLGLTISVSPSDSFSVLNIPMAKSYVLKNGESLSMDYIRTKDNDHFNAMTSLSSKLFFILLTPVNHSTADKIPLTKVGRRLYTVRHRESGVERSIVCQIDTVEGSKKVTIRSPVQIRNHFSVPLSVYEGDTLLGTASPENEFNIPLGSYRSFIFLKPEDENYQMCEGIDFEEIIKNDGALLKKKCRSKNPSKESFLINIVPEKDNLTSLSVYSEDGWDLPYIMHLWPPILLRNLLPYKIAYYIEGIENSVFTLSEGHSAQICTAQLGKARLHLKLLDYLNHDWKSEYHIKPNQQDISFVSFTCVTEMEKTDLDIAVHMTYNTGQTVVAFHSPYWMVNKTGRMLQYKADGIHRKHPPNYKKPVLFSFQPNHFFNNNKVQLMVTDSELSNQFSIDTVGSHGAVKCKGLKMDYQVGVTIDLSSFNITRIVTFTPFYMIKNKSKYHISVAEEGNDKWLSLDLEQCIPFWPEYASSKLLIQVERSEDPPKRIYFNKQENCILLRLDNELGGIIAEVNLAEHSTVITFLDYHDGAATFLLINHTKNELVQYNQSSLSEIEDSLPPGKAVFYTWADPVGSRRLKWRCRKSHGEVTQKDDMMMPIDLGEKTIYLVSFFEGLQRIILFTEDPRVFKVTYESEKAELAEQEIAVALQDVGISLVNNYTKQEVAYIGITSSDVVWETKPKKKARWKPMSVKHTEKLEREFKEYTESSPSEDKVIQLDTNVPVRLTPTGHNMKILQPHVIALRRNYLPALKVEYNTSAHQSSFRIQIYRIQIQNQIHGAVFPFVFYPVKPPKSVTMDSAPKPFTDVSIVMRSAGHSQISRIKYFKVLIQEMDLRLDLGFIYALTDLMTEAEVTENTEVELFHKDIEAFKEEYKTASLVDQSQVSLYEYFHISPIKLHLSVSLSSGREEAKDSKQNGGLIPVHSLNLLLKSIGATLTDVQDVVFKLAFFELNYQFHTTSDLQSEVIRHYSKQAIKQMYVLILGLDVLGNPFGLIREFSEGVEAFFYEPYQGAIQGPEEFVEGMALGLKALVGGAVGGLAGAASKITGAMAKGVAAMTMDEDYQQKRREAMNKQPAGFREGITRGGKGLVSGFVSGITGIVTKPIKGAQKGGAAGFFKGVGKGLVGAVARPTGGIIDMASSTFQGIKRATETSEVESLRPPRFFNEDGVIRPYRLRDGTGNQMLQVMENGRFAKYKYFTHVMINKTDMLMITRRGVLFVTKGTFGQLTCEWQYSFDEFTKEPFIVHGRRLRIEAKERVKSVFHAREFGKIINFKTPEDARWILTKLQEAREPSPSL

SEQ ID NO: 228255 - DNA, 9525 bp, Artificial Sequence
  derived and/or modified sequence
atggtgttcgagagcgtggtggtggacgtgctgaacagattcctgggcgactacgtggtggacctggacaccagccagctgagcctgggcatctggaagggcgccgtggccctgaagaacctgcagatcaaggagaacgccctgagccagctggacgtgcccttcaaggtgaaggtgggccacatcggcaacctgaagctgatcatcccctggaagaacctgtacacccagcccgtggaggccgtgctggaggagatctacctgctgatcgtgcccagcagcagaatcaagtacgaccccctgaaggaggagaagcagctgatggaggccaagcagcaggagctgaagagaatcgaggaggccaagcagaaggtggtggaccaggagcagcacctgcccgagaagcaggacaccttcgccgagaagctggtgacccagatcatcaagaacctgcaggtgaagatcagcagcatccacatcagatacgaggacgacatcaccaacagagacaagcccctgagcttcggcatcagcctgcagaacctgagcatgcagaccaccgaccagtactgggtgccctgcctgcacgacgagaccgagaagctggtgagaaagctgatcagactggacaacctgttcgcctactggaacgtgaagagccagatgttctacctgagcgactacgacaacagcctggacgacctgaagaacggcatcgtgaacgagaacatcgtgcccgagggctacgacttcgtgttcagacccatcagcgccaacgccaagctggtgatgaacagaagaagcgacttcgacttcagcgcccccaagatcaacctggagatcgagctgcacaacatcgccatcgagttcaacaagccccagtacttcagcatcatggagctgctggagagcgtggacatgatggcccagaacctgccctacagaaagttcaagcccgacgtgcccctgcaccaccacgccagagagtggtgggcctacgccatccacggcgtgctggaggtgaacgtgtgccccagactgtggatgtggagctggaagcacatcagaaagcacagacagaaggtgaagcagtacaaggagctgtacaagaagaagctgaccagcaagaagccccccggcgagctgctggtgagcctggaggagctggagaagaccctggacgtgttcaacatcaccatcgccagacagaccgccgaggtggaggtgaagaaggccggctacaagatctacaaggagggcgtgaaggaccccgaggacaacaagggctggttcagctggctgtggagctggagcgagcagaacaccaacgagcagcagcccgacgtgcagcccgagaccctggaggagatgctgacccccgaggagaaggccctgctgtacgaggccatcggctacagcgagaccgccgtggaccccaccctgctgaagaccttcgaggccctgaagttcttcgtgcacctgaagagcatgagcatcgtgctgagagagaaccaccagaagcccgagctggtggacatcgtgatcgaggagttcagcaccctgatcgtgcagagacccggcgcccaggccatcaagttcgagaccaagatcgacagcttccacatcaccggcctgcccgacaacagcgagaagcccagactgctgagcagcctggacgacgccatgagcctgttccagatcaccttcgagatcaaccccctggacgagaccgtgagccagagatgcatcatcgaggccgagcccctggagatcatctacgacgccagaaccgtgaacagcatcgtggagttcttcagaccccccaaggaggtgcacctggcccagctgaccgccgccaccctgaccaagctggaggagttcagaagcaagaccgccaccggcctgctgtacatcatcgagacccagaaggtgctggacctgaagatcaacctgaaggccagctacatcatcgtgccccaggacggcatcttcagccccaccagcaacctgctgctgctggacctgggccacctgaaggtgaccagcaagagcagaagcgagctgcccgacgtgaagcagggcgaggccaacctgaaggagatcatggacagagcctacgacagcttcgacatccagctgaccagcgtgcagctgctgtacagcagagtgggcgacaactggagagaggccagaaagctgagcgtgagcacccagcacatcctggtgcccatgcacttcaacctggagctgagcaaggccatggtgttcatggacgtgagaatgcccaagttcaagatctacggcaagctgcccctgatcagcctgagaatcagcgacaagaagctgcagggcatcatggagctgatcgagagcatccccaagcccgagcccgtgaccgaggtgagcgcccccgtgaagagcttccagatccagaccagcaccagcctgggcaccagccagatcagccagaagatcatccccctgctggagctgcccagcgtgagcgaggacgacagcgaggaggagttcttcgacgccccctgcagccccctggaggagcccctgcagttccccaccggcgtgaagagcatcagaaccagaaagctgcagaagcaggactgcagcgtgaacatgaccaccttcaagatcagattcgaggtgcccaaggtgctgatcgagttctaccacctggtgggcgactgcgagctgagcgtggtggagatcctggtgctgggcctgggcgccgagatcgagatcagaacctacgacctgaaggccaacgccttcctgaaggagttctgcctgaagtgccccgagtacctggacgagaacaagaagcccgtgtacctggtgaccaccctggacaacaccatggaggacctgctgaccctggagtacgtgaaggccgagaagaacgtgcccgacctgaagagcacctacaacaacgtgctgcagctgatcaaggtgaacttcagcagcctggacatccacctgcacaccgaggccctgctgaacaccatcaactacctgcacaacatcctgccccagagcgaggagaagagcgcccccgtgagcaccaccgagaccgaggacaagggcgacgtgatcaagaagctggccctgaagctgagcaccaacgaggacatcatcaccctgcagatcctggccgagctgagctgcctgcagatcttcatccaggaccagaagtgcaacatcagcgagatcaagatcgagggcctggacagcgagatgatcatgagacccagcgagaccgagatcaacgccaagctgagaaacatcatcgtgctggacagcgacatcaccgccatctacaagaaggccgtgtacatcaccggcaaggaggtgttcagcttcaagatggtgagctacatggacgccaccgccggcagcgcctacaccgacatgaacgtggtggacatccaggtgaacctgatcgtgggctgcatcgaggtggtgttcgtgaccaagttcctgtacagcatcctggccttcatcgacaacttccaggccgccaagcaggccctggccgaggccaccgtgcaggccgccggcatggccgccaccggcgtgaaggagctggcccagagaagcagcagaatggccctggacatcaacatcaaggcccccgtggtggtgatcccccagagccccgtgagcgagaacgtgttcgtggccgacttcggcctgatcaccatgaccaacaccttccacatgatcaccgagagccagagcagccccccccccgtgatcgacctgatcaccatcaagctgagcgagatgagactgtacagaagcagattcatcaacgacgcctaccaggaggtgctggacctgctgctgcccctgaacctggaggtggtggtggagagaaacctgtgctgggagtggtaccaggaggtgccctgcttcaacgtgaacgcccagctgaagcccatggagttcatcctgagccaggaggacatcaccaccatcttcaagaccctgcacggcaacatctggtacgagaaggacggcagcgccagccccgccgtgaccaaggaccagtacagcgccaccagcggcgtgaccaccaacgccagccaccacagcggcggcgccaccgtggtgaccgccgccgtggtggaggtgcacagcagagccctgctggtgaagaccaccctgaacatcagcttcaagaccgacgacctgaccatggtgctgtacagccccggccccaagcaggccagcttcaccgacgtgagagaccccagcctgaagctggccgagttcaagctggagaacatcatcagcaccctgaagatgtacaccgacggcagcaccttcagcagcttcagcctgaagaactgcatcctggacgacaagagaccccacgtgaagaaggccacccccagaatgatcggcctgaccgtgggcttcgacaagaaggacatgatggacatcaagtacagaaaggtgagagacggctgcgtgaccgacgccgtgttccaggagatgtacatctgcgccagcgtggagttcctgcagaccgtggccaacgtgttcctggaggcctacaccaccggcaccgccgtggagaccagcgtgcagacctggaccgccaaggaggaggtgcccacccaggagagcgtgaagtgggagatcaacgtgatcatcaagaaccccgagatcgtgttcgtggccgacatgaccaagaacgacgcccccgccctggtgatcaccacccagtgcgagatctgctacaagggcaacctggagaacagcaccatgaccgccgccatcaaggacctgcaggtgagagcctgccccttcctgcccgtgaagagaaagggcaagatcaccaccgtgctgcagccctgcgacctgttctaccagaccacccagaagggcaccgacccccaggtgatcgacatgagcgtgaagagcctgaccctgaaggtgagccccgtgatcatcaacaccatgatcaccatcaccagcgccctgtacaccaccaaggagaccatccccgaggagaccgccagcagcaccgcccacctgtgggagaagaaggacaccaagaccctgaagatgtggttcctggaggagagcaacgagaccgagaagatcgcccccaccaccgagctggtgcccaagggcgagatgatcaagatgaacatcgacagcatcttcatcgtgctggaggccggcatcggccacagaaccgtgcccatgctgctggccaagagcagattcagcggcgagggcaagaactggagcagcctgatcaacctgcactgccagctggagctggaggtgcactactacaacgagatgttcggcgtgtgggagcccctgctggagcccctggagatcgaccagaccgaggacttcagaccctggaacctgggcatcaagatgaagaagaaggccaagatggccatcgtggagagcgaccccgaggaggagaactacaaggtgcccgagtacaagaccgtgatcagcttccacagcaaggaccagctgaacatcaccctgagcaagtgcggcctggtgatgctgaacaacctggtgaaggccttcaccgaggccgccaccggcagcagcgccgacttcgtgaaggacctggcccccttcatgatcctgaacagcctgggcctgaccatcagcgtgagccccagcgacagcttcagcgtgctgaacatccccatggccaagagctacgtgctgaagaacggcgagagcctgagcatggactacatcagaaccaaggacaacgaccacttcaacgccatgaccagcctgagcagcaagctgttcttcatcctgctgacccccgtgaaccacagcaccgccgacaagatccccctgaccaaggtgggcagaagactgtacaccgtgagacacagagagagcggcgtggagagaagcatcgtgtgccagatcgacaccgtggagggcagcaagaaggtgaccatcagaagccccgtgcagatcagaaaccacttcagcgtgcccctgagcgtgtacgagggcgacaccctgctgggcaccgccagccccgagaacgagttcaacatccccctgggcagctacagaagcttcatcttcctgaagcccgaggacgagaactaccagatgtgcgagggcatcgacttcgaggagatcatcaagaacgacggcgccctgctgaagaagaagtgcagaagcaagaaccccagcaaggagagcttcctgatcaacatcgtgcccgagaaggacaacctgaccagcctgagcgtgtacagcgaggacggctgggacctgccctacatcatgcacctgtggccccccatcctgctgagaaacctgctgccctacaagatcgcctactacatcgagggcatcgagaacagcgtgttcaccctgagcgagggccacagcgcccagatctgcaccgcccagctgggcaaggccagactgcacctgaagctgctggactacctgaaccacgactggaagagcgagtaccacatcaagcccaaccagcaggacatcagcttcgtgagcttcacctgcgtgaccgagatggagaagaccgacctggacatcgccgtgcacatgacctacaacaccggccagaccgtggtggccttccacagcccctactggatggtgaacaagaccggcagaatgctgcagtacaaggccgacggcatccacagaaagcacccccccaactacaagaagcccgtgctgttcagcttccagcccaaccacttcttcaacaacaacaaggtgcagctgatggtgaccgacagcgagctgagcaaccagttcagcatcgacaccgtgggcagccacggcgccgtgaagtgcaagggcctgaagatggactaccaggtgggcgtgaccatcgacctgagcagcttcaacatcaccagaatcgtgaccttcacccccttctacatgatcaagaacaagagcaagtaccacatcagcgtggccgaggagggcaacgacaagtggctgagcctggacctggagcagtgcatccccttctggcccgagtacgccagcagcaagctgctgatccaggtggagagaagcgaggacccccccaagagaatctacttcaacaagcaggagaactgcatcctgctgagactggacaacgagctgggcggcatcatcgccgaggtgaacctggccgagcacagcaccgtgatcaccttcctggactaccacgacggcgccgccaccttcctgctgatcaaccacaccaagaacgagctggtgcagtacaaccagagcagcctgagcgagatcgaggacagcctgccccccggcaaggccgtgttctacacctgggccgaccccgtgggcagcagaagactgaagtggagatgcagaaagagccacggcgaggtgacccagaaggacgacatgatgatgcccatcgacctgggcgagaagaccatctacctggtgagcttcttcgagggcctgcagagaatcatcctgttcaccgaggaccccagagtgttcaaggtgacctacgagagcgagaaggccgagctggccgagcaggagatcgccgtggccctgcaggacgtgggcatcagcctggtgaacaactacaccaagcaggaggtggcctacatcggcatcaccagcagcgacgtggtgtgggagaccaagcccaagaagaaggccagatggaagcccatgagcgtgaagcacaccgagaagctggagagagagttcaaggagtacaccgagagcagccccagcgaggacaaggtgatccagctggacaccaacgtgcccgtgagactgacccccaccggccacaacatgaagatcctgcagccccacgtgatcgccctgagaagaaactacctgcccgccctgaaggtggagtacaacaccagcgcccaccagagcagcttcagaatccagatctacagaatccagatccagaaccagatccacggcgccgtgttccccttcgtgttctaccccgtgaagccccccaagagcgtgaccatggacagcgcccccaagcccttcaccgacgtgagcatcgtgatgagaagcgccggccacagccagatcagcagaatcaagtacttcaaggtgctgatccaggagatggacctgagactggacctgggcttcatctacgccctgaccgacctgatgaccgaggccgaggtgaccgagaacaccgaggtggagctgttccacaaggacatcgaggccttcaaggaggagtacaagaccgccagcctggtggaccagagccaggtgagcctgtacgagtacttccacatcagccccatcaagctgcacctgagcgtgagcctgagcagcggcagagaggaggccaaggacagcaagcagaacggcggcctgatccccgtgcacagcctgaacctgctgctgaagagcatcggcgccaccctgaccgacgtgcaggacgtggtgttcaagctggccttcttcgagctgaactaccagttccacaccaccagcgacctgcagagcgaggtgatcagacactacagcaagcaggccatcaagcagatgtacgtgctgatcctgggcctggacgtgctgggcaaccccttcggcctgatcagagagttcagcgagggcgtggaggccttcttctacgagccctaccagggcgccatccagggccccgaggagttcgtggagggcatggccctgggcctgaaggccctggtgggcggcgccgtgggcggcctggccggcgccgccagcaagatcaccggcgccatggccaagggcgtggccgccatgaccatggacgaggactaccagcagaagagaagagaggccatgaacaagcagcccgccggcttcagagagggcatcaccagaggcggcaagggcctggtgagcggcttcgtgagcggcatcaccggcatcgtgaccaagcccatcaagggcgcccagaagggcggcgccgccggcttcttcaagggcgtgggcaagggcctggtgggcgccgtggccagacccaccggcggcatcatcgacatggccagcagcaccttccagggcatcaagagagccaccgagaccagcgaggtggagagcctgagaccccccagattcttcaacgaggacggcgtgatcagaccctacagactgagagacggcaccggcaaccagatgctgcaggtgatggagaacggcagattcgccaagtacaagtacttcacccacgtgatgatcaacaagaccgacatgctgatgatcaccagaagaggcgtgctgttcgtgaccaagggcaccttcggccagctgacctgcgagtggcagtacagcttcgacgagttcaccaaggagcccttcatcgtgcacggcagaagactgagaatcgaggccaaggagagagtgaagagcgtgttccacgccagagagttcggcaagatcatcaacttcaagacccccgaggacgccagatggatcctgaccaagctgcaggaggccagagagcccagccccagcctgtag

SEQ ID NO: 228256 - DNA, 9525 bp, Artificial Sequence
  derived and/or modified sequence
atggtgtttgaatcagttgtggtagatgtgcttaacagatttctaggggattatgtcgtggacctggacacgtcgcagctgagtctgggcatctggaagggagctgtggccctcaagaatctgcagattaaagagaacgccttgtcccagctggacgtgcctttcaaagttaaagttgggcacatcgggaacctgaaactcatcataccctggaagaacttgtatacacagccagtcgaggccgtgctggaggaaatctacctcctcattgttccatcaagcaggataaaatacgacccactgaaggaggagaaacagctgatggaagcaaagcaacaggagctcaaacggatcgaagaagccaagcagaaagtcgtcgatcaggaacagcatttacccgaaaagcaggacacctttgcagaaaagctcgtgacacagattattaagaacctccaggttaaaatttcaagtattcacatccggtatgaagatgatataaccaatagggacaagccgctgtccttcggcatcagcctacagaatctgtccatgcagacaaccgaccaatactgggtcccttgtcttcatgacgagactgaaaaacttgtgcgaaagctcatccgcttagataacctcttcgcctattggaacgtgaaaagtcaaatgttttatctctccgactatgacaatagcctagatgatctgaagaatggaatcgtcaacgagaatatcgtcccagagggatatgatttcgtgtttcggcctataagcgccaatgcaaaacttgtaatgaataggagaagcgactttgacttctcagcccccaagattaacctcgagattgaactccataatattgccattgagttcaacaaaccacagtacttctcgattatggagctgcttgagagtgttgatatgatggcccagaacttgccatacaggaaattcaaacccgatgtgccattgcatcaccacgccagagagtggtgggcgtacgctatccacggagtacttgaggtgaacgtgtgccctcgtttatggatgtggtcctggaaacacataaggaaacatagacagaaagtcaagcagtataaggaactgtacaagaagaagctgacctcaaagaaacctccaggtgagctgctagtgtctctcgaggaattggagaaaacactggacgtgtttaatataacaatcgcccgccagacggcagaggtggaagtcaagaaagcaggctataaaatttataaagaaggcgtgaaggaccccgaggacaataaaggatggttcagctggctttggtcttggagcgaacagaacactaacgagcagcagcccgatgtgcaaccggaaacattagaagaaatgctgaccccagaggagaaagccctgctttacgaagctattggatactctgagactgctgttgatcccacattgctgaaaaccttcgaagctctgaagttcttcgttcacctgaagtccatgagcatagtcctacgcgaaaatcaccagaagccggagctagtggacattgtgatcgaggagttcagtactctcattgtgcagcggcctggcgctcaagccatcaaatttgagaccaaaattgactcgtttcatataactggactgcctgataactctgagaaaccccggttattatcctccctcgatgatgccatgagtctgttccaaattaccttcgagatcaatccactggatgaaacggtgtctcagcgctgcatcatcgaagctgagccattggagattatctacgatgcccggactgtcaactccatcgtggaattcttcagaccacctaaggaagtccatctcgcgcagttgaccgccgccactctgacaaagttggaggaatttagaagcaagaccgcgacagggctgctgtatataattgaaactcagaaagtgctggaccttaagataaacctcaaggccagctacatcatcgttcctcaggacggcatcttctcacccacctctaacttattgcttttagacctggggcacctgaaagtcacgtccaagtctcgaagcgagctcccagatgtcaaacaaggtgaggctaatctcaaagagatcatggatagagcgtatgactcttttgacatccagctgacttccgtccagttgctgtactctcgcgtcggcgacaattggagggaggccaggaagctgtcagtgtctacccagcacatactagtcccaatgcattttaacttggagctcagcaaggccatggtctttatggatgtgcgtatgcccaagtttaagatatacggtaagctcccactaattagtctcaggataagcgataaaaaacttcagggcattatggagctgatcgagtccattcctaagcccgaacctgtcacagaggtaagcgcccctgtaaagagctttcaaattcagactagcacgtctctgggcacatcgcagatcagccagaaaattataccacttttagaactgccatccgtttctgaagatgattccgaggaagagttctttgacgccccctgctctcccctggaagagccactccaattccctaccggagtgaaaagcattagaactcgcaagctgcagaagcaggactgttcggtgaacatgacaaccttcaagatccggtttgaggtgcccaaggtcttaatcgagttttaccacctcgtcggggattgcgagttgtcagtggttgagattctggttctcggcttgggagccgagattgaaatccgtacatatgatctcaaagccaacgctttcctgaaagagttctgcttaaagtgccccgaatatttagacgagaataagaaacctgtgtatctggtgactaccttggacaacacgatggaggacctgctaacccttgagtatgttaaagcagaaaagaacgtgcccgatcttaaaagcacctacaataatgtcctgcaactgatcaaggtgaacttcagttccctggatatccatctgcatactgaggcgttgctaaacacaattaactaccttcacaacattctgcctcagagtgaggagaaaagtgctcccgtctccactaccgagaccgaagataaaggggatgtcattaaaaagctcgcactgaagctatccacaaatgaagacatcatcacccttcagatcttggctgaactgtcctgtctgcagatatttatacaagaccagaaatgtaatatatcggagatcaagatcgaaggcttagattctgaaatgatcatgaggccgagcgagaccgaaatcaacgccaagttgcggaatattattgtgcttgattccgatattacagccatctacaaaaaggccgtgtatattaccgggaaggaagtgttcagtttcaagatggtgagttacatggatgctacagccggtagcgcctatactgatatgaacgtggttgacatccaggtgaacctgatcgtgggctgtatcgaggtggtgttcgtcaccaaattcttgtacagtatactcgcattcatcgacaacttccaggccgccaaacaggctctggctgaagccaccgtgcaagcagcaggtatggccgcaaccggcgtgaaggagctggctcagaggtcaagccggatggccctggatatcaatatcaaagcccctgtagtggtcattccccagagtccagtgtctgagaacgttttcgtcgctgactttgggctgataacgatgactaataccttccacatgataaccgaatcccagtccagtccaccccccgtgatcgatttaatcactatcaagctgtctgagatgagactttatagatcaagatttatcaacgacgcttaccaagaggttctggaccttttgctacccctcaacctggaggtggtggtagaacgtaacttgtgctgggaatggtatcaagaggtgccctgcttcaacgttaacgcccaactgaagccaatggaatttattctctctcaggaggatatcaccacaatttttaagaccttgcacgggaacatttggtacgagaaggatggctctgcctctcccgcagtgactaaagaccagtactccgcaaccagcggtgtcactaccaatgcctctcaccatagcgggggagcgacagtggtgaccgcagcagtagtggaagtgcactcaagggccctcctggtaaaaacaactctcaatatttccttcaaaactgatgaccttaccatggtcctatactcccctggccccaaacaggcctcgttcacagatgttagagatcctagcctgaagctggctgagtttaagctggaaaacatcattagcacgctaaaaatgtacaccgacgggagcacgttctccagtttttccttgaaaaactgcatcctggatgataagaggccccacgtaaaaaaggcgacgcctcgcatgatcgggctgaccgtcggtttcgacaagaaagacatgatggacattaaatacaggaaggttcgagacgggtgcgtgacggacgccgttttccaggagatgtatatctgcgcaagtgtagaatttctgcaaacagttgccaatgtgtttcttgaggcttacacgacgggtacggccgtggagacctccgttcagacttggacagccaaagaggaggtcccaacacaagagtcagtcaagtgggaaataaatgtgatcattaaaaacccagaaatcgtgtttgtggctgacatgactaaaaatgatgcacccgctctggttattactacacagtgtgaaatctgctataaggggaacttagaaaattctaccatgaccgctgcaatcaaggatttgcaggtgcgcgcatgcccctttctccccgtgaagcgcaaaggtaaaattacaacggtcttacagccctgtgacttgttttaccagacaacacaaaaagggacggacccacaggtcatagatatgagcgtcaagtccctcaccttgaaggtttctcctgttatcattaacacaatgataacgattacatccgccctgtacactacaaaggagacaatccccgaggaaaccgcgtcttcaaccgcccacctgtgggaaaagaaagacactaagacattgaagatgtggttcttggaggaatcaaatgagacagagaaaattgctcccaccacagagctggttccaaagggagagatgataaagatgaatattgacagcatcttcatcgtgctggaagctggaattggccatagaacagtgccaatgctactggctaagagcagattcagcggcgagggcaaaaactggagttccttgatcaacctgcactgtcaactggagctggaagtacactattataacgaaatgtttggtgtatgggagccactgctggaaccactggagatcgaccagacagaggactttcgaccctggaacctggggataaagatgaagaagaaagccaaaatggccatcgtcgagtcagaccccgaggaggagaattataaagtgcccgagtataagacagttatctcatttcattcaaaagaccagcttaatatcactctttccaagtgcggtttggtgatgctgaacaacctcgtcaaggctttcacagaggctgcgacaggatcttcggcagactttgtgaaagacctagccccgtttatgatcctgaactctctggggctgacgatctctgtgagtccaagtgacagcttctccgtcctcaatatcccaatggcaaaatcctacgttcttaagaatggcgaaagcctgtctatggactacataaggacgaaggacaatgaccactttaacgcaatgacgtcactgagctcaaaacttttctttatcctcctgactccggtaaatcactccactgctgataagatcccactgactaaggttgggcggaggttgtataccgtgcgacatagagagtcaggagtcgagagatcaattgtgtgccagatcgatacggtggaaggctcaaaaaaggtgaccatccgctcacctgtgcaaatcaggaatcactttagcgtccctctcagtgtgtatgagggtgacactctcctcgggaccgcttcccctgaaaatgagttcaacatccccctgggaagttatagaagttttatttttctgaaacctgaggatgagaattaccagatgtgcgaaggcatcgactttgaagagataataaaaaacgatggcgcactgctcaaaaaaaagtgtaggagtaaaaatccctcaaaagaatcctttctgattaacatagtcccagaaaaagacaacttgacttcactctccgtttactcagaagatggttgggatcttccctacatcatgcacctctggccgcctatcttattgaggaacctgctaccttacaagattgcatactatattgaaggcatcgagaactccgtgttcactctgtctgaaggacactcagcccagatctgtactgcccagctcggaaaagcaagattacatcttaaactacttgattacttaaatcatgactggaagtctgagtaccacattaagcccaaccagcaagatatttcattcgtgtcattcacttgtgtgactgagatggaaaaaactgacttagacatagccgtgcacatgacatacaataccggacagacagtcgtggcattccattctccctattggatggtgaataaaaccgggcgcatgctgcagtataaggcagatgggattcaccggaagcatccccctaactataagaaacccgtgctcttttcattccagcctaatcactttttcaataataacaaggtgcagttgatggttacagattccgagttaagcaaccagtttagcatcgacaccgtcggaagccatggtgctgtgaaatgcaagggcctgaaaatggattatcaggtcggcgtgacaatcgatctcagttctttcaacattactcgtattgtgacattcactcctttctacatgatcaagaataagtcaaagtatcacatctcagtagcggaggagggaaatgacaaatggctgtccttggatctcgagcagtgcatacccttttggccagagtatgcatcttccaagctgctgatccaggtggagcgatccgaagatccccccaagcgcatatacttcaacaagcaggaaaattgtatcctgctgaggttggataacgaacttggcggtataattgctgaggtcaacctagccgaacattccaccgttatcacttttctggactaccacgacggagcggcgacgttcctgctgattaatcatacaaaaaacgagcttgtgcagtataaccagagctccctgtccgagatcgaagactcattgccaccaggtaaagctgtgttttatacttgggccgacccggtgggctcccgtcgactgaaatggcggtgtcgtaaatctcacggggaagtgacacagaaggacgacatgatgatgccaatcgacttgggagagaaaaccatctatctcgtttccttctttgagggactccagcgtatcatcttatttactgaagaccctcgggtgtttaaagttacgtatgagtctgagaaggccgagttagctgagcaggaaattgctgtggcgcttcaggacgtcggaatttccttagtcaataattacacgaaacaagaggtggcatacatagggatcacaagttccgacgtggtgtgggagactaaacccaaaaagaaggccaggtggaaacccatgagcgtgaagcataccgagaagttagagagggagtttaaagagtataccgagagctctcctagcgaagacaaagtcattcaattagatacaaatgtgccagtgagattgaccccaacgggccataatatgaaaattcttcagccgcacgtaatcgcgctcaggcgaaactatctccccgcgcttaaggtggaatataatacttccgcccaccaatcgagcttccggattcagatctatagaatacagatccagaatcaaatccacggcgccgtgttccctttcgttttctatcccgtcaagcctcccaaaagcgtgactatggattctgcgcccaaaccattcacagacgtgtctatcgtcatgcgcagcgcaggtcacagccagatcagtcgtataaaatactttaaggttcttattcaggagatggacctacgcttggatttgggcttcatttacgccctaacagacttgatgaccgaggccgaagttacagagaataccgaggtggagctctttcacaaggatatcgaggccttcaaggaagaatataaaactgcaagccttgtggaccaatcacaggtgagcctgtacgagtacttccacatttcacccattaaacttcatctcagcgtgtcgttgagttccgggagggaggaagcaaaggacagcaaacagaatgggggtcttatcccagttcatagcttgaacctgctgttgaagagcattggcgccacactgacagacgtgcaagatgtcgtttttaaactggccttttttgagctgaattaccagtttcacacaacgtcagacctgcagtctgaagtcataagacactactctaagcaggcgattaagcagatgtacgttctcatcttgggtcttgatgttctgggaaaccctttcggtctcatccgggaattttccgaaggcgtcgaagcctttttttatgagccctatcagggcgccatccagggccccgaggagtttgtcgagggaatggctttgggcctgaaagccctggtcgggggggcagtgggcggattggctggtgcggcgtctaaaataaccggtgctatggcgaaaggggttgccgccatgacaatggatgaggactatcagcagaagagacgggaagccatgaataagcagcctgccggatttagggaagggatcacacgcggaggaaaaggcctggtgtcaggcttcgtgtccggcatcactggcatcgttactaagccaataaagggtgcccagaaaggaggggccgccgggttctttaagggtgttggcaaaggattggtgggcgccgtagcccgccctacgggcggaatcatagacatggcttcgtctacttttcagggcatcaagagagcaacggaaacttccgaggtcgagagcctgaggcctccacgattttttaacgaggatggtgtaatccgcccataccgacttcgtgacgggacaggcaaccagatgctgcaagtaatggaaaacggaagatttgctaaatacaagtactttacacatgtgatgatcaataaaacagacatgcttatgatcactagaagaggagtgctgttcgtcacaaagggaaccttcggtcaactcacgtgtgaatggcagtattccttcgacgaattcactaaggagcctttcattgtgcatggccgaaggctgcggatcgaggctaaggagcgcgtaaaatcagtttttcacgcgcgcgaattcggtaagatcattaactttaaaactccagaagacgcccgctggatcctgactaagttgcaggaggcaagagagccatcccccagtttatag

SEQ ID NO: 228257 - DNA, 9525 bp, Artificial Sequence
  derived and/or modified sequence
atggtgtttgaatctgtggtggtggatgtgctgaaccgcttcctgggggactatgtggtggacctggacaccagccagctgagcctgggcatctggaagggagctgtggccctgaagaacctgcagatcaaggaaaatgccctgagccagctggatgtgcccttcaaggtgaaggtgggccacatcggcaacctgaagctgatcatcccctggaagaacctgtacacccagcctgtggaggccgtgctggaggagatctacctgctgattgtgcccagcagccgcatcaagtatgaccccctgaaggaggagaagcagctgatggaggccaagcagcaggagctgaagagaattgaggaggccaagcagaaggtggtggaccaggagcagcacctgcctgagaagcaggacacctttgctgagaagctggtgacccagatcatcaagaacctgcaggtgaagatcagcagcatccacatccgctatgaagatgacatcaccaacagagacaagcccctgagctttggcatcagcctgcagaacctgtccatgcagaccacagaccagtactgggtgccctgcctgcatgatgaaacagagaagctggtgaggaagctgatccggctggacaacctgtttgcctactggaatgtgaagagccagatgttctacctgagtgactatgacaacagcctggatgacctgaagaatggaattgtgaatgaaaacatcgtgcctgagggctatgactttgtgttccggcccatcagcgccaatgccaagctggtgatgaacagaagaagtgactttgacttcagcgcccccaagatcaacctggagattgagctgcacaacatcgccatcgagttcaacaagccccagtacttcagcatcatggagctgctggagagcgtggacatgatggcccagaacctgccctacaggaagttcaagccagatgtgcccctgcaccaccacgcccgggagtggtgggcctatgccatccacggcgtgctggaggtgaatgtgtgcccccggctgtggatgtggagctggaagcacatcaggaagcaccggcagaaggtgaagcagtacaaggagctgtacaagaagaagctgaccagcaagaagcccccaggagagctgctggtgtccctggaggagctggagaagaccctggatgtgttcaacatcaccatcgcccggcagacagctgaggtggaggtgaagaaggccggctacaagatctacaaggagggcgtgaaggaccctgaggacaacaagggctggttctcctggctgtggagctggagcgagcagaacaccaatgagcagcagccagatgtgcagcctgagaccctggaggagatgctgaccccagaggagaaggccctgctgtatgaggccatcggctacagcgagacagctgtggaccccaccctgctgaagacctttgaggccctgaagttctttgtgcacctgaagtccatgagcatcgtgctgcgggagaaccaccagaagccagagctggtggacatcgtgattgaggagttcagcaccctcatcgtgcagaggcctggggcccaggccatcaagtttgagaccaagattgacagcttccacatcaccggcctgcctgacaacagcgagaagccccggctgctgagcagcctggatgatgccatgagcctcttccagatcacctttgagatcaaccccctggatgaaacagtgtcccagcgctgcatcatcgaggccgagcccctggagatcatctatgatgccaggacagtgaacagcatcgtggagttcttccggccccccaaggaggtgcacctggcccagctgacagctgccaccctgaccaagctggaggagttccgcagcaagacagccaccggcctgctgtacatcatcgagacccagaaggtgctggacctgaagatcaacctgaaggccagctacatcatcgtgccccaggacggcatcttcagccccaccagcaacctgctgctgctggacctgggccacctgaaggtgaccagcaagagccgctctgagctgcctgatgtgaagcagggcgaggccaacctgaaggagatcatggaccgggcctatgacagctttgacatccagctgacctctgtgcagctgctgtacagccgggtgggggacaactggagggaggccaggaagctgtctgtgtccacccagcacatcctggtgcccatgcacttcaacctggagctgagcaaggccatggtgttcatggatgtgaggatgcccaagttcaagatctacggcaagctgcccctcatcagcctgcgcatcagtgacaagaagctgcagggcatcatggagctgattgagagcatccccaagccagagcctgtgacagaggtgtctgcccctgtgaagagcttccagatccagaccagcaccagcctgggcaccagccagatcagccagaagatcatccccctgctggagctgcccagcgtgtctgaagatgattctgaggaggagttctttgatgccccctgcagccccctggaggagcccctgcagttccccactggagtgaagagcatccgcaccaggaagctgcagaagcaggactgcagcgtgaacatgaccaccttcaagatccgctttgaggtgcccaaggtgctgattgagttctaccacctggtgggggactgtgagctgtctgtggtggagatcctggtgctgggcctgggcgctgagattgagatccgcacctatgacctgaaggccaatgccttcctgaaggagttctgcctgaagtgcccagagtacctggatgagaacaagaagcctgtgtacctggtgaccaccctggacaacaccatggaggacctgctgaccctggagtatgtgaaggccgagaagaatgtgcctgacctgaagagcacctacaacaacgtgctgcagctgatcaaggtgaacttcagcagcctggacatccacctgcacacagaggccctgctgaacaccatcaactacctgcacaacatcctgccccagagcgaggagaagagcgcccctgtgtccaccacagaaacagaggacaagggagatgtgatcaagaagctggccctgaagctgagcaccaatgaagacatcatcaccctgcagatcctggccgagctgagctgcctgcagatcttcatccaggaccagaagtgcaacatcagcgagatcaagattgagggcctggacagcgagatgatcatgaggccttctgaaacagagatcaatgccaagctgaggaacatcatcgtgctggacagcgacatcacagccatctacaagaaggctgtgtacatcaccgggaaggaggtgttctccttcaagatggtgtcctacatggatgccacagctggcagcgcctacacagacatgaatgtggtggacatccaggtgaacctgattgtgggctgcatcgaggtggtgtttgtgaccaagttcctgtacagcatcctggccttcatcgacaacttccaggccgccaagcaggccctggccgaggccaccgtgcaggccgccggcatggccgccactggagtgaaggagctggcccagaggagcagcaggatggccctggacatcaacatcaaggcccctgtggtggtgatcccccagagccctgtgtctgaaaatgtgtttgtggccgactttggcctcatcaccatgaccaacaccttccacatgatcacagagagccagagcagccccccacctgtgattgacctgatcaccatcaagctgtctgagatgaggctgtaccgcagccgcttcatcaatgatgcctaccaggaggtgctggacctgctgctgcccctgaacctggaggtggtggtggagaggaacctgtgctgggagtggtaccaggaggtgccctgcttcaacgtgaatgcccagctgaagcccatggagttcatcctgagccaggaggacatcaccaccatcttcaagaccctgcacggcaacatctggtatgagaaggatggcagcgccagccctgctgtgaccaaggaccagtacagcgccaccagcggcgtgaccaccaatgccagccaccacagcggcggggccaccgtggtgacagctgctgtggtggaggtgcacagccgggccctgctggtgaagaccaccctgaacatctccttcaagacagatgacctgaccatggtgctgtacagccctggccccaagcaggccagcttcacagatgtgcgggaccccagcctgaagctggccgagttcaagctggagaacatcatcagcaccctgaagatgtacacagatggcagcaccttcagcagcttcagcctgaagaactgcatcctggatgacaagaggccccacgtgaagaaggccacccccaggatgattggcctgactgtgggctttgacaagaaggacatgatggacatcaagtacaggaaggtgagagatggctgtgtgacagatgctgtgttccaggagatgtacatctgtgcctctgtggagttcctgcagacagtggccaacgtgttcctggaggcctacaccactggaacagctgtggagacctctgtgcagacctggacagccaaggaggaggtgcccacccaggagagcgtgaagtgggagatcaacgtcatcatcaagaaccctgagatcgtgtttgtggccgacatgaccaagaatgatgccccagccctggtgatcaccacccagtgtgagatctgctacaagggcaacctggagaacagcaccatgacagctgccatcaaggacctgcaggtgcgggcctgccccttcctgcctgtgaagaggaagggcaagatcaccaccgtgctgcagccctgtgacctcttctaccagaccacccagaagggcacagacccccaggtgattgacatgtctgtgaagagcctgaccctgaaggtgtcccctgtgatcatcaacaccatgatcaccatcaccagcgccctgtacaccaccaaggagaccatccctgaggagacagccagcagcacagcccacctgtgggagaagaaggacaccaagaccctgaagatgtggttcctggaggagagcaatgaaacagagaagatcgcccccaccacagagctggtgcccaagggggagatgatcaagatgaacatcgacagcatcttcatcgtgctggaggccggcatcggccacaggacagtgcccatgctgctggccaagagccgcttcagcggggagggcaagaactggagcagcctcatcaacctgcactgccagctggagctggaggtgcactactacaatgagatgtttggagtgtgggagcccctgctggagcccctggagattgaccagacagaggacttccggccctggaacctgggcatcaagatgaagaagaaggccaagatggccatcgtggagagtgaccctgaggaggagaactacaaggtgcctgagtacaagacagtcatctccttccacagcaaggaccagctgaacatcaccctgagcaaatgtggcctggtgatgctgaacaacctggtgaaggccttcacagaagctgccaccggcagcagcgctgactttgtgaaggacctggcccccttcatgatcctgaacagcctgggcctgaccatctctgtgagccccagcgacagcttctctgtgctgaacatccccatggccaagagctatgtgctgaagaatggagagagcctgtccatggactacatccgcaccaaggacaatgaccacttcaatgccatgaccagcctgagcagcaagctgttcttcatcctgctgacccctgtgaaccacagcacagctgacaagatccccctgaccaaggtgggcagaagactctacacagtgcgccaccgggagagcggcgtggagaggagcatcgtgtgccagattgacacagtggagggcagcaagaaggtgaccatccgcagccctgtgcagatccggaaccacttctctgtgcccctgtctgtgtatgaaggagacaccctgctgggcacagccagcccagaaaatgagttcaacatccccctgggcagctaccgctccttcatcttcctgaagccagaagatgagaactaccagatgtgtgagggcatcgactttgaggagatcatcaagaatgatggagccctgctgaagaagaagtgccgcagcaagaaccccagcaaggagagcttcctgatcaacatcgtgcctgagaaggacaacctgaccagcctgtctgtgtacagtgaagatggctgggacctgccctacatcatgcacctgtggccacccatcctgctgaggaacctgctgccctacaagatcgcctactacatcgagggcattgaaaattctgtgttcaccctgtctgagggccacagcgcccagatctgcacagcccagctgggcaaggcccggctgcacctgaagctgctggactacctgaaccacgactggaagtctgagtaccacatcaagcccaaccagcaggacatcagctttgtgtccttcacctgtgtgacagagatggagaagacagacctggacattgctgtgcacatgacctacaacacaggccagacagtggtggccttccacagcccctactggatggtgaacaagacaggccgcatgctgcagtacaaggcagatggcatccacaggaagcacccccccaactacaagaagcctgtgctcttctccttccagcccaaccacttcttcaacaacaacaaggtgcagctgatggtgacagacagcgagctgagcaaccagttcagcattgacacagtgggcagccacggggctgtgaagtgcaagggcctgaagatggactaccaggtgggcgtgaccatcgacctgagcagcttcaacatcacccgcatcgtgaccttcacccccttctacatgatcaagaacaagagcaagtaccacatctctgtggccgaggagggcaatgacaagtggctgagcctggacctggagcagtgcatccccttctggccagaatatgccagcagcaagctgctgatccaggtggagaggagtgaagatcctcccaagaggatctacttcaacaagcaggagaactgcatcctgctgcggctggacaatgagctgggcggcatcatcgccgaggtgaacctggccgagcacagcaccgtcatcaccttcctggactaccatgatggagctgccaccttcctgctgatcaaccacaccaagaatgagctggtgcagtacaaccagagcagcctgtctgaaattgaggacagcctgcccccaggcaaggctgtgttctacacctgggccgaccctgtgggcagccggcggctgaagtggcgctgcaggaagagccacggggaggtgacccagaaggatgacatgatgatgcccatcgacctgggggagaagaccatctacctggtgtccttctttgagggcctgcagaggatcatcctcttcacagaggaccccagggtcttcaaggtgacctatgagagcgagaaggccgagctggccgagcaggagattgctgtggccctgcaggatgtgggcatcagcctggtgaacaactacaccaagcaggaggtggcctacatcggcatcaccagcagtgatgtggtgtgggagaccaagcccaagaagaaggcccgctggaagcccatgtctgtgaagcacacagagaagctggagcgggagttcaaggagtacacagagagcagccccagcgaggacaaggtgatccagctggacaccaacgtgcctgtgcggctgacccccaccggccacaacatgaagatcctgcagccccacgtgattgccctgcggaggaactacctgcctgccctgaaggtggagtacaacaccagcgcccaccagagcagcttccgcatccagatctaccgcatccagatccagaaccagatccatggagctgtgttcccctttgtgttctaccctgtgaagccacccaagtctgtgaccatggacagcgcccccaagcccttcacagatgtgtccatcgtgatgaggtctgctggccacagccagatcagccgcatcaagtacttcaaggtgctgatccaggagatggacctgcggctggacctgggcttcatctatgccctgacagacctgatgacagaggccgaggtgacagagaacacagaggtggagctgttccacaaggacatcgaggccttcaaggaggagtacaagacagccagcctggtggaccagagccaggtgtccctgtatgagtacttccacatcagccccatcaagctgcacctgtctgtgtccctgagcagcggccgggaggaggccaaggacagcaagcagaatggaggcctcatccctgtgcacagcctgaacctgctgctgaagagcattggagccaccctgacagatgtgcaggatgtggtgttcaagctggccttctttgagctgaactaccagttccacaccaccagtgacctgcagagcgaggtgatccgccactacagcaagcaggccatcaagcagatgtatgtgctgatcctgggcctggatgtgctgggcaaccccttcggcctcatccgggagttcagcgagggcgtggaggccttcttctatgagccctaccagggcgccatccagggccctgaggagtttgtggagggcatggccctgggcctgaaggccctggtgggcggcgctgtgggcggcctggccggggccgccagcaagatcactggagccatggccaagggcgtggccgccatgaccatggatgaggactaccagcagaagagaagagaggccatgaacaagcagcctgctggcttccgggagggcatcacccggggcggcaagggcctggtgtctggctttgtgtctggcatcaccggcatcgtgaccaagcccatcaagggggcccagaagggcggggccgccggcttcttcaagggcgtgggcaagggcctggtgggcgctgtggcccggcccaccggcggcatcatcgacatggccagcagcaccttccagggcatcaagagggccacagagaccagcgaggtggagagcctgcggcccccacgcttcttcaatgaagatggagtcatccggccctaccgcctgagagatggcactggaaaccagatgctgcaggtgatggagaatggccgctttgccaagtacaagtacttcacccacgtgatgatcaacaagacagacatgctgatgatcaccaggagaggagtgctgtttgtgaccaagggcaccttcggccagctgacctgtgagtggcagtacagctttgatgagttcaccaaggagcccttcatcgtgcacggccggcggctgcgcatcgaggccaaggagcgggtgaagagcgtcttccacgcccgggagtttgggaagatcatcaacttcaagaccccagaagatgcccgctggatcctgaccaagctgcaggaggcccgggagcccagccccagcctgtag

SEQ ID NO: 228258 - DNA, 9525 bp, Artificial Sequence
  derived and/or modified sequence
atggtgttcgagagcgtggtggtggacgtgctgaaccggttcctgggagattacgttgtggacctggatacctcacagctaagcctgggaatctggaagggtgccgtcgcacttaaaaatctgcagatcaaggaaaatgccttaagccagttggatgtccccttcaaagttaaagtgggacatatcgggaatctgaagcttatcataccttggaagaacctttatactcaacctgtcgaggcagtgctggaggagatttatcttttgattgtgcccagttctcgcatcaaatacgatcccctcaaggaggagaagcagctgatggaggctaagcagcaggagctcaagcggatcgaggaagccaagcagaaagtggtagatcaggaacagcatctacccgaaaaacaggatacctttgcagagaagttggtcacacaaatcatcaagaacctgcaggttaaaatatcatcgattcacattagatatgaggacgacattaccaatagagataagccactgagctttggaatctcactgcagaacctctccatgcaaaccacagatcagtattgggttccctgcctgcatgatgagactgagaaactggtcaggaagttgatcagactggataatctgtttgcctactggaatgtgaagtctcagatgttctatctcagcgactacgataatagcttagacgatctcaaaaatggcatcgtgaacgaaaatattgtgcctgaggggtacgacttcgtgttcaggccaatttctgctaatgccaaactggtgatgaataggaggagcgatttcgatttcagcgcaccaaaaattaacctagaaatagaactgcataacattgcaatagagttcaacaaaccacaatatttttcaattatggagctgttagaatccgtggacatgatggctcagaacctgccctaccgtaaatttaagccagatgtcccactacaccaccacgcacgcgaatggtgggcctatgcaatacacggagttctggaggttaatgtttgcccaagactttggatgtggagctggaaacacatccgaaaacatcggcagaaggtgaagcagtataaagaactctacaaaaaaaagctaaccagcaagaaacccccgggggagctcttggtttcgctggaagagctcgaaaagacactggacgtctttaacatcacgatagcacggcagacagccgaagtcgaagttaagaaggcaggctataaaatttataaggaaggcgtcaaagatccggaagacaataaaggttggtttagttggctgtggtcctggagtgaacagaacaccaatgagcaacagccagatgttcaaccagagacattggaagaaatgcttacccccgaggagaaggcccttctttatgaggctatcggatattccgaaactgcagtagaccctacgcttctgaagaccttcgaggccctcaaattcttcgttcatctcaaaagtatgtccatcgttctccgggaaaatcatcaaaaaccagagttggtagacattgtaatcgaggagtttagtacactgatcgtccagaggcctggggcacaggccatcaagttcgaaaccaagatagactccttccacattacaggcctccctgataacagcgaaaagcccaggctcctgagcagccttgatgacgctatgagcctcttccaaattacatttgagatcaatccactagatgagaccgtgagccagcgctgcattatcgaggcagagcccctggagatcatatatgatgcacgcacggtaaacagtatcgttgaatttttccgcccacctaaggaagtccatctggcccaactaacagctgctactcttacgaaacttgaagagttccgttcaaagactgccacagggctgttgtacattatcgagacgcagaaggtactggacttgaaaatcaacctgaaagcctcctatataatagttccacaggacggcatcttttccccaacaagcaacctattgctgctggacctaggccacctgaaggtaaccagtaaatcccgcagtgagctcccagacgtgaagcagggagaggctaaccttaaggagatcatggatcgagcctatgactctttcgacatccagctaacctcggttcaactgctctatagtcgggttggtgataactggcgggaagcaaggaaactgagtgtttccacacagcatatcctggttcccatgcattttaaccttgagttgagcaaggccatggtgttcatggacgttagaatgcctaaattcaaaatctatggcaagcttccgctcatttccctgcggatctctgataaaaagctgcaggggatcatggaactcatcgagtctattccaaaaccggaacccgtaaccgaagtctccgctcctgtgaaatccttccagatacagacgagtacatctttaggcactagccagatttctcagaagattatccccctgttggagttgccctccgtgtcagaagatgacagcgaggaagagtttttcgacgctccctgtagtcccctcgaagagcctctgcagtttccgacaggcgtgaaatccatcagaacacgaaaactgcagaagcaggattgcagtgtaaacatgacaaccttcaagatcagattcgaagtccccaaagtgctgattgagttctaccatctggtgggggattgtgaactgtccgtggttgagatcctcgttctggggctgggtgcagagattgaaatccgaacctatgacttgaaagcaaacgccttcctgaaggagttctgccttaaatgtccagaatatcttgacgagaacaaaaaaccagtctacctggttacgaccctggacaacactatggaagatctcttgactctcgagtatgtgaaggctgaaaagaatgtccccgacctcaaaagtacttacaataacgtgctacaactcatcaaggtgaacttctcctcgttagatattcatctccacaccgaggcgctgctcaacacaataaactatctccacaatattctcccacagtcagaagaaaaaagcgcccctgtgagcacaactgagacggaggacaagggggacgttatcaagaagctggcgctgaaactaagtactaatgaagacataattacactgcagattctggctgagctgtcttgcctgcagattttcatccaggatcaaaaatgtaacatcagcgaaattaaaatcgagggattggattccgagatgattatgagaccttccgaaacagagattaatgccaagttaaggaatatcatcgtcctggactctgacattaccgcaatttacaagaaggcagtgtacataactggaaaggaggttttttccttcaagatggtgtcatatatggacgccaccgccgggtcagcgtacacggatatgaatgttgtggacattcaggttaatctgatcgtgggatgtatagaagtggttttcgtgactaaattcctttactctatcctggctttcatcgacaattttcaagccgccaagcaggcactggcagaggctactgtccaggctgctgggatggccgccaccggggttaaggaattagcgcagcgcagcagtaggatggctctagatatcaacatcaaggccccagtggtggtgataccccagtcccctgtttctgaaaatgtcttcgtggccgactttggtctgattacaatgactaataccttccatatgattactgagagtcagtcaagccccccacccgtgattgacttaattactataaaactaagcgagatgcgactatataggagccggttcatcaatgatgcctaccaggaggttcttgacctgctgctccctcttaacttggaagttgtggttgagcggaatttgtgttgggagtggtatcaggaggtaccttgcttcaacgtgaacgcacaactcaagccaatggaattcatactctcccaggaagacatcacgaccattttcaaaacattacacggtaatatttggtacgagaaggacggctctgcgtcccctgcagttacgaaagatcaatactcagctactagcggagtgacaaccaacgcgtcacatcattcagggggggcaacagtcgtgacggcagcagtcgtggaagtgcactcacgagcgctgctagtgaaaaccactctgaatatcagcttcaaaacggatgatctgaccatggtgctgtattcccctggccctaagcaggcatccttcacagacgtacgtgacccctcactgaagctggcagagttcaagctcgaaaatattataagcaccctcaagatgtataccgacgggtccaccttctcctctttttctttaaagaactgtatcctggatgataagaggcctcacgttaagaaagccaccccccggatgatcggcctgacggttggcttcgataagaaagacatgatggacatcaagtaccgtaaggtgagggatggatgcgtgacagacgccgtgtttcaggaaatgtacatatgcgcatcagtggagttcctgcagaccgttgcaaacgtctttctcgaggcatacactacgggcaccgcagtggaaacctccgtgcagacatggacagctaaggaggaagtccccacacaggaatccgtgaaatgggaaatcaacgtgataataaagaaccctgagatagtgtttgtagccgacatgaccaagaacgatgccccggccctggttataaccacgcagtgtgagatctgctataaagggaatctcgagaactccactatgactgctgctataaaagatttgcaagtgcgagcttgtccattccttcccgtcaaaaggaaggggaagatcaccacggtcctgcaaccctgtgacctgttttaccagacgactcagaagggcaccgaccctcaggttatcgatatgagcgttaaatcccttacactcaaagttagccccgtgatcatcaataccatgatcacaataacatccgcactgtatacaactaaagagacaatccctgaggagactgcatccagcaccgctcatctgtgggagaaaaaggatacgaagaccttgaagatgtggtttttagaagaatcaaatgaaaccgagaaaatcgctccaacaaccgagcttgtgccaaagggcgaaatgatcaaaatgaacattgattcaattttcatagttcttgaagccgggatcgggcacaggaccgtaccaatgctgctggccaagtccaggttctccggagaagggaagaactggtcatccctaattaacctgcattgccagttggagctagaggttcattactataatgaaatgtttggtgtgtgggaacccctcctcgagcccctagaaattgatcagactgaggactttaggccttggaaccttggtatcaagatgaagaagaaggccaagatggccatcgtcgaatcagatccagaagaggaaaattataaagtgcctgagtacaagactgttatctcttttcactcaaaagatcagctcaatataactctatccaagtgcggcttggtgatgcttaacaacctggtcaaggcttttaccgaagcagctacaggttctagtgcggatttcgtgaaagacttagctcccttcatgattctgaactccctgggtctaaccatcagcgtaagcccctctgacagcttctccgtcttgaatataccaatggccaaaagttacgtgctgaaaaacggcgagagcctgtccatggactatatcagaactaaggataatgaccacttcaatgctatgactagtctgtctagtaaattgtttttcatcttgctgacccccgtgaaccactcaaccgccgacaaaatcccgctgacgaaagtggggagaaggctatacaccgtgcgacacagggagagcggcgttgaaaggtcaatcgtgtgccagatagacaccgttgaagggtcaaagaaggtcactatccgcagtcctgttcaaatcaggaatcacttctctgtccctctgtcagtttacgagggcgacactcttttgggcaccgcctctcccgagaacgaattcaacatccctctaggttcttaccgcagttttatctttctcaaacctgaagacgagaattatcaaatgtgcgagggaatcgattttgaggaaataattaagaacgatggagccctcttgaagaagaaatgccgctcgaaaaatccttccaaggagtcttttctcatcaatatcgttcccgaaaaggataacctgacatctctttccgtatatagtgaggacggctgggacctcccttacattatgcatctgtggccccctattctgcttcgtaatctcctgccctataagatcgcgtattacatcgagggcatcgagaacagtgtgttcacactgtctgaaggccattctgcacagatctgtactgctcagctcggaaaggctcggttacatctaaaactcctggattacctcaatcacgattggaaaagcgaataccacattaagcccaaccaacaggatatctctttcgtgtcattcacgtgcgtaacagagatggaaaaaacggacctggatatcgcagtccacatgacatacaacactggccagactgttgttgccttccattctccatactggatggtcaacaaaacaggaagaatgctacagtacaaagccgacggtatccatcgaaagcatccccctaactataagaagcctgtgcttttctccttccagcccaaccacttctttaataacaataaggttcagctcatggtgaccgactccgaactttctaaccagtttagtatcgataccgtcggctcccatggcgccgtcaagtgcaagggcctcaagatggattatcaggtgggcgttacaattgatcttagcagcttcaacatcaccaggattgttacttttactcccttttacatgattaagaacaaaagtaagtaccacatttcagtcgcagaagaaggcaacgataagtggctttcactagatttagagcagtgtattccgttctggcctgaatatgcctcttcaaagctgctgatccaggtggagaggagcgaggaccctccaaagagaatatactttaataagcaggagaattgtatactcctaagattggacaacgagctcggcggaatcatcgccgaagtcaacctagcggaacattctacagtgattaccttcctggattaccacgatggggccgccactttccttcttattaaccacaccaaaaacgaacttgtccagtataaccagagtagtctcagcgaaattgaggacagcctgcctccagggaaggctgtcttttacacctgggccgacccagtcggatcaaggcgattgaaatggcggtgtaggaagagccacggggaagtgacccagaaagacgatatgatgatgcccatcgacctgggggagaaaaccatctatctagtctccttttttgaaggtctccaaaggattatcctcttcactgaagatcccagggtgtttaaagttacctacgaatccgaaaaagccgagctggccgagcaggaaatagctgtggctctgcaagacgtgggaatcagtctggtgaataattacaccaaacaggaagtggcgtacatcggcataacctccagcgatgtggtttgggaaacaaagcctaaaaaaaaggccaggtggaaacctatgtctgttaagcacactgagaagctggaaagagagtttaaggagtatacggagtctagcccatccgaggacaaagttatccagctggataccaatgttcccgtccgccttacacccacaggtcataatatgaaaatactccagccccacgtgatagctctgcgtaggaattatctccccgctctgaaggtcgagtataatacaagcgcgcatcagtccagtttcaggattcagatttacaggattcagattcagaatcagatccatggtgctgttttccctttcgttttctaccccgtaaagcctccaaaatcggtcactatggactctgcgcccaagccattcaccgacgtaagcatcgttatgcggtccgccggccacagccagatctctaggataaagtacttcaaggtcctgattcaggagatggacctgcgccttgacctcggattcatttacgccttgacagatcttatgaccgaggccgaagttaccgagaacacagaggtggaattgttccacaaggatatcgaggcgtttaaggaagaatataaaactgcgagtctggtggaccaaagccaagtgtcactctacgaatattttcatatctctccaattaaactccatctgagcgtctcgctctcatcagggcgggaggaagcaaaggactcaaagcagaatggcggcttgattcccgttcattcactgaatctgctgcttaaaagcattggcgcaacgctgacagatgtgcaggacgtggtttttaaactcgcattttttgagttgaactaccagttccataccacctcagatcttcaatctgaggtgatcagacattattccaagcaggccatcaaacagatgtacgttctcatcctcgggttagacgtgctggggaacccgttcgggctgattagggaattctcagagggcgtggaagcttttttctatgaaccctatcaaggtgctattcagggacctgaggaatttgtcgaaggcatggccctcggcttgaaagccctggtcggtggcgccgtcggcggcctggccggcgcagccagcaaaatcacaggagccatggcgaaaggagtagcagctatgactatggatgaggattatcagcagaaacggcgggaagccatgaataagcagccggctggcttcagagagggcatcacaaggggcggcaagggcctggtctccgggttcgtaagtgggattacaggcatcgttaccaagcctatcaaaggggctcaaaaaggcggagccgcgggtttctttaaaggcgtgggcaagggactggttggcgcggtggcccgaccaacaggcggcatcatcgacatggcaagttctaccttccaaggcatcaaaagagccacagaaacctccgaggtggagtccttgcgtccaccaaggttttttaacgaggacggcgttatccgaccttatcggcttagggacgggaccggaaaccagatgctccaggtgatggaaaacggccggttcgccaaatataaatatttcacccacgttatgatcaataagacagacatgttgatgatcactaggagaggtgtgctgttcgtcactaaaggtacattcggtcagctgacttgcgaatggcagtacagttttgacgagttcacaaaggagccattcatcgtccacgggcgcaggctgcggattgaagctaaggagagagtgaagagtgtctttcatgccagagaatttggtaaaatcatcaatttcaagactcctgaagatgcgaggtggatcctgacaaaacttcaggaagctcgggagccaagcccaagtttatag

SEQ ID NO: 228259 - DNA, 9525 bp, Artificial Sequence
  derived and/or modified sequence
atggtctttgaatccgtggtggtggacgtgctcaatcgatttcttggtgactacgtagtagatctcgacactagccagctatctctggggatttggaagggagcagtcgccttgaagaacttgcagattaaggagaatgcgctctcccagctcgacgtcccatttaaggtgaaggtgggacatattgggaacctaaagttgattatcccttggaagaatttatacactcaaccggtcgaagctgtgctggaggaaatctaccttctgattgttccaagctcacggatcaagtacgaccctctcaaggaagagaagcagctaatggaggcaaaacaacaggaactgaaacgcatcgaggaggctaagcagaaggtggttgatcaagaacagcacttgcccgagaagcaagacaccttcgcggagaaactagtcacccaaatcattaagaacttacaggttaaaatctctagtatccacatcaggtacgaagatgatatcaccaaccgggacaaaccactctccttcggcatttctctccagaacctgtcgatgcagacaaccgatcaatattgggtaccttgtctgcatgatgagacagagaagctagtacggaaattaatccgcttagacaatcttttcgcctattggaatgtgaaaagccagatgttttacctgtctgactatgacaattcactggacgacctgaaaaatggcatagtcaatgaaaatattgtgccggaagggtatgacttcgtcttcaggcctattagtgctaacgctaaactggtcatgaaccgtagatcggactttgacttctctgccccaaaaattaaccttgagatcgagctccacaacatcgccatagagtttaataagcctcagtatttctccatcatggagctgctggaatcagtcgacatgatggctcaaaatctaccttaccgaaagtttaagcccgacgtgcccctgcaccaccacgctcgagagtggtgggcatacgcaattcacggggtgttggaagtaaatgtgtgccccagattgtggatgtggagctggaagcacatcaggaagcaccgccagaaagtcaaacagtataaggagttgtacaaaaaaaaactgacttccaaaaaacctccaggcgaactcttggtgagtctagaggaattggaaaagactctggacgtattcaacattaccatagctagacaaaccgccgaggtggaggtgaagaaggcaggctataaaatttacaaggagggcgtgaaggatcccgaagacaacaagggttggttttcctggctttggtcttggtccgaacaaaataccaatgaacagcagcccgacgtgcaacctgaaaccctggaagaaatgctgacaccggaggaaaaagctttactctatgaggccattggctactctgaaacagcagtggatcccacactgctgaaaaccttcgaggccttgaaattcttcgtgcatctaaagagcatgtccattgtcctgcgggaaaaccaccaaaaaccagagctcgtcgacattgtcatcgaagagttctctactctcatcgtgcaaagaccaggcgcacaggccattaaattcgagacaaagatcgacagcttccacatcaccggtcttcctgataacagcgagaagcccaggctactgtccagcttggacgatgcaatgtcactgttccagatcacttttgagataaaccctcttgacgaaaccgtttcccagaggtgtatcatcgaggccgaacccttggagattatttacgatgctagaaccgtgaatagcatcgtcgagttcttccgaccaccaaaagaggtgcacctcgcacagctgactgcagcaacattgactaagcttgaggaatttcggtccaagaccgcaaccggattactgtatatcatcgaaacccagaaagtgttagacctcaaaatcaatttgaaggccagctacattattgtcccacaggacggcattttctcacctaccagcaatctgctgctcctggatctggggcacttaaaggtgacttctaaatcaaggagcgagttgcctgatgtaaaacaaggagaggctaacctcaaggagattatggacagagcctacgactcattcgatattcaactcaccagtgtgcagctactttactcgcgggtaggggacaactggagagaagcgcgaaagcttagcgtatcgacacagcacattttggttcccatgcattttaatttggagttgagcaaggctatggtgtttatggacgtcaggatgccaaaatttaaaatctacggaaaactgcccttgatttcactgaggatcagcgacaagaaattgcagggaattatggagctcattgaatctattccaaaacctgaacctgtgactgaagtgtcagctcctgtgaaatctttccagatccagacttccacttccctgggtactagccaaattagccagaaaattataccacttctggagctcccctctgtcagtgaggacgatagcgaagaggagttttttgacgccccatgttcaccattggaagagcccttgcaattcccgactggtgtcaagtctatcaggacaagaaaattgcagaaacaggactgctctgtgaacatgaccacttttaagattcgcttcgaggttcctaaagtgctgattgaattttaccacttagtcggtgactgcgagttatcggtagtggaaatcctggtgcttggccttggcgctgagattgagatccgaacctacgatctcaaggcaaatgctttcctcaaggagttctgtctcaagtgtcctgagtacctggacgaaaacaagaaacccgtttatttagtcactacacttgataacacgatggaggatctcctcaccttagaatacgtcaaagctgaaaaaaatgtgcccgatctgaagagcacctacaataacgtgttacagctgatcaaggtcaactttagcagcctggacatccacctccataccgaagccctcctaaacacgatcaattacctccacaacatcctcccacagagcgaagagaagtctgcacccgtctccaccaccgagacagaggacaagggcgacgtcatcaagaagctggcactcaaactcagcactaatgaagacatcatcaccctgcaaattctcgccgagctctcctgcctccaaatattcattcaggatcagaaatgtaatattagcgaaattaagattgagggcctggactcagagatgatcatgagaccttccgagacagagatcaacgccaaactgcgaaacatcatcgtactcgactctgatatcacagccatctacaagaaggcagtgtacataaccggaaaggaagtattttcctttaagatggtgagctacatggatgcgaccgccggaagtgcctacactgacatgaatgtggtggacatccaagtgaacttgatcgtgggatgcattgaagtagtgttcgtgaccaaattcttgtactccattttagcgtttatagataacttccaggctgctaagcaggccctggcagaagccaccgtgcaggcagctggaatggcagctacaggtgtgaaagagcttgcacaacgaagttcacgtatggccctggacattaacattaaggccccagttgtagtaatccctcagtcacccgtctccgagaacgtgtttgtggcagacttcggactcataaccatgactaatactttccacatgatcacagagagtcaatcttcccctccgcctgttattgatctaattacaatcaagttatctgaaatgcgactctacaggtccaggttcattaacgacgcataccaggaggtgttggatttgctcctcccgctgaacctggaggttgtggtggaacgcaatttgtgttgggagtggtatcaggaagtaccctgcttcaatgttaacgcacaactcaagccaatggaatttatcctgtcccaggaggatatcactactatatttaagaccctgcatggtaacatctggtatgaaaaagatggaagtgcaagcccagccgtgactaaagaccagtatagcgctacctctggggtgacaacaaatgcgtctcatcacagcggtggcgcaactgtggtcaccgccgcagtggtggaagtccactcccgcgctcttctggtgaagactactttaaacatctccttcaagaccgatgacctgactatggtattgtactccccagggcctaaacaggcgtcgttcacagatgtccgagacccgtcccttaaactggccgagttcaaactggagaatatcatttcaactttgaagatgtacaccgatggaagcactttctcaagcttctcactgaagaattgtatcctggacgacaagcgacctcatgtcaagaaagccacacctcgtatgattgggttgacagttggcttcgataagaaagatatgatggatatcaagtacaggaaggttcgggatggatgcgtgactgatgctgtttttcaagagatgtatatatgcgcaagtgtggagtttctccagacagtggcaaatgtttttttggaggcatacacaaccgggaccgccgttgaaacatccgtacaaacatggacagcaaaggaggaggttccgacacaggaaagcgtaaagtgggagattaatgttatcataaagaatccagaaattgtgttcgtcgctgatatgaccaaaaacgacgcgccagccttggttatcaccacccagtgcgagatttgctacaaggggaacctggagaactcgactatgacggcagccattaaggatttgcaagttagagcctgcccttttctgcccgtcaagagaaagggtaaaattaccaccgtgttgcagccctgcgacttgttttatcagactacacagaagggtacagacccacaggtgatagacatgtccgtgaagtccctcacactgaaagttagcccggtcatcatcaacactatgatcacaattacctcggcgctgtacacaaccaaagagaccatccctgaagagaccgcgagctccactgcgcatctgtgggaaaagaaggacactaaaactttgaaaatgtggtttctggaggagtctaacgagacagaaaagatcgcccctactactgagctggtgccaaagggtgagatgattaagatgaatatcgatagtatctttattgtactggaggccggtatcggacacagaacagtcccaatgttactcgctaagagccggttttcaggagaggggaagaattggtcaagcctgattaatttgcactgccagctggagctcgaggtgcattactacaacgagatgtttggcgtttgggagccccttttggagcccttagaaattgaccagaccgaagacttcagaccatggaacctcgggattaagatgaagaaaaaagctaagatggcaatcgtggaaagcgatcctgaggaggagaattataaagtacccgagtataaaaccgtgattagcttccattctaaggaccagttgaatataactctgtcaaagtgcgggctggtcatgctgaacaatttagtgaaggcctttacggaggcagccactggcagctccgctgattttgtcaaggatctggccccttttatgatcctgaatagcctggggctcaccatatccgtttctccaagtgatagttttagtgtcctaaatatacccatggcaaagagttacgtgcttaagaacggggaatcactgagcatggattacatccgcactaaagacaacgaccatttcaatgccatgacgtccctctcctctaaactcttcttcattttactgacaccagttaaccactccacagccgataagataccactgaccaaggtcggcaggagattatacaccgtgcgccaccgcgagtctggcgtcgaaaggtctattgtctgtcagatcgacaccgtcgagggaagtaagaaggtcacaatccgctcacctgttcagatacggaatcatttctcggtgcctttgagcgtatatgaaggagacacgctgctgggcacggctagccccgagaatgagttcaacataccattgggctcctacagatcctttatcttcctgaagcccgaggacgaaaactatcaaatgtgcgagggcatcgattttgaggagataattaaaaatgatggagccctcctgaagaagaaatgtcgttctaaaaatccatccaaagagtcattcctcattaacatcgttcccgagaaggataatctgacctcgctatcagtgtactctgaggacggttgggacctgccctacatcatgcatctgtggccccctattctgcttagaaatctgctgccctacaagatagcctattatatagaggggatagagaactcagtgtttactttgtccgaggggcattcggcacagatatgcaccgcacaactaggaaaagccaggctccatctcaagctgctagattaccttaatcatgactggaaaagtgagtaccacataaagcctaaccaacaggatatcagcttcgtgagcttcacctgcgtgacagaaatggaaaagactgaccttgatatagcagtgcatatgacatacaacacgggtcagacagtggtagctttccattccccttactggatggttaataagaccggtcgcatgctccagtacaaagccgatgggattcacaggaagcatcctcctaattacaaaaaaccagtgctctttagcttccagccaaatcacttcttcaacaacaacaaagtccaactaatggtgactgacagcgagctctctaaccagttttcaatagatacagtcggctcgcatggcgcagtaaaatgtaaggggctcaagatggattaccaggtgggagtgaccatcgatttgtcatcgtttaacataacacgaatagtcactttcaccccattctatatgatcaagaataaaagtaagtaccacatttcagtcgcagaggaaggcaatgataaatggctgtcgttagacttggaacagtgtatccccttttggcccgagtacgcttcaagcaagctactgattcaagtcgaaagaagcgaagacccaccgaaacgcatctattttaataaacaggagaattgcattctgttgaggctggacaacgaactcggaggtattatcgctgaagtcaatctcgctgagcattctacagtcattactttcttagactaccacgatggcgctgcgactttccttcttattaaccatactaaaaatgagctggtccaatataaccagtcatctctgtctgagattgaagactccctcccgccaggcaaagccgtgttctacacttgggccgaccccgttgggagcaggcggctcaagtggcgctgtagaaagtcacacggggaggtgacacagaaagacgacatgatgatgccaatagatctgggggaaaaaacaatttacctggtctctttcttcgaagggcttcaaagaattatccttttcaccgaggatcctagagtcttcaaggtaacttatgaatcggagaaagcggagttggccgagcaggagatcgccgtcgcgctccaagatgtaggtatctctctggtgaacaattatacgaagcaagaggtggcctacataggaattacttccagcgacgtcgtgtgggagacaaagccaaaaaaaaaagcacggtggaagcccatgtccgtaaagcacacggagaaactggaaagggagttcaaagaatatactgagagctctccatccgaggacaaggtgatccagttggatacaaacgtgcccgtgaggctcacccctacagggcacaacatgaaaattctacagccacatgtgatcgctttacgcagaaattaccttccggctctaaaggttgagtataatacctcagcgcatcaatcttcatttcgaatccagatctacagaatccaaattcagaaccagatccacggagccgtgttcccttttgtcttttaccccgtgaagccccctaaatctgtgacgatggacagtgcacctaagccctttactgacgtctctattgttatgcgatccgccggacactcccagatcagcaggattaaatattttaaagtgctgatacaggaaatggacctgcgcctagatctgggatttatatatgctttgaccgaccttatgactgaggcagaggtcacggaaaacaccgaggtggagttgtttcacaaggatatcgaggctttcaaagaggagtataagacagcttctcttgtggatcagagccaagtctccctgtatgagtacttccacatatctcccattaagcttcaccttagcgtcagcctctcttcaggtcgcgaagaagccaaagattccaagcaaaatgggggattaatccccgtccattccctgaatctactactgaagtcgattggtgcaactttaaccgacgtccaggacgtcgttttcaaactcgccttctttgaactaaattaccaatttcatacaacttcagacctgcaatccgaggttatccggcactactcaaagcaggccattaaacagatgtatgtgttgattcttggtctcgacgttctcgggaatcccttcgggttgattcgcgagttctccgaaggggtcgaggcgttcttttacgagccataccaaggtgccatccagggcccagaggaatttgtagaaggaatggctctggggctcaaagccctcgtgggcggagccgtggggggattggccggagctgcaagcaagataactggcgcaatggcaaaaggggttgctgccatgacaatggatgaggactatcagcagaaacggagagaggcaatgaacaagcagccggctggctttcgggaaggaatcactcgaggtggcaagggactcgtgtctggctttgttagtgggatcacgggcatagtcacgaaaccaattaaaggagcccaaaagggaggggctgcgggattcttcaagggcgtcgggaagggcttggtcggggcagtagcacggccaaccggtggaatcatcgatatggctagctctacattccagggcataaagcgggcaaccgagaccagtgaggtggagagtttacgcccacctaggttctttaatgaagacggagtcatccgcccttacagactgcgcgatggtaccgggaaccagatgctgcaggtgatggaaaatgggaggttcgccaagtacaagtattttacccacgtgatgatcaacaaaacggacatgctgatgatcacacgcaggggagtcctcttcgttaccaagggaacgtttggacagctgacatgtgagtggcagtactcattcgacgagtttacaaaggagccattcattgtccacgggcgaaggttgcggatcgaagccaaagaacgggtgaaatctgtgttccacgctagagaattcggcaaaatcattaatttcaaaactcccgaggatgcaagatggatacttaccaagctgcaggaggcacgtgaaccatctccttcactgtat

SEQ ID NO: 228260 - DNA, 15320 bp, Artificial Sequence
  derived and/or modified sequence
ttcctccctctcagggctgcgcgcccaggtctgcgccgcgctccgcctccagccgcgcgcagacttgcgcacgcgtcgtgagagcgaccgcctccgtctctcgctgggctcgctagggctgcgcgttgggccagcgggggcgccgcagctgaagccgccccggagccggtgaaccgaattacctcgagggaggggcgtggggaaggcggcgggaggaggagcgcacgggccggctgccgtgcccaccacggctgaggaacatggttttcgagtcggtggtcgtggacgtgttgaaccggttcttgggggactatgtggtggacttggacacgtcccagctctctctgggcatctggaaaggagctgtggccctcaagaatcttcaaattaaagaaaatgccctgagtcaactggatgtaccatttaaagttaaagttggtcacataggtaatcttaaacttataattccatggaaaaacctttatactcaacctgttgaagccgtattggaagaaatttatttacttatagtgccttcttctagaataaaatatgatcctttaaaagaagagaaacaactcatggaagcaaagcaacaggaactgaaaagaatagaagaagcaaaacaaaaagtagttgatcaagaacaacatctgccggaaaaacaggacacttttgcagaaaaattagttacacagatcataaaaaatcttcaggtgaaaatttccagtatccatattcgttatgaagatgatatcacaaatcgggacaaaccgctgtcatttggtatttcccttcaaaatctgagcatgcagacaactgatcaatactgggttccatgtttacatgatgaaactgagaaactggttcgtaagttaatccgattggataacctgtttgcctattggaatgtgaagtctcagatgttttatcttagtgattatgataactccttggacgacttgaagaatggcattgtcaatgaaaatattgttccagaaggttatgattttgtatttcgtcccatatctgctaatgccaaacttgtgatgaatcgccgatctgattttgacttttctgcccccaaaataaacttggaaattgagttacataacatagcaattgaatttaataaaccacagtatttcagtattatggagcttcttgaatcagttgatatgatggcacaaaatctgccatataggaagttcaaacctgatgtgcctcttcaccaccatgccagagaatggtgggcttatgctatacatggcgttcttgaagtaaatgtttgccccaggttatggatgtggtcatggaagcatattagaaaacataggcaaaaagtgaagcaatataaagaactgtataaaaaaaagttaacaagtaagaagccacctggtgaacttctcgtgtctttggaggagttggaaaaaaccttggatgtctttaatataactatagctagacagacggcagaagttgaggtaaagaaagctggatacaaaatttacaaagaaggagtaaaagatccagaggataataaagggtggtttagctggctatggtcttggtcagaacaaaatactaatgaacagcaaccagatgttcaacctgaaactcttgaagaaatgttgacacctgaagaaaaagctttactctatgaagcaattggctatagtgaaacagcagttgatccaactttactaaaaacatttgaagccttgaagttttttgtccacttgaaaagtatgtctattgttctaagagaaaatcatcaaaaacctgagctggtagatattgtaatagaagaatttagcaccttaattgtgcaaagaccaggagcacaagcaataaaatttgaaactaaaatagattcatttcatattactggcttaccagataattcagaaaaaccccgcctcctgtcttcattggatgatgcaatgtcacttttccaaattacatttgagataaatccattagatgaaactgtttctcagaggtgtatcatagaagctgaacctttagaaatcatatatgatgcaaggacagtgaatagtatagtggaattcttcagacctccaaaagaggtacatctagcacagctcactgcagcaactttgacaaaactggaagaatttcgcagtaagacagcaacaggtctactgtatattattgaaacacagaaagttcttgatctcaaaattaatttgaaggcttcatatattattgtcccacaagatggaatttttagtcctacatcaaatctgcttcttttggaccttggtcatctaaaggtgacgagtaaaagtcgttctgaattaccagatgtgaaacaaggtgaggccaatcttaaagagataatggatagagcttatgattcatttgatattcaacttacaagtgtacagctgctttacagtagagttggtgataattggagagaagcacgaaaactcagtgtatctacccagcatattttggtacccatgcacttcaatttggaactgtctaaggccatggttttcatggatgtaaggatgcccaaattcaagatttatggaaagttacctcttatttctttacgaatctcagataaaaaactacaagggattatggaattgattgaaagcattccaaaacctgaaccagtaactgaagtatctgcccctgtcaaatcattccagattcaaacatctacttctttgggaacatcacagatttcacagaaaataattcctctcttggaacttccatctgtttctgaagatgattcagaggaggaattttttgatgcaccatgtagtcccttggaagaacctcttcagtttccaactggagttaaaagtattcgaaccagaaagttacaaaagcaggattgttcagtaaatatgactacatttaaaataagatttgaagtaccaaaggttttgatcgagttttatcaccttgttggagattgtgaactatctgtggtagaaattcttgttttaggattgggtgcagaaattgagattagaacatacgatttgaaagcaaatgcctttttgaaagagttctgcttaaaatgcccagaatacttggatgaaaacaagaaaccagtttatttggttacaaccctggataacacaatggaagacctgttaacgctggaatatgtaaaggctgaaaagaatgtacccgacttgaaaagtacctataacaatgttttacaattgattaaggtaaatttttcctctttggatattcatttacacactgaagcacttctgaatacaataaattatcttcataatatccttccgcaatcagaggaaaaatcagccccagtgtccactacagagactgaagacaaaggagatgtcattaaaaaattagctttaaaactatccacaaatgaagatatcattactttgcagattttagcagaattatcgtgtttacagatctttattcaagatcagaaatgtaacatttctgaaattaagattgaagggcttgattctgagatgattatgaggccttcagaaactgaaataaacgcaaagctaaggaatataattgttttagattctgatataacagctatatacaaaaaggctgtttatatcactggaaaagaagttttcagcttcaaaatggtttcttacatggatgcaactgctggttctgcatacacagatatgaatgtggttgacattcaggttaatttaatagttggttgcattgaagtagtttttgtcacgaaatttctatattctatattggcttttatagataattttcaggcagctaaacaagccttggctgaggcaactgttcaggcagctggaatggctgctactggtgtaaaagaactcgcacaaaggagttccagaatggcactggatattaacatcaaagccccagttgtggtcatcccgcagtctccagtttctgaaaatgtttttgttgctgattttggactaattacaatgacaaatacctttcatatgataacagagagccagagctctcccccacctgttattgatttgataacaataaagctgagtgaaatgcgactatacagatctcgatttattaatgatgcataccaggaagtactggatctactcctgccattaaatcttgaggttgtggttgaacgaaatttatgctgggagtggtaccaggaagttccttgttttaatgtaaatgctcagctgaaaccaatggagttcattcttagtcaagaagatataacaactatttttaaaacattgcatggcaatatatggtatgaaaaagatggtagtgcctcacctgctgtaacaaaagaccaatacagtgccactagtggagttactactaatgcttcacaccattcaggaggagcaactgtggtgacagctgctgtggtagaagtacattcacgtgccttactagttaagacaacactaaacataagcttcaaaactgatgatctcaccatggtgctgtatagtccaggtcctaaacaggcttcctttacagatgttcgtgatccttctctgaaacttgctgaatttaaattggagaatattataagtactttaaaaatgtatacagatggctcaacattttcttccttctcattaaaaaactgtattttagatgataaaagacctcatgtcaagaaagcaactcctcgaatgataggactgacagttggttttgacaaaaaagacatgatggatataaagtacaggaaagtcagagatggttgtgtgactgatgcggtctttcaagaaatgtatatttgtgcaagcgtagaatttctgcagactgttgcaaatgtctttcttgaggcctacaccacaggcactgctgtagaaaccagtgtgcaaacatggactgctaaggaagaagtacctacacaggaatcagtgaagtgggaaattaatgttattattaaaaatcctgaaattgtgtttgtagctgacatgacaaaaaatgatgctcctgctttagtcattacaacacaatgtgaaatttgctataaaggtaaccttgaaaatagtacaatgactgctgccattaaagatctccaagtgagagcctgcccgtttcttccagtcaagagaaaaggcaaaatcactactgttttgcagccctgtgacttgttttatcaaactactcagaaaggtacagatccacaagtgatcgatatgtcagtaaaatccctgacactaaaggtttcaccagttattataaatactatgattaccataacttcagcactgtatacaactaaggaaaccatcccagaagaaacggcttcttctactgcacatttatgggaaaagaaggatacaaagactttaaaaatgtggtttcttgaagaatcaaatgaaactgaaaaaatagctcccacaactgaattggtacccaaaggcgagatgataaaaatgaacattgattctatttttatagttcttgaggctggaattggtcatagaacagtacctatgcttctggcaaagtcacgtttttcaggggaaggcaaaaactggagttccctaataaatctgcactgtcagcttgagctagaagtgcattattataatgaaatgtttggtgtatgggagcctttgcttgaacccttagaaattgatcagactgaggattttagaccatggaatcttggtatcaagatgaaaaagaaagcaaaaatggccattgttgagtcagatcctgaagaagaaaactacaaagtgccagaatataaaactgtcatcagtttccattcaaaagaccaattaaacattacattatccaaatgtggtcttgtaatgttaaacaatttagtcaaggcatttacagaagctgccactggatcttcagctgacttcgtaaaggatctagcaccatttatgattttaaattcccttggacttactatttctgtttcgccaagtgattcttttagtgtactcaacattcctatggcaaaatcatatgtattgaaaaatggagaaagtttaagtatggattatatccgaaccaaggacaatgatcatttcaatgcaatgaccagcctaagcagcaaactcttcttcattcttcttacacctgttaaccattctactgctgataagattcctttaacaaaagtgggacgacgtctgtacactgtaagacacagagagtctggcgttgaaagatctattgtttgtcaaattgatacagtagaaggaagtaagaaggtcacaattcgctccccagtgcagataagaaatcatttttcagtcccactgtctgtttacgaaggggataccttattgggaactgcctcacctgaaaatgaattcaacataccattaggatcttaccgatcattcatttttctgaagccagaagatgagaactatcaaatgtgtgaaggaattgactttgaagagattataaaaaatgatggtgctcttctaaagaagaaatgtagatctaaaaacccttctaaggaatcatttctcattaatattgttccagaaaaagataatttaacatctctatcagtgtattcagaagatggttgggatttaccatacataatgcatttgtggccacctatcctgctccgaaatcttcttccttacaaaattgcttattatatagagggaattgaaaattcggtttttactctaagtgaaggacattcagcccagatttgtactgcacagttgggtaaagccaggctacatttaaaattacttgactatctcaatcacgattggaaaagtgaatatcacataaagcctaatcagcaagacattagttttgtcagttttacttgtgttacagaaatggaaaagactgatttagatattgctgtccatatgacttacaatactggtcagacagttgtggcatttcatagtccttattggatggtcaataaaactggccgcatgttacagtacaaagcagacggaattcatcgaaagcatccacctaattataaaaagccagttctcttttcttttcagccaaatcacttttttaataacaataaggttcaacttatggtaactgatagtgagttgtccaatcagttttcaattgatactgttggtagtcatggagctgttaaatgtaaaggcctgaaaatggactatcaagttggtgtcactatagacctgagcagttttaacattactagaattgtgacatttacccctttttatatgattaaaaacaaaagcaaataccatatatcagtggctgaagaaggaaatgataaatggctctctcttgatttggagcagtgtatccccttttggcctgagtatgcttctagtaaacttcttattcaagtcgaaaggagtgaagatcctcccaaaaggatatattttaacaagcaggaaaattgtattctattgcgtctagataacgagcttggaggtattatagcagaagtgaatttggccgagcattctacagttattacatttttagattatcatgatggagcagctacattcctcttaataaatcacacaaagaatgaacttgttcaatacaatcaaagttctctcagtgaaatagaagattccctccctcctggtaaagccgtgttttatacatgggctgatccggtgggctctagaaggctgaagtggagatgtagaaaaagccatggtgaagtaacacagaaggatgatatgatgatgcctatagatttgggggaaaagacaatatatttagtttcattctttgaaggtttacaacgcattattttattcactgaagatccaagggtatttaaagtaacatatgaaagtgagaaagcagagttagcagagcaagaaattgcagtggcattacaagatgttggaatttctcttgtcaacaattacacgaagcaagaagtagcctatataggcattacaagttctgatgtggtttgggaaacaaagcccaagaagaaggcaagatggaagccaatgagtgtaaagcacactgagaagttagagagagaatttaaggaatatactgaatcttctccttcagaagataaggttattcagttggacactaatgttccggttcgcctaacccctactggtcataacatgaaaattctgcagccgcatgtaatagctctacgaagaaattatcttccagcattaaaagtggaatataacacatctgcacatcaatcatcatttagaattcagatttacagaatacagatccaaaatcagatacatggtgctgtatttccctttgtgttttatcctgttaaacctccaaagtcggtcaccatggattcagcaccaaagccctttacagatgtcagtattgtcatgagatctgcaggacattcccagatatcacgtattaagtatttcaaagtattgattcaagaaatggatctcaggttagatcttgggtttatctatgctttaacagaccttatgacagaagctgaggtgactgaaaatacagaggttgagctttttcataaagatatagaagctttcaaagaagaatataaaacagcctcattagtagatcaatcacaagtcagcctctatgaatattttcatatatctcctatcaagttacatttaagtgtttcactgagttccggcagagaagaagctaaagattcaaaacaaaatggaggactgattccagttcattctttaaatcttttgctgaagagtattggtgccacactgacagatgtacaagatgtagtttttaagcttgcattttttgaactcaactatcagttccatacaacatccgatctacagtctgaagtcataagacactattcaaaacaggccattaagcagatgtatgtactcattcttggacttgatgttttgggaaatccatttggcttaattagagaattttctgaaggtgtagaagcatttttttatgaaccttaccagggagccatccagggtcctgaagagtttgtggaaggaatggcactaggacttaaggcactagttggtggagctgttggtggattggctggtgctgcctccaaaatcaccggtgctatggctaagggggtagcagctatgaccatggatgaagactaccaacagaagagaagagaagccatgaataagcaaccagctggttttagagaaggcatcactcgtggaggaaaaggcttagtttctggatttgttagtggcataacaggaattgttacaaaaccaatcaaaggagctcaaaaaggaggagcagctggtttctttaaaggtgttgggaaaggtttagtaggagcggtagcaaggccaactggaggcatcatagacatggctagcagtacatttcagggaataaaaagagctacagagacttctgaagtggagagtctgcgacctcctcggttcttcaatgaagatggagttatcagaccgtacaggttgagggatgggactggaaatcaaatgttacaggtcatggaaaatggaagatttgcaaaatacaaatattttacccatgtcatgatcaataagacagatatgctaatgataaccagacgtggtgtattgtttgtaacaaagggaacatttggacaactcacgtgtgagtggcagtatagttttgatgaatttaccaaagagccattcattgttcatgggagaagattgcgcattgaagcaaaggaacgagtgaagtctgtatttcatgccagagagtttggaaaaataattaacttcaagaccccagaggatgccaggtggatcctcacaaagctacaagaagcaagagaaccttctccgagcctctgacagagaacactgcctgaagacacacagcaataagtgattacagctcctagactaccttccaaaacctgtttgggaagcatattacagaaatgatttcaagtaccctgtattctggatgctaaaaaacaaaaacaaacaaaaaaacaaaaacaaaaaaacaaaaccagaatcaggtaaaacagctatgtgattaaaatattttaattcttcagcaattacccggttttctaaattgaatcatgcatctatttataattctaattattttgtaaaagaagacaaaattatgaatcttaagtatttgctccatctttttctctgtaatggtggagaggctgcccataattcatctccacatggagccaagtttaatgtttctagttcacattttgtacttctgtcatgcttatttcaaactccctgagtgatgggtaagaaatcaaacattgcctcagtggtatcaagagaactttggtggtggtttcttcagaatcatgaagttcttttgccagataaatattttgatattattttcctttttaatataaaggataggtttgaattgtacttaaaatgcatagcattattaaaaacaatcttttaaaatataatttataacatagattgaagcctccccttaagaaaccttaaagaaataagtatcctactcaaaaaaggaagtctgtttcagaactttagggcctttgaaatatttcctcaagcctatttcatgagatctacttggtttacccaagtcatgtttttaatagactgctaatatcaaaggagaatttttaaagccttaacaatgcctactttccattcactgttaacatggaataaacacaattcccaacatcttagatagtgtattatgcttccaacagacagtccctctcatataaagtttatgtaccctaaaatctaacccaataacctgtcccgttgccaatagattgagaatttctggtttgcttactctacagttattcaaatgagagtcacgcttttaaatttacagctcatcacagaaatcatcagctatacattagtaaaaataaggacatgaggttttctttcttggtttttgtccaagatctttgcaccttaatattaatggactgtttcaggtaaaagagaatgaatgtatgattgtgaactgtgaagagaatgatgcaggatcctatttagttactgaataatacagagtattcaatgcatgttgtatgtgccaccaagttactattaactgtttttggaattgaagactctgtatagtcaatagttgtgaaattcttctcaggctccttaaaccctcgctttgttgtaaaagctaaaataaacagcatgctatattgtaattgtatttcttgctgaccaaatctactaaatgctattgatttctctctgattactaaaacacattgtttattctcagtagtttcccccaaaatgcttttttctttgctgaacttaaattgaatcaaaccacaagtttaaaatcacatgaaagtgtgtttccatgttgacctttgtttaaaaaaaaaaaaaagtgcttattttctctgtcgctaagctcctccagttttgcttttgtcagaattaaacttaacagtagaggtagtcagaaagcttgcatcagactgtcctcatccaaaacgaaatacttcattacccaatgttatgatttcaccattctcagaaaaattacagtcccctgcctccctgggtgtagtgtcgtgaagtagaaaagccttacataaatagtaaacatagaaattcttctggtgccctctggcagccagcaggagtgggtcttgtgactaatccacatggaaaggatagtgcctgtctttcctgttcccttgccataagaaccgtgaaatctctcctttccctgccactcgtttactcatcacctcctcccatcacttccttgtctctagactagagggacccacagttttaagagctacatcatatcatttgttgttttagaagattgtcttcatctaaacaaaaacactaagaaatcagtagatcactagataatgagtcagtgtttttagcatcacattttacaatttacagtttttgtttgattctgtagcccatttttcttgaaggttagaataagaatcttcttgtatttgaaaaccatctgccctaaattacatttaactacaagaaatggctctctgctggagaaatttaagcttgtcttagttgtttggtagtggctatggaatgagaggtgttgagtcttgtgccccttccatgtattatttgctaactaactatattactaggcccttaattccagcacagcatgtcttctggtctatgataattgtgtgaggactaaggcagagtgcctgttccctgccaactctccaccagaaaatcataatcagaaagagtgactttgatttctggtacttgtgatcaaaagcagcttgtgatttcttcacatttgcaaaatactctctgagccaaaaggcacatacagttctccagtgtcttcccttttagagtatacatatttgctgcttttcctttagtgttcacaaaaatcccaaggtcagtttagtgtggctgagttgttgttatctggaccctaaacaatcattaccacctgtagacagttcttacctacccctctcctccacaatcctagtccatttggaggcaactatcctgtggcctccaagtgaataaatctttcttacacttacttacgtgatattttctatcataattatctctctcatttcttccaatagtaatagcggtaatattgttccattgaatatctatgcacctagctcatctcttagaaacatcccacatagtagcatcgtattactctctggtaaaaagaaagattaaattaaaaggactctacacagtgctgaatttcctgcacctaaattattcagttatcacttgccagtattagttgatccttcaggctatgccaagtgccccctcatgtaggcctctgtattaaaaagattgggacaaaatacttgattagtttgcctgtagaagctcaaagtgtgtaccaaatacattgacagtggatgctttcatggctcagccaacacagttcagaggaatcttttcggcttccagggcattgcttgttaccttttgtcaggatcaacccaaatcctcagggatgctgtttttccacactgtaagtcctaactcattagtgggtcatgaaatcaacttaacagctcaagaccagtatattttaaacgtgaaataataaaaaatagaggaacaatagagcatataaaatggttaagtattggttcctgaaatactgtttcagctaaatattctatttactgtgtatactgggtcacaatataaagtgtttcctgttatgaaatgcaatttaaaaaaagaaagcttgaaagactgctgcaggaggcaccggccatccagtgattgttggaagagtctggattgtgtggagcctgaccttagataaggagcagcagatccacaactcaggaagtctagagatgcttagcacttcttcttttgagtgagaagatggaatcactcttggtttctaaaatatttttcttctctgctgtgtatcgggcaacctcacatgattcagtgggaccagaaaaagcatagaaaaattagatccacacacagcacccaaaaaaggccatagtcttttgtttacctagatgtattttaacctctttaccactaagcattttactataatagaactggggacatacattgtccttttgagtccgttgaatctgcaccatctaccttttggctgattcaccatacaggtggcaaaggcctttaaaaatggggagctaatacgtagggcacattctggtagggccaaaatattcagtgtctggggggtgctatgcaaatatcaatgactttttactaaaaacagtggatttcctcatttctttaagatccaagtagaaaatgtaaataacttacattctgtatgcaggactcaatacagacttagtcaatctgattttttttggtgcttttcagtatagcgcaactctaaaaggaaacccattcaccctccttagtcctttgaagtatacttttgaaattataccttattgttaatggcaacctaatcaagctaggatttgtcggttaaaattttgattcttgtaatctgtactgtcaatttttggccactctggctgttacagcaaacttttctcccactgtcataattggtctaaagtagtatttgtttcaggactatccaaaaagcaaggccagcacattgagaagatgcagaatcctactctattacaaacctcactcatgtttcttttattgaaacctttttctactttatatttcctcttttgtaaatttttccatgtcatttaaaaaattttttactttagaattacagattagttctttttttaaagcattatggcattttcaaaaaaaaaattattttggttacccaaaaagctatacaagaaatataacttcaattttttaggttgatatgggtatatttttaaagtttttattactttatacaaatacaaattaatttatattatagtttaacacctgctatgatgatagatatcacactgctatgatagaaaatccctgtctgtcattgaactattcatttagtgttactctgatatgttaataatgtattccttctaatgaagtccttgtaacaagaaaccctgtgagattggtataatgagatatcaaataatcagaagtataattaaaatagaacatgttggaaaatcccaacatttcctgttatgccgtcatacctccggtgttcagtttgttactcaaaagttcccagttcttaggctgaaaaacattcaagtaaaaatgtagcatagattacactgaaatattttcagtatcaatgatttaatatccacacaaactattaggaatggtatctggaacttgttacaaggtcagataaactgttacagaattttagaaataattatctctgtatgtgactgtgtattacatataaaaatgaatttttcaggaaaagtgcactttaaaaatactttctcttgctagttttttaaattgatgaaatagcctgtgctgctttggaatgcttattctttctttgatgaaaatacggtcattgattatgataattttaaaaatatctatttctgcatcgctgcaggatttcctacacttttctgttcctcatccctcttttatgtgtgcttggctcagttgcctgttacacagcctctgccttggttttgtgtattctaagataatttataaacacagatatttacagtgaagttcttccttttgaaactaatcttattcttttattcctctctctaaaaattggttggccatgctcactaatgattttttttcttaacaataagcatttcttggtattggtagatttggattgcatggtaagatgactgcccattttcaccatgtatacctttgtcaaataaagatttctgatctttggtc

SEQ ID NO: 228261 - DNA, 993 bp, Artificial Sequence
  derived and/or modified sequence
atgctgaagctgaagacaaagtttgggtcctggcagacactctgcaagcgctccaatgtttggcaagataaatgcttctttaagcctttcaacatcgatcagatttcacctaataagaaagctcatccaaacatggaggccggtcctcccgaatcgggtgaatctactgacgccctgaagctgtgtccccatgaggagttcctccgcctttgtaaagagcgcgctgaagaaatctaccccataaaagaacgcaacaaccggactagactggccttgatcatttgtaacacagagtttgaccatctgccacctcgcaacggcgctgatttcgatataaccggtatgaaagagctcctggaggggttggattatagcgtggatgtcgaggagaatctgaccgcacgggatatggaatctgccttgcgagcgtttgctacaaggccagagcataagtcttctgactctacctttctagtgctgatgtcgcacgggattctcgagggcatctgtggcactgttcacgatgaaaaaaagcctgacgtgctcttgtacgacaccatatttcagatctttaataacagaaactgcctaagtctgaaggataagcccaaggtaatcattgtacaggcctgccggggcgccaaccggggcgaactttgggtccgggactcccctgcttcactggaggtcgcaagctcgcagagctccgagaacctcgaggaagacgccgtttataagacccatgtagagaaagatttcattgccttttgctctagtaccccgcataatgtttcttggcgagattccacgatgggaagcatcttcattactcagctgataacctgcttccagaaatattcatggtgctgtcacttggaagaagtatttaggaaagtgcagcagtctttcgagaccccccgggcaaaggcccaaatgccaaccatagagaggctgagcatgaccagatatttttatctattccccgggaattag

SEQ ID NO: 228262 - DNA, 993 bp, Artificial Sequence
  derived and/or modified sequence
atgctgaagctgaagaccaagtttggctcctggcagaccctgtgcaagaggagcaatgtgtggcaggacaagtgcttcttcaagcccttcaacatcgaccagatcagccccaacaagaaggcccaccccaacatggaggccggccccccagagagcggggagagcacagatgccctgaagctgtgcccccatgaggagttcctgcggctgtgcaaggagagagctgaggagatctaccccatcaaggagaggaacaacagaacccggctggccctgatcatctgcaacacagaatttgaccacctgcccccaagaaatggagctgactttgacatcaccggcatgaaggagctgctggagggcctggactacagcgtggatgtggaggagaacctgacagcccgggacatggagagcgccctgcgggcctttgccaccaggcctgagcacaagagcagtgacagcaccttcctggtgctgatgagccacggcatcctggagggcatctgtggcaccgtgcatgatgagaagaagccagatgtgctgctgtatgacaccatcttccagatcttcaacaacagaaactgcctgagcctgaaggacaagcccaaggtgatcatcgtgcaggcctgccgcggggccaacagaggagagctgtgggtgcgggacagccctgccagcctggaggtggccagcagccagagcagcgagaacctggaggaggatgctgtgtacaagacccacgtggagaaggacttcatcgccttctgcagcagcaccccccacaacgtgtcctggagggacagcaccatgggcagcatcttcatcacccagctgatcacctgcttccagaagtacagctggtgctgccacctggaggaggtgttcaggaaggtgcagcagagctttgagaccccccgggccaaggcccagatgcccaccatcgagcggctgtccatgacccgctacttctacctgtttcctggcaactag

SEQ ID NO: 228263 - DNA, 993 bp, Artificial Sequence
  derived and/or modified sequence
atgctgaagctgaagaccaagttcggcagctggcagaccctgtgcaagcggtccaacgtctggcaggacaagtgctttttcaaacctttcaacatagaccagatctcgccaaataaaaaagcacatccaaacatggaggccgggccacccgagtctggcgagtccactgacgcactgaagctctgcccccacgaagagtttttgcgactgtgcaaggagagagcagaggagatatacccaataaaggagcgcaataacaggacccggctggcactgataatctgtaataccgagtttgatcacctgccccccagaaacggcgcggactttgacatcactggcatgaaggaattactggagggactggactattcagtagatgtggaagagaacctgaccgcccgcgatatggaatctgcactgcgcgctttcgctacacggccagaacataagagctcggactcaacatttcttgtgctaatgtcgcacggcattctggaagggatttgcggcacagttcatgatgaaaagaagcctgacgtgctgctgtatgacactatctttcagattttcaataataggaactgtctttccctgaaggataagcctaaggtgattattgtgcaggcttgtagaggggcaaacaggggagagctttgggtaagggactcacctgcttcactggaggtggccagcagccagagcagcgaaaatctcgaggaggatgccgtgtacaaaactcacgtcgagaaggacttcatcgccttttgcagctcaactcctcacaacgtgagctggagggactcaactatgggaagtatcttcatcacccagctgattacttgctttcagaagtacagctggtgctgtcacttagaggaggtcttccgcaaagtgcaacaatccttcgaaacccctcgcgcgaaagcacagatgcctacaatagagagactgtccatgacgagatacttttaccttttcccaggaaactag

SEQ ID NO: 228264 - DNA, 993 bp, Artificial Sequence
  derived and/or modified sequence
atgcttaagctgaaaacgaaattcgggagttggcaaactctttgcaagaggagcaatgtctggcaggacaaatgcttcttcaagccgtttaacatcgaccagataagtccaaataaaaaggcccatccaaatatggaggcaggccctcctgaaagtggggagtccactgatgccctgaaactttgtccccacgaagaattcttgcgactgtgtaaggaacgcgcagaggaaatctatcctatcaaagagaggaataatcgcaccagactcgccttgatcatctgtaacaccgaattcgaccatctccctccccgaaatggagcggattttgatattactggtatgaaggaactgctggagggcctcgactacagtgttgacgttgaggagaacttaaccgctcgtgacatggagtccgcccttcgagcgttcgctacccggccagagcataagtcttcagactcaactttcttggttcttatgagccacggcatcttggaaggcatttgtggtaccgtgcacgatgagaagaagccagatgttcttttatacgacacaatttttcaaatcttcaacaacaggaattgtttatctcttaaggataaacctaaggtcatcatcgtacaggcctgccggggagctaataggggcgaattatgggtccgcgatagtcctgcgtctctggaagtagcctcatcacagtccagcgagaacttagaagaggatgcagtatataaaacccacgtcgagaaggatttcattgccttctgtagttccacaccccataatgttagctggcgcgattcaactatgggttccatttttataacacagttaatcacctgttttcaaaaatactcatggtgttgccacttagaagaggtgtttagaaaggtgcagcaatcattcgaaacgcccagagctaaggctcagatgcctacgattgaaaggctgagcatgactcgctatttctacctgttcccagggaactag

SEQ ID NO: 228265 - DNA, 1338 bp, Artificial Sequence
  derived and/or modified sequence
cagaagcctttgtgatctcacctgttggaatgcactaatgttttctgagccccttaaatatcttgtctacattcttttaagaagctcttcaccaactgtcagaaggcaaccacagaaaaaagccacttaaggtgttggaatccctgggcaaagatttcctcactggtgttttggataacttggtggaacaaaatgtactgaactggaaggaagaggaaaaaaagaaatattacgatgctaaaactgaagacaaagttcgggtcatggcagactctatgcaagagaagcaacgtatggcaggacaaatgcttcttcaaaccttttaacatagaccaaatatcccccaataaaaaagctcatccgaatatggaggctggaccacctgagtcaggagaatctacagatgccctcaagctttgtcctcatgaagaattcctgagactatgtaaagaaagagctgaagagatctatccaataaaggagagaaacaaccgcacacgcctggctctcatcatatgcaatacagagtttgaccatctgcctccgaggaatggagctgactttgacatcacagggatgaaggagctacttgagggtctggactatagtgtagatgtagaagagaatctgacagccagggatatggagtcagcgctgagggcatttgctaccagaccagagcacaagtcctctgacagcacattcttggtactcatgtctcatggcatcctggagggaatctgcggaactgtgcatgatgagaaaaaaccagatgtgctgctttatgacaccatcttccagatattcaacaaccgcaactgcctcagtctgaaggacaaacccaaggtcatcattgtccaggcctgcagaggtgcaaaccgtggggaactgtgggtcagagactctccagcatccttggaagtggcctcttcacagtcatctgagaacctagaggaagatgctgtttacaagacccacgtggagaaggacttcattgctttctgctcttcaacgccacacaacgtgtcctggagagacagcacaatgggctctatcttcatcacacaactcatcacatgcttccagaaatattcttggtgctgccacctagaggaagtatttcggaaggtacagcaatcatttgaaactccaagggccaaagctcaaatgcccaccatagaacgactgtccatgacaagatatttctacctctttcctggcaattgaaaatggaagccacaagcagcccagccctccttaatcaacttcaaggagcaccttcattagtacagcttgcatatttaacattttgtatttcaataaaagtgaagacaaacg

SEQ ID NO: 228266 - DNA, 993 bp, Artificial Sequence
  derived and/or modified sequence
atgctgaagctgaagaccaagttcggcagctggcagaccctgtgcaagagaagcaacgtgtggcaggacaagtgcttcttcaagcccttcaacatcgaccagatcagccccaacaagaaggcccaccccaacatggaggccggcccccccgagagcggcgagagcaccgacgccctgaagctgtgcccccacgaggagttcctgagactgtgcaaggagagagccgaggagatctaccccatcaaggagagaaacaacagaaccagactggccctgatcatctgcaacaccgagttcgaccacctgccccccagaaacggcgccgacttcgacatcaccggcatgaaggagctgctggagggcctggactacagcgtggacgtggaggagaacctgaccgccagagacatggagagcgccctgagagccttcgccaccagacccgagcacaagagcagcgacagcaccttcctggtgctgatgagccacggcatcctggagggcatctgcggcaccgtgcacgacgagaagaagcccgacgtgctgctgtacgacaccatcttccagatcttcaacaacagaaactgcctgagcctgaaggacaagcccaaggtgatcatcgtgcaggcctgcagaggcgccaacagaggcgagctgtgggtgagagacagccccgccagcctggaggtggccagcagccagagcagcgagaacctggaggaggacgccgtgtacaagacccacgtggagaaggacttcatcgccttctgcagcagcaccccccacaacgtgagctggagagacagcaccatgggcagcatcttcatcacccagctgatcacctgcttccagaagtacagctggtgctgccacctggaggaggtgttcagaaaggtgcagcagagcttcgagacccccagagccaaggcccagatgcccaccatcgagagactgagcatgaccagatacttctacctgttccccggcaactag

SEQ ID NO: 228267 - DNA, 966 bp, Artificial Sequence
  derived and/or modified sequence
atggcagactctatgcaggaaaaacagcgtatggctgggcagatgcttttgcaaacattttttaatattgaccagatctctccaaacaagaaagcccaccccaacatggaagccggccccccagaatcgggcgaatcaaccgatgctctcaagctgtgcccccatgaggagttcctgagactgtgcaaagagcgggccgaagagatttatcccatcaaggaacgcaataatcggacacgactggccctgatcatttgcaacaccgagtttgatcatctccccccgaggaatggcgctgacttcgatattacgggtatgaaagaacttctcgagggtctggactactctgtggacgtggaggaaaatctcactgctcgtgatatggaatccgcccttcgagcattcgctacgcgaccagagcataaaagcagcgactccactttcttggtcttgatgtcacatgggatcctcgaaggcatctgcggaacggtgcacgatgagaagaaacctgacgtgctcttatacgatacaatcttccagatattcaacaacagaaactgcctctccctgaaagacaagccaaaggtgattatcgtccaggcttgcaggggtgccaaccgaggcgaactgtgggttcgcgactccccagcgagtctggaggtcgcgtcaagccagagttctgagaatctcgaggaggacgctgtttacaaaacccacgtcgagaaagactttatcgccttttgctcatcaacaccccacaacgtgagctggagagactcaaccatggggtcaatctttatcactcaacttataacatgctttcagaaatactcttggtgttgccacctagaagaagtgttcagaaaggtacagcagagctttgagacaccccgggccaaggcgcaaatgcctaccatcgagagactctcaatgactaggtacttctacctattccctggcaactag

SEQ ID NO: 228268 - DNA, 966 bp, Artificial Sequence
  derived and/or modified sequence
atggctgacagcatgcaggagaagcagaggatggccggccagatgctgctgcagaccttcttcaacatcgaccagatcagccccaacaagaaggcccaccccaacatggaggccggccccccagagagcggggagagcacagatgccctgaagctgtgcccccatgaggagttcctgcggctgtgcaaggagcgggcagaggagatctaccccatcaaggagaggaacaacagaacccggctggccctgatcatctgcaacacagaatttgaccacctgcccccaagaaatggagctgactttgacatcaccggcatgaaggagctgctggagggcctggactacagcgtggatgtggaggagaacctgacagcccgggacatggagagcgccctgcgggcctttgccaccaggcctgagcacaagagcagtgacagcaccttcctggtgctgatgagccacggcatcctggagggcatctgtggcaccgtgcatgatgagaagaagccagatgtgctgctgtatgacaccatcttccagatcttcaacaacagaaactgcctgagcctgaaggacaagcccaaggtgatcatcgtgcaggcctgccgcggggccaacagaggagagctgtgggtgcgggacagccctgccagcctggaggtggccagcagccagagcagcgagaacctggaggaggatgctgtgtacaagacccacgtggagaaggacttcatcgccttctgcagcagcaccccccacaacgtgtcctggagggacagcaccatgggcagcatcttcatcacccagctgatcacctgcttccagaagtacagctggtgctgccacctggaggaggtgttcaggaaggtgcagcagagctttgagaccccccgggccaaggcccagatgcccaccatcgagcggctgtccatgacccgctacttctacctgtttcctggcaactag

SEQ ID NO: 228269 - DNA, 966 bp, Artificial Sequence
  derived and/or modified sequence
atggccgacagcatgcaggagaagcagcggatggccggccagatgctgctgcagacattttttaacattgatcagatttcccctaacaaaaaagctcatccgaatatggaggctggacctcctgagtcgggcgagtccactgacgcgttaaaactgtgtcctcacgaggagttccttcggctgtgcaaggaacgggcagaagaaatataccctatcaaggaaaggaataaccgaactcggcttgccctgatcatttgtaatactgagtttgatcacctacctccgagaaacggggcagactttgatattacagggatgaaggaactcctggaaggactggactattccgtagacgtagaagagaacctcaccgcacgcgacatggagtctgctctaagagcatttgctacacgccctgagcataaatcctccgactcaaccttcctggttctcatgtcacacggcatcttggaaggaatatgcggaactgttcacgatgagaaaaaaccggatgtcctgctgtacgatacgatcttccagatcttcaacaacagaaattgcctgagccttaaggataagcctaaggtgataatcgtccaagcatgccggggcgcgaaccgcggggagctctgggtgagggacagcccggctagtctggaagtggcctcctctcagagcagcgaaaacctggaagaggacgccgtgtacaagacccatgtcgagaaggactttatcgcgttctgctctagcacgcctcacaacgtctcatggagggattcaaccatgggcagcatcttcatcacacaactgatcacctgcttccaaaagtacagctggtgctgccacctggaggaagtatttagaaaagtccagcaatcatttgagacgccccgggcaaaagcgcaaatgcccacaattgagagactctcaatgacacgctacttctatctgtttcccggtaactag

SEQ ID NO: 228270 - DNA, 966 bp, Artificial Sequence
  derived and/or modified sequence
atggcagatagcatgcaagagaaacagagaatggcaggacagatgctactgcaaacctttttcaacatcgaccagatctcccccaacaagaaggctcaccctaacatggaggcaggacctcccgagagcggtgaaagcacagatgccctgaagctgtgtccacacgaagaatttctccgactgtgtaaagaaagagccgaggaaatttatccaattaaagagcggaacaatcgcactaggttggccctgattatctgtaataccgaattcgaccacttgccacccaggaatggcgctgattttgacataacaggtatgaaggagttgttagagggtcttgactattcggtcgatgtggaggagaatctaacggctcgtgatatggaatctgctctgcgggcattcgccactcgcccagagcataagtcatcagattcgacattcttagtcttaatgtcacacggaattctcgagggcatctgcggaaccgtgcacgacgagaagaaacctgatgtgctcctctacgacacaatctttcagatatttaacaaccgcaactgtctgagtctgaaggataagcccaaggttatcatcgtgcaagcctgcagaggcgcaaatcggggtgagttatgggtccgggactccccggcttctctagaagtggctagctcccagtctagcgaaaatctcgaagaggacgcagtgtacaaaacccatgtcgaaaaagactttatcgcgttttgctcatctactcctcacaatgtctcatggagagactcaacaatgggaagtatctttataacccagcttatcacatgcttccagaagtacagttggtgttgtcacctggaagaggtgttccgcaaagtgcaacagagtttcgaaaccccacgtgccaaggcccaaatgccgacaatcgaacggctctctatgacaaggtacttttacctcttccccggaaattag

SEQ ID NO: 228271 - DNA, 966 bp, Artificial Sequence
  derived and/or modified sequence
atggccgacagcatgcaggagaagcagagaatggccggccagatgctgctgcagaccttcttcaacatcgaccagatcagccccaacaagaaggcccaccccaacatggaggccggcccccccgagagcggcgagagcaccgacgccctgaagctgtgcccccacgaggagttcctgagactgtgcaaggagagagccgaggagatctaccccatcaaggagagaaacaacagaaccagactggccctgatcatctgcaacaccgagttcgaccacctgccccccagaaacggcgccgacttcgacatcaccggcatgaaggagctgctggagggcctggactacagcgtggacgtggaggagaacctgaccgccagagacatggagagcgccctgagagccttcgccaccagacccgagcacaagagcagcgacagcaccttcctggtgctgatgagccacggcatcctggagggcatctgcggcaccgtgcacgacgagaagaagcccgacgtgctgctgtacgacaccatcttccagatcttcaacaacagaaactgcctgagcctgaaggacaagcccaaggtgatcatcgtgcaggcctgcagaggcgccaacagaggcgagctgtgggtgagagacagccccgccagcctggaggtggccagcagccagagcagcgagaacctggaggaggacgccgtgtacaagacccacgtggagaaggacttcatcgccttctgcagcagcaccccccacaacgtgagctggagagacagcaccatgggcagcatcttcatcacccagctgatcacctgcttccagaagtacagctggtgctgccacctggaggaggtgttcagaaaggtgcagcagagcttcgagacccccagagccaaggcccagatgcccaccatcgagagactgagcatgaccagatacttctacctgttccccggcaactag

SEQ ID NO: 228272 - protein, 203 aa, Artificial Sequence
  derived and/or modified sequence
MVSTYRVAVLGARGVGKSAIVRQFLYNEFSEVCVPTTARRLYLPAVVMNGHVHDLQILDFPPISAFPVNTLQEWADTCCRGLRSVHAYILVYDICCFDSFEYVKTIRQQILETRVIGTSETPIIIVGNKRDLQRGRVIPRWNVSHLVRKTWKCGYVECSAKYNWHILLLFSELLKSVGCARCKHVHAALRFQGALRRNRCAIM

SEQ ID NO: 228273 - DNA, 612 bp, Artificial Sequence
  derived and/or modified sequence
atggtgagtacctatcgcgtcgccgtgctgggagccaggggagtcgggaagtcagccattgtgcgtcaattcctgtataacgagttttcagaggtgtgtgtgcccaccacagcaaggagactatatctacccgcggtggtcatgaatggacacgttcatgacttgcagatcctggatttcccccctatctctgcattcccagttaatacccttcaggaatgggctgatacatgctgtcgcggtcttcgatccgtgcatgcctacatattagtatacgatatttgctgctttgactcctttgaatatgtgaagaccattagacaacagatcctagagacacgggtgattggcacaagcgagacccccatcatcatcgtagggaataaacgtgatttgcagcgaggacgtgtgatcccccggtggaacgtatcacatttggtgcgcaaaacatggaaatgcgggtacgtggaatgtagcgccaaatataactggcatatcctcttgttgttttccgagctgttaaaatccgtgggatgcgccaggtgtaaacatgtacatgcagccttgcgctttcagggggccttgaggaggaaccggtgtgctattatgtag

SEQ ID NO: 228274 - DNA, 612 bp, Artificial Sequence
  derived and/or modified sequence
atggtgtccacctacagagtggccgtgctgggcgcccggggcgtgggcaagagcgccatcgtgcggcagttcctgtacaatgagttcagcgaggtgtgtgtgcccaccacagcccggcggctgtacctgcctgctgtggtgatgaatggacatgtgcatgacctgcagatcctggacttcccccccatcagcgccttccctgtgaacaccctgcaggagtgggccgacacctgctgccggggcctgcggtctgtgcacgcctacatcctggtgtatgacatctgctgctttgacagctttgaatatgtgaagaccatccggcagcagatcctggagaccagggtcatcggcaccagcgagacccccatcatcatcgtgggcaacaagagggacctgcagaggggccgggtcatcccccgctggaatgtgagccacctggtgaggaagacctggaagtgtggctacgtggagtgcagcgccaagtacaactggcacatcctgctgctcttcagcgagctgctgaagtctgtgggctgtgcccgctgcaagcacgtgcatgctgccctgcgcttccagggcgccctgcggaggaacagatgtgccatcatgtag

SEQ ID NO: 228275 - DNA, 612 bp, Artificial Sequence
  derived and/or modified sequence
atggtgagcacctaccgggtggccgtgctgggcgcccggggcgtgggcaagagcgctatagtgcgccaattcctctacaatgaattttctgaggtttgtgtgcccaccaccgctcggcgcttgtacttgccagccgttgtgatgaacggccacgtgcatgacctgcaaatcttagactttccccctatttctgctttccctgtcaacaccctgcaggaatgggctgatacgtgttgccggggattgcgaagcgtgcatgcatatatcctggtgtatgatatctgttgtttcgattccttcgagtacgtgaagacaataagacagcagattttagaaaccagggtgattggcacaagcgaaacgcccattatcatagtgggaaataaaagagacctgcagcgaggacgcgtcattccaaggtggaatgtatctcacctggtgcggaagacctggaaatgtgggtacgtggagtgttccgcaaagtacaactggcatatattattgctgtttagcgaactcctgaagtccgtcggttgcgcccgttgtaaacatgtccacgccgccctgagattccagggggccttgcggaggaacaggtgtgccataatgtag

SEQ ID NO: 228276 - DNA, 612 bp, Artificial Sequence
  derived and/or modified sequence
atggtgagcacatacagggtggccgttctcggagcacggggtgtgggtaaatccgctatcgtgcggcaattcctgtataacgagttctcagaggtttgtgtccccacaactgctcgaaggctgtatcttcccgcagtggtgatgaatggtcatgtccacgacctccagatcctggacttccctcctatttcagctttccctgtgaacaccctgcaggagtgggcagacacctgctgcagggggcttcgctctgtgcacgcctacatcctggtctatgacatctgttgctttgattcctttgagtacgtgaaaacaatcagacagcagatcttggagacccgggttattggaacctcagaaacacctattatcattgtcggtaataagcgggatctgcagaggggtagagttataccaaggtggaacgtgagccaccttgtgcgcaagacctggaaatgtggatatgtcgagtgttccgcaaaatataactggcacatcctgctgctcttcagtgagctccttaaatctgtgggctgcgctcggtgcaagcacgtgcatgcagcactgaggtttcagggcgcacttcgtaggaaccgctgcgctatcatgtag

SEQ ID NO: 228277 - DNA, 3194 bp, Artificial Sequence
  derived and/or modified sequence
gcgctccggagggagagctggggctggaggttcctaccccctcggcggcccgcatctgcccccgcgcgcccgccctgagcccgccccgactgggcaggcgggggagcccctacttctctccccccgggcgggggagccggggggcagcgccggagcccggggggagctcagccccgccgaccggccggccagggcagggggcagctaggacggccccggtccaggtggaggccgcagagggcccagggcaagcagaggcagcaatggttggtcctgacggtggctgagcccccagcccctggaatatgcagcccgggggagccccagacagcggcaaggacgaggtggcggagtggggcgggaggcatggtctccacctaccgggtggccgtgctgggggcgcgaggtgtgggcaagagtgccatcgtgcgccagttcttgtacaacgagttcagcgaggtctgcgtccccaccaccgcccgccgcctttacctgcctgctgtcgtcatgaacggccacgtgcacgacctccagatcctcgactttccacccatcagcgccttccctgtcaatacgctccaggagtgggcagacacctgctgcaggggactccggagtgtccacgcctacatcctggtctacgacatctgctgctttgacagctttgagtacgtcaagaccatccgccagcagatcctggagacgagggtgatcggaacctcagagacgcccatcatcatcgtgggcaacaagcgggacctgcagcgcggacgcgtgatcccgcgctggaacgtgtcgcacctggtacgcaagacctggaagtgcggctacgtggaatgctcggccaagtacaactggcacatcctgctgctcttcagcgagctgctcaagagcgtcggctgcgcccgttgcaagcacgtgcacgctgccctgcgcttccagggcgcgctgcgccgcaaccgctgcgccatcatgtgacgcctgcgcgcccctcgggctgcaccggcactggccgagcggagggcggggccgtactgcggggctggggcggggagcgggcgggaaatggaactgtgacggtcccggcctgaggcccctgcagccacgcacctcccggtgagaagcagagcgcgagagggagccctccgtaactgcccagccctgccccttgcccccgtggcttcctgggacagccgccttcagtgctgtatttagtgcagtgcccggcccgacccgcgggggtgccacagccttttgggatgggggtgagcgtgcaatggaggctgggggtggcgaggtgccgccttggccgggcccccacgtgtcttctccagaatgtgtctgtctttgcctggtgtcttcctttcccgtgtccgcccaccccagcgtctgttggtacttacctgtctcacctaccctccagtcccctcccagctccgctcacagggctctcatttcgtccatccccttgtcgcagatcctggcagcttctttgtgaggccaggccttctgactgtcagcaccaccggcacagggcagagatgcgggtggcccaaggaccacgatcaaggggtccgggggaccgaggtcccagatcagtgaggggagaaggttgagctctccggcttccagggagacctccccgcccagcagcccccagagacacaacaacctaccttccagccttaactcgatggtccgtccctgccaggtgcccctcactcttcctgaccccaaagccagatcaccccctgggttaaaactttttttcttttttttttttggacagagtgtggaaagggagccccccaaaggatagcttctttttcatgatgccaggctccagtcctttattcccttctgcatactgcaatctgatctgtcagactggggaatgttgggttctggggtctggtcgtgggcaggatggtgcccagaagggggttaggttgtcccagtgaaaattctgttgccccgtctcaaccccatctgactaccccagactctgcctgcctcagatctcagactatcctgattaatctggggaagaacagagccagggaaagaatggtggggacccctgtacttgggggagacacacctgcatcttcctcctgccacagatggaggccctcaggatctgacaccctcttgtcccaacaccagtcagccctataccctaactcactccaccccattttctccggctgcctggccgggtttctacctctcgtcaccggagctgatcactgtcagttttgtaccgatttagaaataacaataataatgaagattctaggaatggcatgagggattgatgggggacttggagggagggacaagtggtgccctgtcccctgctcccctggccaaagaaagctgtccttgaggctgagccctcagccctggcctggtggggggacagcaaggtcccttgttataagaggggcagagaggacaactccgctttggccaacctagccaaggctgcagcatatagaccaggaaatcaggtagcccagactggtgatggagcagagtctgggggaagggtcgtgggtggggaatttatcaccaacatccattgtagggggaatctatgattctgcttccccagcggattcccactctgtccaccaagtggggggtagcacagcctcacagcaaccgccctgaccttgggcagtctagtgttcctgcattctagtccctgctgtgctgcaggactttgggcaagtgacctgccctctgtgagcctccctctgacacagaggaggtggctccccttccccacaccttagagtggctgggagggtaacaaagagggcctgcccctttagtctcctgcacccctgccccctggttcaccagagggagcggatgaaggatggcagcatctcacatgccccatcaccaactctgaggcacctggggtgggggggcggagcccaggcctctggctgctcccctgtgggagccattggaatgtatcccctgacaggcccccttccgcctccacctcaacccaggtcttggatttcaggtccctccacccccattctgagtctctgtccttctccttccacccgctcccagggtttcccaccacagggtctggaagtgtgtgtgacgcccattgagctgttacccgaagtcagattaaaaatcagggagtgttttccctcgtttctgta

SEQ ID NO: 228278 - DNA, 612 bp, Artificial Sequence
  derived and/or modified sequence
atggtgagcacctacagagtggccgtgctgggcgccagaggcgtgggcaagagcgccatcgtgagacagttcctgtacaacgagttcagcgaggtgtgcgtgcccaccaccgccagaagactgtacctgcccgccgtggtgatgaacggccacgtgcacgacctgcagatcctggacttcccccccatcagcgccttccccgtgaacaccctgcaggagtgggccgacacctgctgcagaggcctgagaagcgtgcacgcctacatcctggtgtacgacatctgctgcttcgacagcttcgagtacgtgaagaccatcagacagcagatcctggagaccagagtgatcggcaccagcgagacccccatcatcatcgtgggcaacaagagagacctgcagagaggcagagtgatccccagatggaacgtgagccacctggtgagaaagacctggaagtgcggctacgtggagtgcagcgccaagtacaactggcacatcctgctgctgttcagcgagctgctgaagagcgtgggctgcgccagatgcaagcacgtgcacgccgccctgagattccagggcgccctgagaagaaacagatgcgccatcatgtag

SEQ ID NO: 228279 - protein, 302 aa, Artificial Sequence
  derived and/or modified sequence
MRGPSGALWLLLALRTVLGGMEVRWCATSDPEQHKCGNMSEAFREAGIQPSLLCVRGTSADHCVQLIAAQEADAITLDGGAIYEAGKEHGLKPVVGEVYDQEVGTSYYAVAVVRRSSHVTIDTLKGVKSCHTGINRTVGWNVPVGYLVESGRLSVMGCDVLKAVSDYFGGSCVPGAGETSYSESLCRLCRGDSSGEGVCDKSPLERYYDYSGAFRCLAEGAGDVAFVKHSTVLENTDESPSRRQTWTRSEEEEGECPAHEEARRTMRSSAGQAWKWAPVHRPQDESDKGEFGKRAKSRDMLG

SEQ ID NO: 228280 - DNA, 909 bp, Artificial Sequence
  derived and/or modified sequence
atgcggggcccctcgggggccttgtggctgctactcgctttgagaactgtgttaggaggaatggaagtgagatggtgcgccacaagtgaccctgagcagcacaaatgtgggaatatgtctgaggccttccgagaggctggcattcagccgtcactcctctgtgtgcggggcacttccgccgatcactgtgtgcaactcatagccgcacaggaggctgatgccattacactggacggcggagcaatctatgaagcaggcaaggaacacggcctgaaacctgtggtgggcgaggtgtatgatcaggaagtgggtacaagctattatgcagtggcggtggtccgacgatcctcacatgtcactatcgatacccttaaaggcgtaaagagctgtcacacaggaatcaatagaaccgtgggttggaatgtgccagttggctatttggtggaatctgggagacttagcgtaatgggctgtgacgtgctgaaggcagtgagcgactattttggaggatcctgtgtgccaggtgctggtgaaacttcctattccgaaagcctatgcaggctctgccgtggggattctagcggagaaggcgtatgtgacaagtcccctttagagcgctattatgactacagtggcgcattccgttgtctggctgagggggctggcgatgtagcttttgtcaagcacagtaccgtcctggagaacaccgacgagtccccatctcgtaggcagacttggactcgtagcgaagaggaggaaggcgagtgtcctgcacatgaggaggctcgcagaaccatgcggagcagcgccggccaggcttggaaatgggccccagtgcatcggccacaggacgagtctgacaagggcgaattcgggaaaagagccaagagccgggacatgctgggatag

SEQ ID NO: 228281 - DNA, 909 bp, Artificial Sequence
  derived and/or modified sequence
atgaggggccccagcggggccctgtggctgctgctggccctgaggacagtgctgggcggcatggaggtgcgctggtgtgccaccagtgaccctgagcagcacaagtgtggcaacatgtctgaggccttccgggaggccggcatccagcccagcctgctgtgtgtgcggggcaccagcgctgaccactgtgtgcagctgattgctgcccaggaggctgatgccatcaccctggatggaggagccatctatgaagctgggaaggagcacggcctgaagcctgtggtgggggaggtgtatgaccaggaggtgggcaccagctactatgctgtggccgtggtgcggcgcagcagccacgtgaccatcgacaccctgaagggcgtgaagagctgccacacaggcatcaacagaacagtgggctggaatgtgcctgtgggctacctggtggagagcggccgcctgtctgtgatgggctgtgatgtgctgaaggctgtgtctgactactttggaggcagctgtgtgcctggggccggggagaccagctacagcgagagcctgtgccgcctgtgccgcggggacagcagcggggagggcgtgtgtgacaagagccccctggagcgctactatgactacagcggggccttccgctgcctggccgagggcgctggagatgtggcctttgtgaagcacagcacagtgctggagaacacagatgagagccccagccggcggcagacctggaccaggtctgaggaggaggagggagaatgtcctgcccacgaggaggcccggaggaccatgaggagcagcgctggccaggcctggaagtgggcccctgtgcaccggccccaggatgaaagtgacaagggggagtttgggaagagggccaagagccgggacatgctgggctag

SEQ ID NO: 228282 - DNA, 909 bp, Artificial Sequence
  derived and/or modified sequence
atgcggggccccagcggcgccctgtggctgctgctggccctgcggaccgttttgggcggcatggaagtgcgatggtgtgctacaagcgaccccgagcagcacaagtgcggcaatatgtccgaggcatttagagaagctggtatccagccatctctcctttgtgttcgaggaaccagtgccgaccactgtgtgcaactgatcgctgcccaagaggcagatgccattacattggatgggggggctatttacgaggccggtaaagagcatggcctgaagccagttgttggagaggtgtacgaccaggaggtcgggacgtcttattatgccgtcgcagtagtgcgaagaagttcccacgttaccatcgatacccttaagggcgtcaagagctgtcacacgggcattaaccgcacagtgggatggaacgtcccagtgggctatttggtcgagtccggcagactgtccgtcatgggatgcgacgtgctgaaggccgtgagtgattacttcggcgggagttgcgtcccaggcgctggcgaaactagttactctgaatccctctgtaggttgtgtcggggggacagctcaggagagggggtctgcgacaagagtcccctggagcggtattatgactatagtggcgcctttcggtgcctcgctgagggtgccggagatgttgcatttgtcaaacatagcacggtactggagaacaccgacgagagcccgtcacggcgccaaacctggaccaggagcgaagaagaggagggcgagtgcccagctcacgaagaggcgagaaggacgatgagatcatctgccgggcaggcatggaaatgggctcctgtacaccgcccgcaagacgagagcgataagggtgagttcgggaaaagagccaaaagccgggacatgctgggttag

SEQ ID NO: 228283 - DNA, 909 bp, Artificial Sequence
  derived and/or modified sequence
atgagaggcccatcaggcgcactgtggttattgctcgcattgagaaccgtcctggggggaatggaggttcggtggtgtgcaactagtgaccctgagcagcacaagtgcggcaacatgtcagaggccttccgcgaggcagggatacagcctagtctcttatgcgttcgaggtacatcagccgaccattgtgtgcagctaatcgctgcccaggaggcagatgcaatcaccttggacgggggagcgatctatgaggccggaaaagaacacggtttgaagcctgtggtgggagaggtctacgatcaggaggtcggtaccagctattacgccgtagcggtggtcaggagaagttcacatgtgaccattgacaccctaaagggcgtcaagtcttgtcacactgggattaaccgtactgtgggctggaacgtccccgttggctacctggtagagagcgggcgattaagcgttatggggtgtgatgttctcaaggccgtttctgactacttcggaggcagctgcgtccccggagcaggggaaacttcctacagtgaatcactttgcagactgtgtagaggagacagcagtggagagggagtgtgtgacaagtcgccactggagcgttattatgattatagcggcgcatttcgatgtttagccgagggtgccggagatgtggcttttgtgaagcacagcacagttcttgaaaataccgatgagtctccctccagaagacagacatggacccgatccgaggaagaggagggtgagtgcccagcacatgaggaggccaggcgaaccatgcgttcttcggcaggccaggcgtggaagtgggctcctgtccatagaccccaggatgagtctgacaagggcgagttcggtaagagggctaagtccagggatatgctgggatag

SEQ ID NO: 228284 - DNA, 1650 bp, Artificial Sequence
  derived and/or modified sequence
agggggagcagggaggaagcccggctgctgcggacctcctcggacccggacccagccccagcccggccccagccagccccgacggcgccatgcggggtccgagcggggctctgtggctgctcctggctctgcgcaccgtgctcggtggcatggaggtgcggtggtgcgccacctcggacccagagcagcacaagtgcggcaacatgagcgaggccttccgggaagcgggcatccagccctccctcctctgcgtccggggcacctccgccgaccactgcgtccagctcatcgcggcccaggaggctgacgccatcactctggatggaggagccatctatgaggcgggaaaggagcacggcctgaagccggtggtgggcgaagtgtacgatcaagaggtcggtacctcctattacgccgtggctgtggtcaggaggagctcccatgtgaccattgacaccctgaaaggcgtgaagtcctgccacacgggcatcaatcgcacagtgggctggaacgtgcccgtgggctacctggtggagagcggccgcctctcggtgatgggctgcgatgtactcaaagctgtcagcgactattttgggggcagctgcgtcccgggggcaggagagaccagttactctgagtccctctgtcgcctctgcaggggtgacagctctggggaaggggtgtgtgacaagagccccctggagagatactacgactacagcggggccttccggtgcctggcggaaggggcaggggacgtggcttttgtgaagcacagcacggtactggagaacacggatgaaagtccatcacgaaggcaaacatggaccagatctgaggaggaagaaggcgagtgccctgcacacgaggaagcacgtaggacgatgcgctctagtgctgggcaagcctggaaatgggctcccgttcacaggccccaggacgagtctgacaaaggagaatttggaaaacgggcaaagagtagggatatgttgggttaagaatcagctctttcaaacttggggttttttttgagatgggggtctcaccatgttgcccaggctggtctcaaacccccagcctcaactgatcctcgcatctcagcctcctgagtagctgggatgacaggcgtgcacctggcagctttttcaaagtgttgatggtaatctgaggcaatctaagggagtcattttttaagtgactttatacagaaagattggtaagagccaaggggtagaagtggcataaatgtctaaagcagggaagtgacaggactttcattgttcttggctgaggagaagcgggagtggctgatggaagcacctaaatgatgcctttgtctgtgggaaggcaaatgatgccccagagctctaaccaaaggttttgcagccgccgaaaaacaggaaagttgggaagcgggggtaggactacactgaatcattaacagtgctgtaaactaccatgtggccattaacaatgacctttagggagttttcctaaacgatcactctggtgcgggtgtttggttttgttttaaaatagctttgcagtgaaagctttcatgaccatacaaattatcttttttcttcctatttccttgtagaggtttttttcctccttgtcttaaggtcataaaaatattgttatgtggga

SEQ ID NO: 228285 - DNA, 909 bp, Artificial Sequence
  derived and/or modified sequence
atgagaggccccagcggcgccctgtggctgctgctggccctgagaaccgtgctgggcggcatggaggtgagatggtgcgccaccagcgaccccgagcagcacaagtgcggcaacatgagcgaggccttcagagaggccggcatccagcccagcctgctgtgcgtgagaggcaccagcgccgaccactgcgtgcagctgatcgccgcccaggaggccgacgccatcaccctggacggcggcgccatctacgaggccggcaaggagcacggcctgaagcccgtggtgggcgaggtgtacgaccaggaggtgggcaccagctactacgccgtggccgtggtgagaagaagcagccacgtgaccatcgacaccctgaagggcgtgaagagctgccacaccggcatcaacagaaccgtgggctggaacgtgcccgtgggctacctggtggagagcggcagactgagcgtgatgggctgcgacgtgctgaaggccgtgagcgactacttcggcggcagctgcgtgcccggcgccggcgagaccagctacagcgagagcctgtgcagactgtgcagaggcgacagcagcggcgagggcgtgtgcgacaagagccccctggagagatactacgactacagcggcgccttcagatgcctggccgagggcgccggcgacgtggccttcgtgaagcacagcaccgtgctggagaacaccgacgagagccccagcagaagacagacctggaccagaagcgaggaggaggagggcgagtgccccgcccacgaggaggccagaagaaccatgagaagcagcgccggccaggcctggaagtgggcccccgtgcacagaccccaggacgagagcgacaagggcgagttcggcaagagagccaagagcagagacatgctgggctag

SEQ ID NO: 228286 - protein, 476 aa, Artificial Sequence
  derived and/or modified sequence
MKFQGPLACLLLALCLGSGEAGPLQSGEESTGTNIGEALGHGLGDALSEGVGKAIGKEAGGAAGSKVSEALGQGTREAVGTGVRQVPGFGVADALGNRVGEAAHALGNTGHEIGRQAEDVIRHGADAVRGSWQGVPGHNGAWETSGGHGIFGSQGGLGGQGQGNPGGLGTPWVHGYPGNSAGSFGMNPQGAPWGQGGNGGPPNFGTNTQGAVAQPGYGSVRASNQNEGCTNPPPSGSGGGSSNSGGGSGSQSGSSGSGSNGDNNNGSSSGGSSSGSSSGGSSGGSSGGSSGNSGGSRGDSGSESSWGSSTGSSSGNHGGSGGGNGHKPGCEKPGNEARGSGESGIQNSETSPGMFNFDTFWKNFKSKLGFINWDAINKNQVPPPSTRALLYFSRLWEDFKQNTPFLNWKAIIEGADASSLQKRAGRDDQNYNYNQHAYPTAYGGKYSVKTPAKGGVSPSSSASRVQPGLLQWVKFW

SEQ ID NO: 228287 - protein, 808 aa, Artificial Sequence
  derived and/or modified sequence
MSSKQATSPFACAADGEDAMTQDLTSREKEEGSDQHVASHLPLHPIMHNKPHSEELPTLVSTIQQDADWDSVLSSQQRMESENNKLCSLYSFRNTSTSPHKPDEGSRDREIMTSVTFGTPERRKGSLADVVDTLKQKKLEEMTRTEQEDSSCMEKLLSKDWKEKMERLNTSELLGEIKGTPESLAEKERQLSTMITQLISLREQLLAAHDEQKKLAASQIEKQRQQMDLARQQQEQIARQQQQLLQQQHKINLLQQQIQVQGHMPPLMIPIFPHDQRTLAAAAAAQQGFLFPPGITYKPGDNYPVQFIPSTMAAAAASGLSPLQLQKGHVSHPQINQRLKGLSDRFGRNLDTFEHGGGHSYNHKQIEQLYAAQLASMQVSPGAKMPSTPQPPNTAGTVSPTGIKNEKRGTSPVTQVKDEAAAQPLNLSSRPKTAEPVKSPTSPTQNLFPASKTSPVNLPNKSSIPSPIGGSLGRGSSLDILSSLNSPALFGDQDTVMKAIQEARKMREQIQREQQQQQPHGVDGKLSSINNMGLNSCRNEKERTRFENLGPQLTGKSNEDGKLGPGVIDLTRPEDAEGGATVAEARVYRDARGRASSEPHIKRPMNAFMVWAKDERRKILQAFPDMHNSNISKILGSRWKSMSNQEKQPYYEEQARLSKIHLEKYPNYKYKPRPKRTCIVDGKKLRIGEYKQLMRSRRQEMRQFFTVGQQPQIPITTGTGVVYPGAITMATTTPSPQMTSDCSSTSASPEPSLPVIQSTYGMKTDGGSLAGNEMINGEDEMEMYDDYEDDPKSDYSSENEAPEAVSAN

SEQ ID NO: 228288 - DNA, 8865 bp, Artificial Sequence
  derived and/or modified sequence
gtcactttcatgaattcaaaggcaatttaccagtgatttctgggtgctggggctgatattttttgtgcatatttaagaatgtcttccaagcaagccacctctccatttgcctgtgcagctgatggagaggatgcaatgacccaggatttaacctcaagggaaaaggaagagggcagtgatcaacatgtggcctcccatctgcctctgcaccccataatgcacaacaaacctcactctgaggagctaccaacacttgtcagtaccattcaacaagatgctgactgggacagcgttctgtcatctcagcaaagaatggaatcagagaataataagttatgttccctatattccttccgaaatacctctacctcaccacataagcctgacgaagggagtcgggaccgtgagataatgaccagtgttacttttggaaccccagagcgccgcaaagggagtcttgccgatgtggtggacacactgaaacagaagaagcttgaggaaatgactcggactgaacaagaggattcctcctgcatggaaaaactactttcaaaagattggaaggaaaaaatggaaagactaaataccagtgaacttcttggagaaattaaaggtacacctgagagcctggcagaaaaagaacggcagctctccaccatgattacccagctgatcagtttacgggagcagctactggcagcgcatgatgaacagaaaaaactggcagcgtcacaaattgagaaacaacggcagcaaatggaccttgctcgccaacagcaagaacagattgcgagacaacagcagcaacttctgcaacagcagcacaaaattaatctcctgcagcaacagatccaggttcagggtcacatgcctccgctcatgatcccaatttttccacatgaccagcggactctggcagcagctgctgctgcccaacagggattcctcttcccccctggaataacatacaaaccaggtgataactaccccgtacagttcattccatcaacaatggcagctgctgctgcttctggactcagccctttacagctccagaagggtcatgtctcccacccacaaattaaccaaaggctaaagggcctaagtgaccgttttggcaggaatttggacacctttgaacatggtggtggccactcttacaaccacaaacagattgagcagctctatgccgctcagctggccagcatgcaggtgtcacctggagcaaagatgccatcaactccacagccaccaaacacagcagggacggtctcacctactgggataaaaaatgaaaagagagggaccagccctgtaactcaagttaaggatgaagcagcagcacagcctctgaatctctcatcccgacccaagacagcagagcctgtaaagtccccaacgtctcccacccagaacctcttcccagccagcaaaaccagccctgtcaatctgccaaacaaaagcagcatccctagccccattggaggaagcctgggaagaggatcctctttagatatcctatctagtctcaactcccctgccctttttggggatcaggatacagtgatgaaagccattcaggaggcgcggaagatgcgagagcagatccagcgggagcaacagcagcaacagccacatggtgttgacgggaaactgtcctccataaataatatggggctgaacagctgcaggaatgaaaaggaaagaacgcgctttgagaatttggggccccagttaacgggaaagtcaaatgaagatggaaaactgggcccaggtgtcatcgaccttactcggccagaagatgcagagggaggtgccactgtggctgaagcacgagtctacagggacgcccgcggccgtgccagcagcgagccacacattaagcgaccaatgaatgcattcatggtttgggcaaaggatgagaggagaaaaatccttcaggccttccccgacatgcataactccaacattagcaaaatcttaggatctcgctggaaatcaatgtccaaccaggagaagcaaccttattatgaagagcaggcccggctaagcaagatccacttagagaagtacccaaactataaatacaaaccccgaccgaaacgcacctgcattgttgatggcaaaaagcttcggattggggagtataagcaactgatgaggtctcggagacaggagatgaggcagttctttactgtggggcaacagcctcagattccaatcaccacaggaacaggtgttgtgtatcctggtgctatcactatggcaactaccacaccatcgcctcagatgacatctgactgctctagcacctcggccagcccggagcccagcctcccggtcatccagagcacttatggtatgaagacagatggcggaagcctagctggaaatgaaatgatcaatggagaggatgaaatggaaatgtatgatgactatgaagatgaccccaaatcagactatagcagtgaaaatgaagccccggaggctgtcagtgccaactgaggagtttttgtttgctgaattaaagtactctgacatttcacccccctccccaacaaagagttattaaagagcccgcatgcatttgtggctccacaattacatcagcagaatggtcttaattgtttcgtaaagtgtgagacagattaagttttccctgatttttcatgaacttgagttttttgttgttattgttattgttgttgttgttgtttttttaatttaggtgaagacatattaaatatgagacaccaggacttgaaacttatctcaacccgtagatgtcttacaagtcttatatttttgtcttactttttttttcttttggatgttgataaaggtttaagttactgttttagatggggttaaacattctcactcaggtatgctgtgccggcctacaggttgtgaatgtgtttttattctgaattattttagaaaacaactgaggatttcatattgtgaaacagaacaagtccacggcgtgtgcagctgcatgtagagcatattcaaaaggcctcggaattccaattttccatttgtagagttaaactttgaatgtgccaaactttttcgtaacttttgaatcttaatattttgaaagtcttaaaggagacactgcaaagtcttagacaatctttggcatcttaaaataaaatagcaaaccaacatttttttttccagaaaatggtaaggtactcaggaatctggagacaagatattgtaaggaatgaacaaggttgccacagtgcatggacccaattgtgtttgcctgttgacgtgccatcagtgcgtgatgtggtatgacatacacacaccagagcaaccgccacaccagatatcgacagagtggtcttctctgcctgagaccacctctcactacatccattatccctttgcctttaaccctgacattcagtcttaacacattttatcttaaataatttattcattccagaatgtcaagggtccacttgctatttattttttttcaattgttggtggcattaatttaataattcttgtttttcaccttccttccccgaagaacttttccgtccttttcacctccttctcctgtgtacatagtgattttatgtccccagaacgcctggaagcatttctgaaaccaagatattattaaaaacctattattgtttttaatcatgagtatgtatctggctgcagggctgtgtattgggatataggtatatagtcttacacttaaacaggtatgcccctgaggttcactgtgacctcaagtcttttgccagaattttcccctaattcagttcacaagtggtagggtctgcatcagtggcatttccccctgaattccattcagcagcaaggttcaacagtggtgactgccaggcaggagagtcctgcggccaaacctgaagcccaaggctcgtgggccatgcaggaatctcagtgaagctgtcatgggctggcacctttacactgagttgccttgtcccagctggcacatctagggagttcattgcaaaatccccaggatgcaaaaagccacatgacagcctcagagcaaagatggtggcaaatagtcatgatacatctagagaatgaaagaaaactgtaagggaggagaaggaggggaatacattccctatatgggatgttcctactgttaactctggggaacagatagctccgggggcagcagatgagttcctctggctgactctatctgtagccacatggggacctgcctacgtgtgaacaaaatgaactgcacttatcacacaaggatttctttgaagacatgctactggggtgggaagcagtgaggttttattccccatctcctaactacagggagctctgccatgtcattttggccttcctgaaactaggacaggttgtctatcggggggcttcccccagagaggtttagtgggagaatgtcagtgaatgggatagttcacctcatgggacaacccagaatctgatcaccaggacataggaatggccccatcagatttcttgagccattttgtcacttggaagaaaatagtgtacctttgtatttatttaagagtgctcaaggcctaatagcaataaacaggtctagccaagaaattacaagctattctgttagctgggagtgctctctataagctgattaaggtactgataggaactctttgttattcatgttggttggggattagaaatttgtttttgtacatttatttcaaatgaggaggaggtcattttttctctcaaaaaatgagtatttattattgtcttactgatttctttgattatatacctctcctcctcagttcactcttgttttttttctttctctttggcttttgcttttgctctctctcacttctttcttattttgttgcattggtagagtgttgtatggctagcattgtattgtatgtaattaattttgcacaaaagcaaacatttagcatagtaggttaattttgtttgtttttatgaccatgccaaaataatattctgggctggtggagaacaaaggactgttctttaggactgaaacttgattttgctcatagtaagtaaaaaaaaacaaaaaacacacacactcacagatgttgtttcgtaagtgttataagcactggatataaatggtattttttatcacttctgactaatgtgaaactgttgtacgaaaactacatgaacaaaagtcatctgtttcgactcgtgtgggcttgcctcacagttgccggatttgagtcatttttatgtcttgttatttcatttatttatgcaaaatacatgtgtgtatgaacactttgttttagctccagctctgcctcagtactggggttcatttacttttagccatgttcttaaaaatgaaaggctattcaggaatgatctgattgtaaacgtctttttcattggatcaaacagtaatgctgtatttgaatctaaattttgtgtataagcagtttatttattagccaagtttggctctaaatatccatggaaattaagaatgacaatcatagggatcaattcattttattttcagtggggcttaaacaaagtttatatgactttaccatctcattttagatttttctaattgtgtaaatataacatagaaatagaatttatttttggttcatgaatacttagtgagatataagttatgtatttcctttttgttctctatccatagatgttggtccaaactgaaagttgatgagtcactgtgcctctcggggtagtgagttatcagctacagtgagagagcagtgtttggcctgcagctgggacagcaaaacgtttcaccagggttctcatgcagttcagaacccactgtccacagatccagacatttcccttttttcttacagaaagttgatgattggacatactaaatttccactacagttaggagacagtcagtttgctttgggagtctacataaatcttctaagatagttctgtgaccatttaatagcaagaagcatgaatgccactacaaaggcaaaaatccacctctgagatcggccgttaataaacgtcccgtcatgtcagtttagattcaagaatgttaagcaactttgtttttgcggtgctccctatttcatagtatcttcaaatcaaaaataaaaattatctccattttgttaaagaacttacagggtcagggttctccttgtcacttagaattgggacactgccaggcaatcctctcccaaaaaaaaaaaaaaaaaaaaatagccatatggaatggaaggaaaaggagaaaagaaggaagaaaggaaaaaagtaggaagggagagagaaaaaaaaggtcgctttgcggatacgagccgctaggctgacaacttttctatttcattggcagatatgaagcagtgtcttttccagtaaggtacggaagctttgttgttttcatgtgtacccagctcagccttttagaagcacctcggtttgcttcattaggtatttgatactctccagccttgtcctcaggcctgatttgatttgccagggtcctgacaccaaagcccaggccaagttctaaattcaggtgtgggctcacagtgctattgagcttgtcgaattctggcctcccctgaacattagccccacgggagcctgagggtgtttgaaaagggcgtgatcactctagggctgaaattaaaggctgctttcttttccttctgaagccaggctgcttcttcggagtacaccctcctgagccaggagcacaagcactagcagaaagcagggattgtttcaggaaagcccatttaccctcagtaggaaggcagcctggtcacttgaacagcacagctgaggctgcttctctcaatttactcattttgcaaagaattgacctctaccaactcattagggagaggaaaaagaatcacttagtaattttaaatcatatgagaagtcctgtaccaagtgccaacaactgcaaagaaatgcagctagaggaatgtattgaaattactactgggtcttcctttttaatgagaaaatgacaaaaatggttgctgtagccctgcctgattttgtacacgtttgtctaagaattgagttggcacttaagctcacttctcaaagtataataatattgtatgacctcatttgtcctttcacaaaagcacttgcatcatttccttaagtcatctgctccctgacatgttttcttccctaataaacaacttctgtctgttattcctgccaatgatgttctgtttctgatgccatatcctattgagcgtgcccctgtactaatatcattgaaaatattgatatgcaaacacatttccttttcatccccattctatctttccctttggggacagattgctttccaaaagctcatgaacaaatatttggaatgctggtacctttggggcagaggtaagggtgggcggggtgggggcagaaaggtaatgcttaatgcagataactcttctaatcagtgtccatggcaatatgaacgcttgaagaaaactcagtgacatatcttgctcagtagtttcttattcctgaagaaccacaagcataaagtgaggcctcagtgctggtgctcttggagtatggggaatgtgcaaatatttaactgttttgtatgctgcacattgcaggtctgctcatgtgcattctccctttgtcttcctttgtcatatgtgtttttgcttttttgaaagtgcagtctttattgtaccctcctccagcttgtagcaaattagaatgcttagcatttatgttcattcattattgtatttgccatgtaaaatttttattaccttagacaagcttataagctgttactacataacttatcttactgtaactcttttatttcccccgacgttgtaatttgtttgtgatgtatattgtgaaattgtattctatgttaatttaatcagcacaattcactgacatgctggactgacatgctggctgctgtttcaaagtgtaaagtttgtgtagggctgttgggacaactgcaactctgttgtcaaggtactgtgctttggttcctatagcaacactgggtgtggcccttgaattgctaagggcatttaatacatcctggagcaaattttaactgcagattttctttgtagaaattctatgtataatgcaggtacctacttggcccatggctggtaactatttgggcaattagaaaaaaagaaaaaaacataaaaactagtgtctattgctgctttgaatatgtttgaaagtctgaaaatgtaaatagtttatcaaaaaaaaatcttgtacagtccagtgtaaagtttttaaatgaccttaagggttgccatcacatctttctcacactctcctcttgataataataataataaaaagtttgctaaggattaaagaaatgggaaaaataaaaaaaatctcttcaaatttacaggaatgaatcattgttcttagctttgttgcatacacaaacttcttggattttgttgtgcagtattgacgtgagataaagctcaacattgaataatctttcagtggtacttttcaaagtcttcccctcctctgcctcataattaagggaaaagacaaaattgaaagacacactgtctttatctatcctggtgtatgttggcaccttagctactttttttttttcctttttgcacaaggtgctttcctgatatgttcaacatgccatctttgggtgataatgtatatgccgtgatggggctcaggccccttaggggagtgtctataagaactgcctatttatgctcatttacctcaagactgtcctctctaccctaatctagttgtcatcactccatcttttgtactgctgttgacacttacaaattaaagataaattttgttttatga

SEQ ID NO: 228289 - DNA, 2427 bp, Artificial Sequence
  derived and/or modified sequence
atgagcagcaagcaggccaccagccccttcgcctgcgccgccgacggcgaggacgccatgacccaggacctgaccagcagagagaaggaggagggcagcgaccagcacgtggccagccacctgcccctgcaccccatcatgcacaacaagccccacagcgaggagctgcccaccctggtgagcaccatccagcaggacgccgactgggacagcgtgctgagcagccagcagagaatggagagcgagaacaacaagctgtgcagcctgtacagcttcagaaacaccagcaccagcccccacaagcccgacgagggcagcagagacagagagatcatgaccagcgtgaccttcggcacccccgagagaagaaagggcagcctggccgacgtggtggacaccctgaagcagaagaagctggaggagatgaccagaaccgagcaggaggacagcagctgcatggagaagctgctgagcaaggactggaaggagaagatggagagactgaacaccagcgagctgctgggcgagatcaagggcacccccgagagcctggccgagaaggagagacagctgagcaccatgatcacccagctgatcagcctgagagagcagctgctggccgcccacgacgagcagaagaagctggccgccagccagatcgagaagcagagacagcagatggacctggccagacagcagcaggagcagatcgccagacagcagcagcagctgctgcagcagcagcacaagatcaacctgctgcagcagcagatccaggtgcagggccacatgccccccctgatgatccccatcttcccccacgaccagagaaccctggccgccgccgccgccgcccagcagggcttcctgttcccccccggcatcacctacaagcccggcgacaactaccccgtgcagttcatccccagcaccatggccgccgccgccgccagcggcctgagccccctgcagctgcagaagggccacgtgagccacccccagatcaaccagagactgaagggcctgagcgacagattcggcagaaacctggacaccttcgagcacggcggcggccacagctacaaccacaagcagatcgagcagctgtacgccgcccagctggccagcatgcaggtgagccccggcgccaagatgcccagcaccccccagccccccaacaccgccggcaccgtgagccccaccggcatcaagaacgagaagagaggcaccagccccgtgacccaggtgaaggacgaggccgccgcccagcccctgaacctgagcagcagacccaagaccgccgagcccgtgaagagccccaccagccccacccagaacctgttccccgccagcaagaccagccccgtgaacctgcccaacaagagcagcatccccagccccatcggcggcagcctgggcagaggcagcagcctggacatcctgagcagcctgaacagccccgccctgttcggcgaccaggacaccgtgatgaaggccatccaggaggccagaaagatgagagagcagatccagagagagcagcagcagcagcagccccacggcgtggacggcaagctgagcagcatcaacaacatgggcctgaacagctgcagaaacgagaaggagagaaccagattcgagaacctgggcccccagctgaccggcaagagcaacgaggacggcaagctgggccccggcgtgatcgacctgaccagacccgaggacgccgagggcggcgccaccgtggccgaggccagagtgtacagagacgccagaggcagagccagcagcgagccccacatcaagagacccatgaacgccttcatggtgtgggccaaggacgagagaagaaagatcctgcaggccttccccgacatgcacaacagcaacatcagcaagatcctgggcagcagatggaagagcatgagcaaccaggagaagcagccctactacgaggagcaggccagactgagcaagatccacctggagaagtaccccaactacaagtacaagcccagacccaagagaacctgcatcgtggacggcaagaagctgagaatcggcgagtacaagcagctgatgagaagcagaagacaggagatgagacagttcttcaccgtgggccagcagccccagatccccatcaccaccggcaccggcgtggtgtaccccggcgccatcaccatggccaccaccacccccagcccccagatgaccagcgactgcagcagcaccagcgccagccccgagcccagcctgcccgtgatccagagcacctacggcatgaagaccgacggcggcagcctggccggcaacgagatgatcaacggcgaggacgagatggagatgtacgacgactacgaggacgaccccaagagcgactacagcagcgagaacgaggcccccgaggccgtgagcgccaactag

SEQ ID NO: 228290 - DNA, 2427 bp, Artificial Sequence
  derived and/or modified sequence
atgagttccaaacaagccacctctcctttcgcctgtgccgccgatggggaagacgctatgacacaagatcttacgtctcgcgaaaaagaagagggcagcgatcaacatgtggcaagccatctccctctccaccccatcatgcataataagccgcacagcgaggagctgcccactttggtgtccaccatccagcaggacgccgattgggatagcgttctctcaagtcagcaacggatggagagcgaaaataacaagctttgtagcttgtatagctttcggaatacctcgacatcccctcataagccggatgaggggtcccgggacagggagatcatgacttctgtaaccttcggcaccccggaaagaaggaaaggctcacttgctgacgtggtagatactctgaagcagaagaagcttgaggagatgacaaggaccgaacaggaggattcaagttgcatggaaaaactactttcaaaggactggaaagaaaagatggagcggttgaatacttctgagctactgggcgaaatcaaaggcacccccgagtcgttggctgaaaaagagcggcagctgtccacaatgatcactcagctgatatcgctgcgggagcagctgctcgcagcccacgacgagcagaaaaaactagcagcatcacagatcgagaaacagaggcagcagatggatttagcgaggcagcagcaggagcagattgccagacaacaacaacagttgttgcaacagcagcacaagatcaacttactgcagcagcagattcaggtgcagggccatatgccccctttgatgatccccatctttcctcacgaccaacggacattagcggcagctgctgccgcccagcaggggtttctgttcccacctggcattacatataaaccaggggacaattaccccgtccagttcataccatctacgatggccgccgccgcagcttccggcctatcgcccttacagttacaaaaaggtcacgtgagtcacccacaaatcaaccagcggctaaagggtctctctgatcgctttggacggaatctggatacattcgagcacgggggcgggcattcatacaaccacaaacagatcgaacagctgtatgcagcccagttggcttctatgcaagtttcccctggagccaagatgccttccacaccgcagcctccgaacactgcgggaaccgtcagtccgacaggaatcaaaaacgaaaagcgcggcacaagtcctgtcacccaggtgaaggatgaggcagccgcccagccactcaatctgagctctagaccgaaaactgcggagcccgttaagtctccaactagccccacacagaatctgtttccagcaagcaagactagccctgtaaacctaccaaacaaaagctcgattccttctcctatcggcggcagtctggggaggggatctagcctagacattctgtcctcactcaattctccagctctcttcggtgatcaggatacagtgatgaaggccattcaggaagctcggaagatgagagaacagatccaacgggaacaacagcagcagcaaccgcatggggtcgacggcaagttatcctctatcaacaacatgggtctgaactcttgtcgaaacgagaaggagcgtacaagattcgaaaaccttggaccgcaactgacagggaagagtaatgaggacggaaagctcggccccggagtgattgaccttaccagacccgaggatgccgaaggcggggctacggttgcggaagcccgcgtgtacagagacgcccgaggaagggccagtagcgagccccacatcaagaggccgatgaacgcatttatggtgtgggcgaaagatgagaggaggaagattctgcaagcttttcccgatatgcacaattccaatattagcaagatcctcgggagccgctggaagtccatgtcaaatcaggagaaacagccttactatgaagagcaggcccgattgagcaaaattcatctcgaaaaatatcccaattacaagtacaaaccccgtccaaaaagaacttgcattgttgacggcaagaaactgagaatcggagaatacaagcagctaatgagatctagacgccaggagatgcgccagttctttacagtcggtcaacagcctcaaatcccgatcaccaccggaactggggtcgtctatccaggggctatcacgatggccaccaccactcccagtccacaaatgacgagcgattgctcgagtacttctgcgagtccagagccatctttgccggtaatccagagtacctacggcatgaaaactgacggcgggtcgctggctggcaacgagatgatcaacggggaagacgagatggaaatgtacgatgactacgaagacgacccaaaatctgactacagctccgaaaatgaggctccagaagccgtgtctgctaattag

SEQ ID NO: 228291 - DNA, 2427 bp, Artificial Sequence
  derived and/or modified sequence
atgagcagtaagcaagcaacgtcccccttcgcatgcgccgcagatggggaggatgccatgacacaggatctgaccagtcgcgagaaggaagagggatccgatcagcatgtggctagccacttgcctttacacccaatcatgcataacaagccgcactctgaggagctccctacccttgtctcaactatacaacaggatgctgattgggattctgtgctgtcttcccagcaaagaatggagagtgagaacaacaaattatgctcactctattcattccggaatacttctactagtccgcacaagcctgacgagggcagtcgtgaccgcgaaataatgacaagtgtgaccttcgggacgcccgagcggcgcaaagggtccttagcagacgtagttgatacgcttaaacagaagaagctggaagaaatgacacggaccgagcaagaggacagttcatgtatggaaaagctcctaagcaaggattggaaggaaaagatggagagactgaatacaagcgagctgctgggcgagatcaaaggtactcctgagagtttggccgaaaaagagcgccagcttagcacaatgattacgcagttgatttccctgcgggaacagttgcttgcagcgcatgatgaacagaagaagctagctgcctcccagatcgaaaagcagcggcaacagatggacctcgcgcgacaacaacaggagcagatcgccaggcaacaacagcaactcctgcagcagcagcataaaatcaacctcctgcagcagcagattcaggtgcaggggcacatgccaccactcatgatccccatcttcccccatgatcagcgaacgctggccgccgctgccgctgcacaacaggggttcttatttccacctggaataacctacaagccaggggataattacccagttcaatttatcccatcaaccatggctgcagcagccgccagtggcctgtccccactgcagctgcaaaagggtcatgtgtcgcacccccagatcaaccagcgccttaagggtctgtccgacaggttcgggagaaaccttgatacatttgaacatggcggaggacactcttacaaccacaaacaaatcgagcagctgtatgctgcccagctcgcaagcatgcaggtttctcctggtgcgaagatgccctccaccccacagccgcccaacacggctggaaccgtttctcctacaggcataaaaaacgaaaagaggggcacctctcccgtcacccaggtcaaggacgaggccgccgcacaacccttaaacctctcctccagacccaagaccgccgaacccgtaaaatcaccaacgtctcctactcagaacctgtttccagcttcaaaaacttcaccagtgaatcttccaaataaatcaagcattccgtctcccatcggtggttctctgggcagaggctcctcactcgacatactgtcctcattgaattctcctgccctctttggagatcaggacaccgtgatgaaagccattcaggaagcacggaagatgagagaacagattcagagagagcagcagcagcagcagccacacggtgtagatggcaaactaagctctataaataacatgggcctgaattcatgccgcaacgaaaaggaacggactaggttcgaaaatctgggcccccaactgacagggaaaagcaatgaggatggaaaactggggccaggggtcatcgatctaactagacctgaggacgcagaaggcggggcgactgtggctgaagcccgagtgtaccgagatgcgcgggggagggcctctagtgagccccatattaaaagaccaatgaatgcattcatggtctgggcaaaggatgaacgcaggaaaattttgcaagcattccccgatatgcacaatagcaatattagtaaaatcctcggatctcgatggaagtcaatgagcaatcaggaaaagcaaccttactacgaagagcaggctaggctgtccaaaatccacctcgagaaatatcctaattataagtataaaccacgccccaagagaacttgcattgtcgatggaaagaagctgagaatcggggaatacaagcagctgatgcgaagccggaggcaggagatgcggcaattcttcactgtcggccagcagccacaaattccaattactacaggcaccggagtggtgtatcctggcgcgatcacaatggccaccacgacgccatcacctcagatgacaagcgattgcagtagcacatccgctagcccagagccatccctgcctgttattcaaagcacctacggcatgaagactgacgggggttcgttagcaggaaacgagatgattaacggagaggatgaaatggagatgtacgacgactatgaggatgacccgaagtcagactactcctccgaaaacgaagcccctgaggccgtttccgccaactag

SEQ ID NO: 228292 - DNA, 2427 bp, Artificial Sequence
  derived and/or modified sequence
atgagcagcaagcaggccaccagcccctttgcctgtgccgcagatggagaagatgccatgacccaggacctgaccagccgggagaaggaggagggcagtgaccagcacgtggccagccacctgcccctgcaccccatcatgcacaacaagccccacagcgaggagctgcccaccctggtgtccaccatccagcaggatgctgactgggacagcgtgctgagcagccagcagaggatggagagcgagaacaacaagctgtgcagcctgtacagcttcaggaacaccagcaccagcccccacaagccagatgagggcagccgggaccgggagatcatgacctctgtgaccttcggcaccccagagaggaggaagggcagcctggctgatgtggtggacaccctgaagcagaagaagctggaggagatgaccaggacagagcaggaggacagcagctgcatggagaagctgctgagcaaggactggaaggagaagatggagcggctgaacaccagcgagctgctgggggagatcaagggcaccccagagagcctggccgagaaggagcggcagctgagcaccatgatcacccagctgatcagcctgcgggagcagctgctggccgcccatgatgagcagaagaagctggccgccagccagatcgagaagcagaggcagcagatggacctggcccggcagcagcaggagcagatcgcccggcagcagcagcagctgctgcagcagcagcacaagatcaacctgctgcagcagcagatccaggtgcagggccacatgccacccctgatgatccccatcttcccccatgaccagaggaccctggccgctgctgctgctgcccagcagggcttcctgttccccccaggcatcacctacaagccaggggacaactaccctgtgcagttcatccccagcaccatggctgctgctgctgccagcggcctgagccccctgcagctgcagaagggccacgtgagccacccccagatcaaccagaggctgaagggcctgagtgaccgcttcggcaggaacctggacacctttgaacatggaggcggccacagctacaaccacaagcagatcgagcagctgtatgctgcccagctggcctccatgcaggtgtcccctggggccaagatgcccagcaccccccagccccccaacacagctggcaccgtgagccccaccggcatcaagaatgagaagaggggcaccagccctgtgacccaggtgaaggatgaggccgccgcccagcccctgaacctgagcagccggcccaagacagctgagcctgtgaagagccccaccagccccacccagaacctcttccctgccagcaagaccagccctgtgaacctgcccaacaagagcagcatccccagccccatcggcggcagcctgggccggggcagcagcctggacatcctgagcagcctgaacagccctgccctgtttggagaccaggacacagtgatgaaggccatccaggaggccaggaagatgagggagcagatccagcgggagcagcagcagcagcagccccacggcgtggatggcaagctgagcagcatcaacaacatgggcctgaacagctgcagaaatgagaaggagaggaccaggtttgagaacctgggcccccagctgaccgggaagagcaatgaagatggcaagctgggccctggggtcatcgacctgaccaggccagaagatgctgagggcggggccaccgtggccgaggcccgggtgtacagagatgcccggggccgggccagcagcgagccccacatcaagaggcccatgaatgccttcatggtgtgggccaaggatgagaggaggaagatcctgcaggccttcccagacatgcacaacagcaacatcagcaagatcctgggcagccgctggaagtccatgagcaaccaggagaagcagccctactatgaggagcaggcccggctgagcaagatccacctggagaagtaccccaactacaagtacaagccccggcccaagaggacctgcatcgtggatggcaagaagctgagaattggagagtacaagcagctgatgaggagccggcggcaggagatgaggcagttcttcaccgtgggccagcagccccagatccccatcaccactggaactggagtggtgtacccaggggccatcaccatggccaccaccacccccagcccccagatgaccagtgactgcagcagcaccagcgccagccctgagcccagcctgcccgtcatccagagcacctacggcatgaagacagatggcggcagcctggccggaaatgagatgatcaacggggaggatgagatggagatgtatgatgattatgaagatgaccccaagagtgactacagcagtgaaaatgaggcccctgaggccgtgtctgccaactag

SEQ ID NO: 228293 - DNA, 2427 bp, Artificial Sequence
  derived and/or modified sequence
atgagcagcaagcaggccaccagccccttcgcctgcgccgccgacggcgaagatgctatgacccaggatcttacctcgcgcgaaaaagaggagggatccgaccagcacgtggccagtcatcttcccctgcacccaatcatgcacaacaagcctcactccgaagaactgcccacactcgtttcaactattcagcaggatgctgactgggactctgtgttgtcgtcacagcagagaatggaatctgagaacaataagctgtgctccttatatagtttcaggaatacatccaccagtccccataagccagacgaaggtagtagggaccgcgagatcatgacgtcggtgacttttggtactcctgagagacggaaaggatcccttgctgacgtcgtagatacgctgaaacagaagaagctggaggagatgacgcgcaccgaacaggaggattcttcctgtatggaaaagctcctgagtaaggattggaaggagaaaatggagaggttaaatacgagcgaattactgggtgagataaaggggactccggagtccctggcagaaaaagagaggcagcttagcactatgattacacagctgatttccttgcgggagcagctgttagcagctcatgacgagcagaagaaactcgccgctagccagattgaaaaacagcggcaacaaatggatctggcccgccagcagcaggagcagattgcgcggcagcagcaacagctgctacaacagcagcacaaaatcaatttgctgcaacagcagattcaggtacagggccacatgcccccacttatgatcccaattttcccacacgatcagaggacgttggccgctgccgcagcagcccaacaggggtttctgttcccacctggaatcacctacaagcctggggacaactaccccgtccaatttatcccatctacgatggccgccgccgccgcgagtggcctgtcccctctgcagttacagaagggacacgtgagtcacccacaaatcaaccaaagattaaagggactcagcgatcgattcggacgaaacttggacacttttgagcacggaggaggtcactcctataaccacaaacagattgaacagctgtatgcagcacagctcgcttcaatgcaggtttctcccggcgcgaagatgcctagcactccacagccacctaacacagctggcacggtctcacccactgggatcaagaacgaaaagcgcgggacctcaccagtaacccaagtcaaggacgaggcagcagctcagcctttaaacctttcttctcgacccaaaacagctgagccagtaaagtctccaacctcccctacccagaatctgtttccagcctcaaagacctcacctgtgaacttgcccaacaagtcaagcatcccttctcccatcggtgggagtctgggtaggggctcaagcctcgacatactgagcagtttaaactcccccgcattgtttggggaccaggacacagtgatgaaggccatacaggaggcacgtaaaatgagagagcagatacagagagagcagcagcaacagcagccacatggtgttgatggtaagctatctagcataaataacatgggtttgaattcctgcaggaacgagaaagaacggactagatttgagaacctgggccctcagctgaccggaaaatctaacgaggacggcaagttaggcccaggggttatcgatttgacgaggcccgaagacgcagagggaggagctaccgtagctgaagcccgcgtgtaccgagacgctcgtggacgcgctagcagcgagccgcacatcaagcgccctatgaatgcgtttatggtgtgggccaaagacgagcgccggaagatcctccaggcgtttcctgacatgcataactcgaatattagcaaaatattaggtagccgttggaagtcgatgagcaatcaggaaaagcaaccttactatgaagaacaggccaggctgagcaaaatacatctggaaaaataccccaactacaagtacaaaccaaggcccaagagaacatgcatagtggatgggaagaagttacgtataggggaatacaaacagctgatgaggtcgcgtcgccaggagatgagacagttcttcaccgtcgggcagcagcctcagatccccatcaccaccgggactggcgtggtttaccctggtgctattactatggccacaaccacacccagtcctcagatgactagcgattgtagttccactagcgcatcgcccgagccctcactgcctgtgatccaatctacttacggaatgaagactgatggtggaagtcttgcgggaaacgagatgattaacggagaggacgagatggaaatgtacgatgactacgaagatgatccaaagtccgactacagctctgagaacgaggcccctgaagccgtgagcgccaactag

SEQ ID NO: 228294 - DNA, 2427 bp, Artificial Sequence
  derived and/or modified sequence
atgagcagcaagcaggccaccagccccttcgcctgcgccgccgacggagaggatgctatgacacaggatttaactagtcgagagaaggaagagggaagcgatcagcatgttgccagtcacctgccattacacccaattatgcacaacaaaccgcatagtgaagagctccctacacttgtgtccactatccagcaagatgcagactgggacagcgtactctcatctcaacaacggatggaatccgaaaataacaaactgtgttcattgtattctttccgtaataccagcacttccccccacaagcctgacgaggggagtcgcgatcgtgagattatgaccagcgttactttcggaacccccgagcgtcgcaaagggtctcttgcagatgtggtggacacattgaagcaaaaaaaactggaggagatgactagaaccgagcaggaggacagttcgtgcatggaaaaactcctttctaaagactggaaagagaagatggagcgactgaacacatccgaattattgggagaaatcaaggggactccagagtcgttagcggaaaaggagagacagttgagcaccatgattacacagcttattagcttgagggaacagcttctagcggcacatgacgagcaaaaaaagctggctgcctctcaaattgagaaacagaggcaacagatggatttggcgagacaacaacaagagcagatcgccagacagcagcagcaactgctacagcagcaacacaaaattaatctgctgcaacagcagatccaggtgcagggacatatgcctccgcttatgatcccaatctttccccacgatcagcgcaccctggctgccgctgcagcggcacaacaagggttcctgtttccgcccggtatcacctacaaaccaggagataactatccagtgcagttcatcccgagcaccatggcggcagcggccgcttcggggctgtctccgctgcaactgcagaaaggacatgtcagccatcctcagattaatcagcgcttgaaaggactgtctgacaggttcgggcggaatctcgacaccttcgagcatgggggagggcattcatataaccacaagcagatcgagcaactgtacgcagcacagctggcctccatgcaggttagcccaggagcaaaaatgccttcgacaccccagcctcctaatactgccgggacggtgtctcccaccggcatcaaaaacgaaaagcgagggaccagccccgtgacccaggtcaaggatgaagccgccgcccagcctctgaatctttcctcgaggccgaaaacagccgagcccgtgaagtctccaacttcaccaacccagaacctgttcccggcctccaaaacttctcctgtgaacctgccaaacaagtctagcatcccgagcccgatcgggggctccctcgggcggggatctagccttgatattctctcttcactgaactctccagcactctttggggatcaggataccgtgatgaaagcaattcaagaggcacggaagatgcgcgaacagatccagcgtgaacagcagcaacagcagccgcatggcgttgatggaaagctatccagcatcaataacatggggctgaatagctgcaggaatgaaaaggagaggacgcgctttgagaatcttgggcctcagctgaccggcaagagcaacgaggacggtaagctagggcctggcgtgattgacttaactcgtccagaggatgcagagggtggcgctacagtggcggaagcccgtgtgtatcgagatgcgaggggacgcgcgagttcagaaccccatattaaacggccaatgaacgctttcatggtgtgggccaaagatgagcggagaaagattctgcaagctttccccgatatgcataactccaatatcagcaagatcttggggtctcgctggaagagcatgagcaatcaggagaagcagccctattatgaggagcaagcccggctcagcaaaattcatttggaaaagtaccctaactacaagtataagcctcgccctaaacgaacatgcatcgtggatgggaaaaagctgagaataggcgagtataaacagctaatgcggtcccggagacaggagatgagacagttttttacagttggtcagcagccccagatccctatcaccaccgggacaggtgttgtatacccgggggccatcacgatggcaactaccacccctagcccccaaatgacttccgattgctccagcaccagcgcttctccagagccgagcctgcccgtgatccagagcacctatggcatgaagacagatgggggaagcttggccggtaatgaaatgattaacggcgaagatgagatggaaatgtacgacgactacgaggatgaccctaagtcagattatagctccgagaatgaggcacccgaggctgtcagtgctaactag

SEQ ID NO: 228295 - DNA, 2427 bp, Artificial Sequence
  derived and/or modified sequence
atgagtagcaagcaggcaaccagtccttttgcatgcgctgccgatggcgaggatgcaatgactcaggatctaacttcccgggagaaagaggagggctcagatcagcacgttgcttctcatcttcccctccaccccataatgcacaataaacctcactctgaagaattgcctactttggtgtccaccatacagcaagatgctgattgggattccgtcctgagcagccagcagaggatggagagcgaaaacaataagttgtgctccctctatagcttccggaacacaagtacaagtcctcacaaaccagatgagggaagtagagaccgcgagattatgaccagcgtcacatttggcacacctgagaggcgaaagggatccctggctgacgtggtggatacactgaaacagaagaagctcgaggaaatgacccgcaccgagcaggaagacagtagttgtatggagaaactgctctcgaaggattggaaggagaaaatggagaggttgaacactagcgaattgctcggtgagatcaaaggaacccccgagtcattggctgaaaaagaaaggcaactctccaccatgattacacagttgatctcactcagagaacaattactggccgctcacgatgagcagaagaagttagccgcttcacagattgagaagcaaaggcagcagatggaccttgctcgacaacagcaagagcaaattgctcggcagcagcaacagctgcttcagcagcagcataaaattaatctgctgcaacagcagatacaggtccaaggccatatgccccctctgatgattccgatctttcctcacgatcagaggacattggctgcggcagctgccgctcagcagggatttctctttccccctggcataacctacaagcccggagacaattatccagtccaatttattccatctaccatggccgcagctgctgcatccggcctctcacctctccaactccagaagggccacgtttcccacccacagatcaaccaaaggttgaagggcttgagcgaccggttcgggaggaatctggacacctttgaacacggaggcggtcactcctataatcataagcagatagagcagctgtacgcagcccaactggccagcatgcaagtatcccctggagcaaagatgccctctacgcctcagccacccaataccgcgggtacagtatcccccaccgggatcaaaaatgagaagagggggacctcccctgtaactcaagtcaaggacgaagccgcagcccaacccctgaacctgtcctctcgtcctaagactgctgagcccgtgaagtcacccacttcaccgacccagaatctttttcctgcgagcaagacatcccccgtaaatttgccaaataaatcctccatcccgtcccccatagggggttccctgggacggggttcctctctggatatactatcttctctcaacagccccgctctcttcggggatcaagacaccgtgatgaaggccatccaggaggctaggaagatgcgcgagcagatccagcgggagcagcagcaacagcaacctcacggcgtggacggaaaactgtctagcatcaacaatatgggtctgaattcgtgtcggaacgagaaggagcgaacccgcttcgagaatctggggccacaactgacaggtaagagcaatgaagatggtaaactgggtccaggtgtcattgacctgacacggcctgaagacgccgagggaggagcaactgtggccgaggcgcgtgtgtatcgtgatgcacggggaagggcgtccagcgaaccccacataaagcggcctatgaatgcttttatggtatgggcgaaagacgagaggagaaagatcctccaagctttccctgatatgcacaatagcaatatctccaaaatactgggcagccggtggaagagcatgagtaaccaggaaaaacagccgtattacgaggaacaggcgagactgagcaaaatccacctggaaaaatacccgaactacaaatacaagcctcggcctaagcgaacgtgtatagttgatggcaaaaaacttaggatcggcgagtacaaacaactgatgcggagcagaagacaggagatgcgacagttctttacagtggggcagcaaccacagatccctatcaccacaggcaccggggtggtgtaccctggggctattacgatggcgactaccaccccaagcccgcaaatgacctccgactgcagtagcacctccgcctcgccagagccctctttgcctgttatacaatcaacctatggcatgaagaccgacggcggatctctggccggaaatgaaatgatcaacggcgaggatgagatggaaatgtatgacgattacgaggacgatcctaagtccgattattcatccgagaacgaagcgccagaagccgtgtccgctaactag

SEQ ID NO: 228296 - DNA, 2427 bp, Artificial Sequence
  derived and/or modified sequence
atgtcctctaaacaagcaacctccccctttgcatgtgccgcagacggagaggatgctatgacccaggacctcacatcccgcgagaaagaagagggctctgaccagcacgttgcctcccatctcccactgcacccgattatgcacaacaaaccccactctgaagagctgcctaccctggtctcaaccatacagcaagatgctgactgggacagcgtgctgtcatcgcagcagcgtatggaatctgaaaataacaagctgtgctcgctctacagttttcgtaacactagtaccagcccccacaaacctgatgaaggtagtcgggacagagagatcatgacatcggtcacctttggcacgcctgaaaggagaaaagggtcacttgccgacgtggttgatacattgaaacagaaaaagctcgaggaaatgacccgaaccgagcaggaggactcatcctgtatggagaaactgctgagcaaggattggaaggaaaaaatggagcgactgaatacttcggaactgttgggagaaattaaaggcacaccggaatcactagctgagaaggagcgtcagctgtccactatgattactcagctgattagtcttagggagcaattgctcgccgcacacgatgagcagaaaaagcttgcggcaagtcaaatcgagaaacagagacagcagatggacctggcgagacagcaacaggaacagatcgccagacagcagcagcagttgcttcaacaacagcataagattaatcttctgcagcagcagattcaggtgcaaggccacatgccacccctaatgattccgatctttccgcacgatcagaggaccctggcagctgccgctgcggcacaacaggggtttctgtttccgcctggaatcacttataaacccggtgacaattatccagtgcaatttatccctagcacgatggccgcagcagccgcatccggcctatctccattgcagttgcaaaagggccatgtcagtcaccctcagatcaatcagcgtctgaaaggcttaagcgataggttcggacggaatttagatacattcgagcatggcggtggccatagctataaccacaagcaaatcgagcagttatatgctgcccagctcgctagcatgcaagtttcaccaggggctaaaatgccatctacacctcagccgccaaatactgcaggtaccgtctcccccaccggtattaaaaacgagaagaggggtacctcaccagttacacaggttaaagatgaggccgcagctcagccactcaatctctcttccagacccaagacagctgaacctgtcaagagccccacgagccccactcagaacctattccccgcttctaagacttcacctgtgaaccttccaaataagtctagcatcccatctcccattgggggatcgttgggcaggggatctagcctggacatcctgagttcgctgaacagccccgcactgtttggagaccaggatactgtgatgaaagcaattcaggaagccaggaagatgcgggaacagatacagagagagcagcagcaacaacagccccacggggtggatggaaagctttctagcattaacaatatgggcctcaacagttgccgcaatgagaaagagcggacccgttttgagaatttgggaccccagcttacaggcaagtctaacgaagacggcaaactgggacccggagtgattgacctcactcgtcctgaggatgccgaagggggagccactgtggctgaggctcgagtgtacagagatgcacgtggacgggcttcctccgagcctcacataaagagacccatgaatgctttcatggtgtgggctaaagacgaaagaaggaagattctgcaggcattccccgatatgcataattctaatatctctaagattttgggcagtagatggaagtctatgagcaatcaggagaaacagccttactacgaggagcaggctaggctcagtaaaattcacctggaaaagtacccaaattataagtacaagcctcgccctaaaagaacctgcattgtcgacgggaagaaattgcggatcggtgaatacaagcaattgatgaggagcaggcgccaagagatgcgccagtttttcacagttggccagcagcctcagatccctatcacgacaggtaccggtgtcgtctatccaggagccatcacaatggccacaaccaccccatcacctcaaatgacaagtgactgtagcagcacctccgcctcccctgaaccaagtttgccagtcattcaaagcacttatggcatgaagaccgatggcggaagcttagccggtaatgaaatgattaacggagaggatgaaatggagatgtatgacgattacgaggacgacccaaaaagcgactattcttctgaaaacgaggccccagaggccgtttccgcaaattag

SEQ ID NO: 228297 - DNA, 8808 bp, Artificial Sequence
  derived and/or modified sequence
ctgttttttttctgcagaagaatgtcttccaagcaagccacctctccatttgcctgtgcagctgatggagaggatgcaatgacccaggatttaacctcaagggaaaaggaagagggcagtgatcaacatgtggcctcccatctgcctctgcaccccataatgcacaacaaacctcactctgaggagctaccaacacttgtcagtaccattcaacaagatgctgactgggacagcgttctgtcatctcagcaaagaatggaatcagagaataataagttatgttccctatattccttccgaaatacctctacctcaccacataagcctgacgaagggagtcgggaccgtgagataatgaccagtgttacttttggaaccccagagcgccgcaaagggagtcttgccgatgtggtggacacactgaaacagaagaagcttgaggaaatgactcggactgaacaagaggattcctcctgcatggaaaaactactttcaaaagattggaaggaaaaaatggaaagactaaataccagtgaacttcttggagaaattaaaggtacacctgagagcctggcagaaaaagaacggcagctctccaccatgattacccagctgatcagtttacgggagcagctactggcagcgcatgatgaacagaaaaaactggcagcgtcacaaattgagaaacaacggcagcaaatggaccttgctcgccaacagcaagaacagattgcgagacaacagcagcaacttctgcaacagcagcacaaaattaatctcctgcagcaacagatccaggttcagggtcacatgcctccgctcatgatcccaatttttccacatgaccagcggactctggcagcagctgctgctgcccaacagggattcctcttcccccctggaataacatacaaaccaggtgataactaccccgtacagttcattccatcaacaatggcagctgctgctgcttctggactcagccctttacagctccagaagggtcatgtctcccacccacaaattaaccaaaggctaaagggcctaagtgaccgttttggcaggaatttggacacctttgaacatggtggtggccactcttacaaccacaaacagattgagcagctctatgccgctcagctggccagcatgcaggtgtcacctggagcaaagatgccatcaactccacagccaccaaacacagcagggacggtctcacctactgggataaaaaatgaaaagagagggaccagccctgtaactcaagttaaggatgaagcagcagcacagcctctgaatctctcatcccgacccaagacagcagagcctgtaaagtccccaacgtctcccacccagaacctcttcccagccagcaaaaccagccctgtcaatctgccaaacaaaagcagcatccctagccccattggaggaagcctgggaagaggatcctctttagatatcctatctagtctcaactcccctgccctttttggggatcaggatacagtgatgaaagccattcaggaggcgcggaagatgcgagagcagatccagcgggagcaacagcagcaacagccacatggtgttgacgggaaactgtcctccataaataatatggggctgaacagctgcaggaatgaaaaggaaagaacgcgctttgagaatttggggccccagttaacgggaaagtcaaatgaagatggaaaactgggcccaggtgtcatcgaccttactcggccagaagatgcagagggaggtgccactgtggctgaagcacgagtctacagggacgcccgcggccgtgccagcagcgagccacacattaagcgaccaatgaatgcattcatggtttgggcaaaggatgagaggagaaaaatccttcaggccttccccgacatgcataactccaacattagcaaaatcttaggatctcgctggaaatcaatgtccaaccaggagaagcaaccttattatgaagagcaggcccggctaagcaagatccacttagagaagtacccaaactataaatacaaaccccgaccgaaacgcacctgcattgttgatggcaaaaagcttcggattggggagtataagcaactgatgaggtctcggagacaggagatgaggcagttctttactgtggggcaacagcctcagattccaatcaccacaggaacaggtgttgtgtatcctggtgctatcactatggcaactaccacaccatcgcctcagatgacatctgactgctctagcacctcggccagcccggagcccagcctcccggtcatccagagcacttatggtatgaagacagatggcggaagcctagctggaaatgaaatgatcaatggagaggatgaaatggaaatgtatgatgactatgaagatgaccccaaatcagactatagcagtgaaaatgaagccccggaggctgtcagtgccaactgaggagtttttgtttgctgaattaaagtactctgacatttcacccccctccccaacaaagagttattaaagagcccgcatgcatttgtggctccacaattacatcagcagaatggtcttaattgtttcgtaaagtgtgagacagattaagttttccctgatttttcatgaacttgagttttttgttgttattgttattgttgttgttgttgtttttttaatttaggtgaagacatattaaatatgagacaccaggacttgaaacttatctcaacccgtagatgtcttacaagtcttatatttttgtcttactttttttttcttttggatgttgataaaggtttaagttactgttttagatggggttaaacattctcactcaggtatgctgtgccggcctacaggttgtgaatgtgtttttattctgaattattttagaaaacaactgaggatttcatattgtgaaacagaacaagtccacggcgtgtgcagctgcatgtagagcatattcaaaaggcctcggaattccaattttccatttgtagagttaaactttgaatgtgccaaactttttcgtaacttttgaatcttaatattttgaaagtcttaaaggagacactgcaaagtcttagacaatctttggcatcttaaaataaaatagcaaaccaacatttttttttccagaaaatggtaaggtactcaggaatctggagacaagatattgtaaggaatgaacaaggttgccacagtgcatggacccaattgtgtttgcctgttgacgtgccatcagtgcgtgatgtggtatgacatacacacaccagagcaaccgccacaccagatatcgacagagtggtcttctctgcctgagaccacctctcactacatccattatccctttgcctttaaccctgacattcagtcttaacacattttatcttaaataatttattcattccagaatgtcaagggtccacttgctatttattttttttcaattgttggtggcattaatttaataattcttgtttttcaccttccttccccgaagaacttttccgtccttttcacctccttctcctgtgtacatagtgattttatgtccccagaacgcctggaagcatttctgaaaccaagatattattaaaaacctattattgtttttaatcatgagtatgtatctggctgcagggctgtgtattgggatataggtatatagtcttacacttaaacaggtatgcccctgaggttcactgtgacctcaagtcttttgccagaattttcccctaattcagttcacaagtggtagggtctgcatcagtggcatttccccctgaattccattcagcagcaaggttcaacagtggtgactgccaggcaggagagtcctgcggccaaacctgaagcccaaggctcgtgggccatgcaggaatctcagtgaagctgtcatgggctggcacctttacactgagttgccttgtcccagctggcacatctagggagttcattgcaaaatccccaggatgcaaaaagccacatgacagcctcagagcaaagatggtggcaaatagtcatgatacatctagagaatgaaagaaaactgtaagggaggagaaggaggggaatacattccctatatgggatgttcctactgttaactctggggaacagatagctccgggggcagcagatgagttcctctggctgactctatctgtagccacatggggacctgcctacgtgtgaacaaaatgaactgcacttatcacacaaggatttctttgaagacatgctactggggtgggaagcagtgaggttttattccccatctcctaactacagggagctctgccatgtcattttggccttcctgaaactaggacaggttgtctatcggggggcttcccccagagaggtttagtgggagaatgtcagtgaatgggatagttcacctcatgggacaacccagaatctgatcaccaggacataggaatggccccatcagatttcttgagccattttgtcacttggaagaaaatagtgtacctttgtatttatttaagagtgctcaaggcctaatagcaataaacaggtctagccaagaaattacaagctattctgttagctgggagtgctctctataagctgattaaggtactgataggaactctttgttattcatgttggttggggattagaaatttgtttttgtacatttatttcaaatgaggaggaggtcattttttctctcaaaaaatgagtatttattattgtcttactgatttctttgattatatacctctcctcctcagttcactcttgttttttttctttctctttggcttttgcttttgctctctctcacttctttcttattttgttgcattggtagagtgttgtatggctagcattgtattgtatgtaattaattttgcacaaaagcaaacatttagcatagtaggttaattttgtttgtttttatgaccatgccaaaataatattctgggctggtggagaacaaaggactgttctttaggactgaaacttgattttgctcatagtaagtaaaaaaaaacaaaaaacacacacactcacagatgttgtttcgtaagtgttataagcactggatataaatggtattttttatcacttctgactaatgtgaaactgttgtacgaaaactacatgaacaaaagtcatctgtttcgactcgtgtgggcttgcctcacagttgccggatttgagtcatttttatgtcttgttatttcatttatttatgcaaaatacatgtgtgtatgaacactttgttttagctccagctctgcctcagtactggggttcatttacttttagccatgttcttaaaaatgaaaggctattcaggaatgatctgattgtaaacgtctttttcattggatcaaacagtaatgctgtatttgaatctaaattttgtgtataagcagtttatttattagccaagtttggctctaaatatccatggaaattaagaatgacaatcatagggatcaattcattttattttcagtggggcttaaacaaagtttatatgactttaccatctcattttagatttttctaattgtgtaaatataacatagaaatagaatttatttttggttcatgaatacttagtgagatataagttatgtatttcctttttgttctctatccatagatgttggtccaaactgaaagttgatgagtcactgtgcctctcggggtagtgagttatcagctacagtgagagagcagtgtttggcctgcagctgggacagcaaaacgtttcaccagggttctcatgcagttcagaacccactgtccacagatccagacatttcccttttttcttacagaaagttgatgattggacatactaaatttccactacagttaggagacagtcagtttgctttgggagtctacataaatcttctaagatagttctgtgaccatttaatagcaagaagcatgaatgccactacaaaggcaaaaatccacctctgagatcggccgttaataaacgtcccgtcatgtcagtttagattcaagaatgttaagcaactttgtttttgcggtgctccctatttcatagtatcttcaaatcaaaaataaaaattatctccattttgttaaagaacttacagggtcagggttctccttgtcacttagaattgggacactgccaggcaatcctctcccaaaaaaaaaaaaaaaaaaaaatagccatatggaatggaaggaaaaggagaaaagaaggaagaaaggaaaaaagtaggaagggagagagaaaaaaaaggtcgctttgcggatacgagccgctaggctgacaacttttctatttcattggcagatatgaagcagtgtcttttccagtaaggtacggaagctttgttgttttcatgtgtacccagctcagccttttagaagcacctcggtttgcttcattaggtatttgatactctccagccttgtcctcaggcctgatttgatttgccagggtcctgacaccaaagcccaggccaagttctaaattcaggtgtgggctcacagtgctattgagcttgtcgaattctggcctcccctgaacattagccccacgggagcctgagggtgtttgaaaagggcgtgatcactctagggctgaaattaaaggctgctttcttttccttctgaagccaggctgcttcttcggagtacaccctcctgagccaggagcacaagcactagcagaaagcagggattgtttcaggaaagcccatttaccctcagtaggaaggcagcctggtcacttgaacagcacagctgaggctgcttctctcaatttactcattttgcaaagaattgacctctaccaactcattagggagaggaaaaagaatcacttagtaattttaaatcatatgagaagtcctgtaccaagtgccaacaactgcaaagaaatgcagctagaggaatgtattgaaattactactgggtcttcctttttaatgagaaaatgacaaaaatggttgctgtagccctgcctgattttgtacacgtttgtctaagaattgagttggcacttaagctcacttctcaaagtataataatattgtatgacctcatttgtcctttcacaaaagcacttgcatcatttccttaagtcatctgctccctgacatgttttcttccctaataaacaacttctgtctgttattcctgccaatgatgttctgtttctgatgccatatcctattgagcgtgcccctgtactaatatcattgaaaatattgatatgcaaacacatttccttttcatccccattctatctttccctttggggacagattgctttccaaaagctcatgaacaaatatttggaatgctggtacctttggggcagaggtaagggtgggcggggtgggggcagaaaggtaatgcttaatgcagataactcttctaatcagtgtccatggcaatatgaacgcttgaagaaaactcagtgacatatcttgctcagtagtttcttattcctgaagaaccacaagcataaagtgaggcctcagtgctggtgctcttggagtatggggaatgtgcaaatatttaactgttttgtatgctgcacattgcaggtctgctcatgtgcattctccctttgtcttcctttgtcatatgtgtttttgcttttttgaaagtgcagtctttattgtaccctcctccagcttgtagcaaattagaatgcttagcatttatgttcattcattattgtatttgccatgtaaaatttttattaccttagacaagcttataagctgttactacataacttatcttactgtaactcttttatttcccccgacgttgtaatttgtttgtgatgtatattgtgaaattgtattctatgttaatttaatcagcacaattcactgacatgctggactgacatgctggctgctgtttcaaagtgtaaagtttgtgtagggctgttgggacaactgcaactctgttgtcaaggtactgtgctttggttcctatagcaacactgggtgtggcccttgaattgctaagggcatttaatacatcctggagcaaattttaactgcagattttctttgtagaaattctatgtataatgcaggtacctacttggcccatggctggtaactatttgggcaattagaaaaaaagaaaaaaacataaaaactagtgtctattgctgctttgaatatgtttgaaagtctgaaaatgtaaatagtttatcaaaaaaaaatcttgtacagtccagtgtaaagtttttaaatgaccttaagggttgccatcacatctttctcacactctcctcttgataataataataataaaaagtttgctaaggattaaagaaatgggaaaaataaaaaaaatctcttcaaatttacaggaatgaatcattgttcttagctttgttgcatacacaaacttcttggattttgttgtgcagtattgacgtgagataaagctcaacattgaataatctttcagtggtacttttcaaagtcttcccctcctctgcctcataattaagggaaaagacaaaattgaaagacacactgtctttatctatcctggtgtatgttggcaccttagctactttttttttttcctttttgcacaaggtgctttcctgatatgttcaacatgccatctttgggtgataatgtatatgccgtgatggggctcaggccccttaggggagtgtctataagaactgcctatttatgctcatttacctcaagactgtcctctctaccctaatctagttgtcatcactccatcttttgtactgctgttgacacttacaaattaaagataaattttgttttatga

SEQ ID NO: 228298 - protein, 299 aa, Artificial Sequence
  derived and/or modified sequence
MTLSVLSRKDKERVIRRLLLQAPPGEFVNAFDDLCLLIRDEKLMHHQGECAGHQHCQKYSVPLCIDGNPVLLSHHNVMGDYRFFDHQSKLSFKYDLLQNQLKDIQSHGIIQNEAEYLRVVLLCALKLYVNDHYPKGNCNMLRKTVKSKEYLIACIEDHNYETGECWNGLWKSKWIFQVNPFLTQVTGRIFVQAHFFRCVNLHIEISKDLKESLEIVNQAQLALSFARLVEEQENKFQAAVLEELQELSNEALRKILRRDLPVTRTLIDWHRILSDLNLVMYPKLGYVIYSRSVLCNWII

SEQ ID NO: 228299 - DNA, 900 bp, Artificial Sequence
  derived and/or modified sequence
atgacactatccgtactgtcacggaaggacaaggaacgcgtgattagacgcctgctgctccaggcaccccctggcgagtttgtgaatgcgtttgacgatttgtgcttgctaatcagggatgagaagcttatgcatcatcagggggaatgcgcaggccaccaacattgtcagaagtactctgtgcccctctgcatcgacgggaaccctgtcctcctcagccaccacaacgttatgggagactaccgattttttgatcatcagtctaagttgagttttaaatatgatctcctgcagaaccagcttaaagatattcaaagtcacgggatcatccagaatgaggctgagtacctgcgggtagttcttctttgtgccctgaagctctatgtcaatgaccactacccaaaaggaaactgcaatatgctacggaagactgtaaagagtaaggagtatctgatcgcatgcatcgaagatcacaattacgagacaggagagtgctggaatggactgtggaaaagcaagtggatctttcaggtaaacccctttctcacccaggtgacgggccggatatttgttcaagctcatttttttcgctgcgtgaatctccatattgaaatatccaaggacctgaaagaatcccttgagattgtgaatcaagcccagctcgctctgtcctttgcccgccttgtagaagaacaagaaaacaagttccaggctgcggttctggaagagctgcaggagcttagcaatgaagcgctacgtaaaattttgcggcgcgatctgcctgtgaccagaaccttgattgattggcacaggatcctttcagacttgaacttggttatgtatcctaagctggggtacgtaatttacagtcgctccgtcctgtgtaactggatcatctag

SEQ ID NO: 228300 - DNA, 900 bp, Artificial Sequence
  derived and/or modified sequence
atgaccctgtctgtgctgagcaggaaggacaaggagagggtcatccggcggctgctgctgcaggcccctcctggagaatttgtgaatgcctttgatgacctgtgcctgctgatcagagatgagaagctgatgcaccaccagggagaatgtgccggccaccagcactgccagaagtacagcgtgcccctgtgcattgatggcaaccctgtgctgctgagccaccacaacgtgatgggagactaccgcttctttgaccaccagagcaagctgtccttcaagtatgacctgctgcagaaccagctgaaggacatccagagccacggcatcatccagaatgaggccgagtacctgcgggtggtgctgctgtgtgccctgaagctgtatgtgaatgaccactaccccaagggcaactgcaacatgctgaggaagacagtgaagagcaaggagtacctgattgcctgcatcgaggaccacaactatgagaccggggagtgctggaatggcctgtggaagagcaagtggatcttccaggtgaaccccttcctgacccaggtgacaggccgcatctttgtgcaggcccacttcttccgctgtgtgaacctgcacatcgagatcagcaaggacctgaaggagagcctggagatcgtgaaccaggcccagctggccctgagctttgcccggctggtggaggagcaggagaacaagttccaggccgctgtgctggaggagctgcaggagctgagcaatgaggccctgaggaagatcctgcggcgggacctgcctgtgaccaggaccctgattgactggcaccgcatcctgagtgacctgaacctggtgatgtaccccaagctgggctacgtgatctacagccgctctgtgctgtgcaactggatcatctag

SEQ ID NO: 228301 - DNA, 900 bp, Artificial Sequence
  derived and/or modified sequence
atgaccctgagcgtgctgagccggaaggacaaggagcgggtgatcaggcgactgctcctccaggctcctccgggggagttcgtgaacgcttttgatgacctctgtctcttgatacgagatgagaagctaatgcaccaccagggggaatgcgcaggccaccagcactgtcagaagtactctgttcctctgtgtatcgacggcaatccagtactgctgtctcatcataatgtaatgggtgactatagattctttgatcatcagagtaagctcagttttaaatacgatctcctgcaaaaccagctgaaagatattcagagtcacggaatcatccagaatgaggcagagtacctgcgggtcgtgctgctctgcgctctgaaactatacgttaatgatcactaccccaaaggcaattgcaacatgctccgcaagacagtaaaaagcaaagagtatctcatcgcctgtatcgaggatcataactatgagaccggcgaatgctggaacggcctgtggaagagcaaatggatcttccaagttaatcctttcctcacacaggttaccggccgcatcttcgtgcaggcccacttcttcagatgcgtgaacttgcacattgaaattagcaaagacttaaaagagtctctggagatcgtcaaccaagcacagctcgccctgtccttcgcaaggctggtggaggaacaagagaataaatttcaggccgcggtgctggaggagctgcaagagctttccaacgaggctctcagaaagattcttcggcgggatctcccagtgacacgaactttgattgattggcatcgcatactgagtgatctgaacttggttatgtatcccaaactgggctacgtgatctattcaaggagtgtactgtgtaactggatcatctag

SEQ ID NO: 228302 - DNA, 900 bp, Artificial Sequence
  derived and/or modified sequence
atgacgctgagtgtcctgagcaggaaagataaggagcgggtgataagaagattgctgctccaggcacctccaggagaattcgtgaacgcattcgacgacctgtgtctgctcatccgggatgaaaagttgatgcaccaccagggagagtgcgccggacaccagcactgtcagaaatattctgtgcctctgtgtatcgatgggaatcctgttcttctgagtcatcataatgtgatgggggattaccgattttttgaccatcagagcaagctttcttttaagtacgatttactccagaatcagttgaaagatatacagtcacacggcatcattcaaaacgaagcagaatatttgcgtgtggtcctcctttgtgccttgaaactgtatgtcaacgaccattaccccaagggaaactgcaacatgttaaggaagacggtgaaatccaaagagtacctgatcgcctgcatcgaggaccataattatgagaccggcgaatgttggaatgggctgtggaagtcgaagtggatttttcaggttaatccattcctgacgcaggttacaggacgaatattcgttcaggcacattttttcagatgcgtgaatctacacatcgagatcagtaaggatctgaaggaatccctagaaatcgtcaaccaggctcagctcgcattgtctttcgcccgattagtggaagagcaggagaacaaattccaggcggcagttctcgaggagctccaagagttaagcaacgaggctctccgaaaaattctgagacgggatttgcctgtgacccggaccctgatcgactggcacagaatccttagcgatctgaatctggtcatgtaccccaaactcggctatgtaatctattccaggagcgttctgtgcaactggattatttag

SEQ ID NO: 228303 - DNA, 1077 bp, Artificial Sequence
  derived and/or modified sequence
ggaggctcagaccttgccagactgcctgctttcatggatagacataaaaaccttcagcttgaatgttaacaccttgatgggaaaggtggctcatggaatgttttcttatcctttgaacactcctcatttcagaagctttgcttctgttgcaaccaaacatgacacttagcgtgctgagcaggaaggacaaggaaagagtaattcgcagactgttattacaggcccctccaggggaatttgtaaatgcctttgatgatctctgtctgcttatccgtgatgaaaaacttatgcaccaccaaggtgagtgtgcaggccaccaacactgccaaaaatattctgtaccactctgcatcgatggaaatccagtactcttgtctcaccacaatgtaatgggcgactaccgattttttgaccatcaaagcaaactttctttcaaatatgacctgcttcaaaatcagctgaaagacatccaaagtcatggtatcattcagaatgaggcagaatacctgagagttgttcttctgtgcgccttaaaactgtatgtgaatgaccactatccaaaaggaaattgcaacatgctgagaaaaactgtcaaaagtaaggagtacttgatagcttgcattgaagatcacaactatgaaacaggagagtgctggaacggactttggaaatctaaatggattttccaagttaacccatttctaacccaagtaacgggaagaatatttgtgcaagctcacttcttcaggtgtgtcaaccttcatattgaaatatccaaggacctgaaagaaagcttggaaatagttaaccaagctcaactggctctaagttttgcaaggcttgtggaagagcaagagaacaaatttcaagctgcagtcttggaagaattacaggagttatccaatgaagccctgagaaaaattctacgaagggatcttccagtgacccgcactcttattgactggcacaggatactctctgacttgaatctggtgatgtatcctaaattaggatatgtcatttattcaagaagtgtgttgtgcaactggataatataaagaattgctcctggtaact

SEQ ID NO: 228304 - DNA, 900 bp, Artificial Sequence
  derived and/or modified sequence
atgaccctgagcgtgctgagcagaaaggacaaggagagagtgatcagaagactgctgctgcaggccccccccggcgagttcgtgaacgccttcgacgacctgtgcctgctgatcagagacgagaagctgatgcaccaccagggcgagtgcgccggccaccagcactgccagaagtacagcgtgcccctgtgcatcgacggcaaccccgtgctgctgagccaccacaacgtgatgggcgactacagattcttcgaccaccagagcaagctgagcttcaagtacgacctgctgcagaaccagctgaaggacatccagagccacggcatcatccagaacgaggccgagtacctgagagtggtgctgctgtgcgccctgaagctgtacgtgaacgaccactaccccaagggcaactgcaacatgctgagaaagaccgtgaagagcaaggagtacctgatcgcctgcatcgaggaccacaactacgagaccggcgagtgctggaacggcctgtggaagagcaagtggatcttccaggtgaaccccttcctgacccaggtgaccggcagaatcttcgtgcaggcccacttcttcagatgcgtgaacctgcacatcgagatcagcaaggacctgaaggagagcctggagatcgtgaaccaggcccagctggccctgagcttcgccagactggtggaggagcaggagaacaagttccaggccgccgtgctggaggagctgcaggagctgagcaacgaggccctgagaaagatcctgagaagagacctgcccgtgaccagaaccctgatcgactggcacagaatcctgagcgacctgaacctggtgatgtaccccaagctgggctacgtgatctacagcagaagcgtgctgtgcaactggatcatctag

SEQ ID NO: 228305 - protein, 485 aa, Artificial Sequence
  derived and/or modified sequence
MKRKSERRSSWAAAPPCSRRCSSTSPGVKKIRSSTQQDPRRRDPQDDVYLDITDRLCFAILYSRPKSASNVHYFSIDNELEYENFYADFGPLNLAMVYRYCCKINKKLKSITMLRKKIVHFTGSDQRKQANAAFLVGCYMVIYLGRTPEEAYRILIFGETSYIPFRDAAYGSCNFYITLLDCFHAVKKAMQYGFLNFNSFNLDEYEHYEKAENGDLNWIIPDRFIAFCGPHSRARLESGYHQHSPETYIQYFKNHNVTTIIRLNKRMYDAKRFTDAGFDHHDLFFADGSTPTDAIVKEFLDICENAEGAIAVHCKAGLGRTGTLIACYIMKHYRMTAAETIAWVRICRPGSVIGPQQQFLVMKQTNLWLEGDYFRQKLKGQENGQHRAAFSKLLSGVDDISINGVENQDQQEPEPYSDDDEINGVTQGDRLRALKSRRQSKTNAIPLTCPLAVLTSALCSVVIWWIVCDYILPILLFCLDGFRTQ

SEQ ID NO: 228306 - protein, 498 aa, Artificial Sequence
  derived and/or modified sequence
MKRKSERRSSWAAAPPCSRRCSSTSPGVKKIRSSTQQDPRRRDPQDDVYLDITDRLCFAILYSRPKSASNVHYFSIDNELEYENFYADFGPLNLAMVYRYCCKINKKLKSITMLRKKIVHFTGSDQRKQANAAFLVGCYMVIYLGRTPEEAYRILIFGETSYIPFRDAAYGSCNFYITLLDCFHAVKKAMQYGFLNFNSFNLDEYEHYEKAENGDLNWIIPDRFIAFCGPHSRARLESGYHQHSPETYIQYFKNHNVTTIIRLNKRMYDAKRFTDAGFDHHDLFFADGSTPTDAIVKEFLDICENAEGAIAVHCKAGLGRTGTLIACYIMKHYRMTAAETIAWVRICRPGSVIGPQQQFLVMKQTNLWLEGDYFRQKLKGQENGQHRAAFSKLLSGVDDISINGVENQDQQEPEPYSDDDEINGVTQGDRLRALKSRRQSKTNAIPLTVILQSSVQSCKTSEPNISGSAGITKRTTRSASRKSSVKSLSISRTKTVLR

SEQ ID NO: 228307 - DNA, 5589 bp, Artificial Sequence
  derived and/or modified sequence
cacggaacagccctcctggggtccccacgagccgcgtcctgctgtgccccggcgcctacgcagcagcggccgcggccgcggtgggcacgcacggttaccccgggcagctccggccgccagctgcagccccgtcgcctcggccgcgccagccggctgcgggcacctgggggcgggctgggggcgccggccgcggcaggaggcgctgtagcgagggctgcggcgccggtcctgcggcggccgcgggaggcagcggggcaggcgctgtgggccgggctcctcctccggctcctgcgcgaccgcctcccgccgggctctgccggcgcccgccgtccccgcagcgccgctctgcgcccgccgccccgagcgcccgcgcggggctggcgggagcctcggcgggcgcgcgggcgcgcggggccatggtcgtggccccctgacgggccgcggccgcctccatgaagcggaaaagcgagcggcggtcgagctgggccgccgcgcccccctgctcgcggcgctgctcgtcgacctcgccgggtgtgaagaagatccgcagctccacgcagcaagacccgcgccgccgggacccccaggacgacgtgtacctggacatcaccgatcgcctttgttttgccattctctacagcagaccaaagagtgcatcaaatgtacattatttcagcatagataatgaacttgaatatgagaacttctacgcagattttggaccactcaatctggcaatggtttacagatattgttgcaagatcaataagaaattaaagtccattacaatgttaaggaagaaaattgttcattttactggctctgatcagagaaaacaagcaaatgctgccttccttgttggatgctacatggttatatatttggggagaaccccagaagaagcatatagaatattaatctttggagagacatcctatattcctttcagagatgctgcctatggaagttgcaatttctacattacacttcttgactgttttcatgcagtaaagaaggcaatgcagtatggcttccttaatttcaactcatttaaccttgatgaatatgaacactatgaaaaagcagaaaatggagatttaaattggataataccagaccgatttattgccttctgtggacctcattcaagagccagacttgaaagtggttaccaccaacattctcctgagacttatattcaatattttaagaatcacaatgttactaccattattcgtctgaataaaaggatgtatgatgccaaacgctttacggatgctggcttcgatcaccatgatcttttctttgcggatggcagcacccctactgatgccattgtcaaagaattcctagatatctgtgaaaatgctgagggtgccattgcagtacattgcaaagctggccttggtcgcacgggcactctgatagcctgctacatcatgaagcattacaggatgacagcagccgagaccattgcgtgggtcaggatctgcagacctggctcggtgattgggcctcagcagcagtttttggtgatgaagcaaaccaacctctggctggaaggggactattttcgtcagaagttaaaggggcaggagaatggacaacacagagcagccttctccaaacttctctctggcgttgatgacatttccataaatggggtcgagaatcaagatcagcaagaacccgaaccgtacagtgatgatgacgaaatcaatggagtgacacaaggtgatagacttcgggccttgaaaagcagaagacaatccaaaacaaacgctattcctctcacagtaattcttcaatccagtgttcagagctgtaaaacatctgaacctaacatttctggcagtgcaggcattactaaaagaaccaccagatctgcttcaaggaaaagcagtgttaaaagtctctccatttcaaggactaaaacagtcttgcgttaagtaaaaacctgtgaccagagctgaaggaagactctaggactgaaaactgcaacagaaattagcacaatttgaaaacaaaacaaaattgcaaaagccttagttgctttttccacctaagaagttgatcaatggagaaaatgtccactggagtttgaataatgaactttgagtttgggtgcaagcaaatgactcagagaagggtccagctctcaagctgaatgacaaacatgctgttgtaaatttagtctcaggtgtaaatacccaagccctctggtacccagggagctggctggtctgtggtgcatgtgtgtccctgtgatggcaatcattgtagttgctggccttcagaagaattgaggatctgatggaggttttttatgtatttattttctgttcaccttgtgaccctgtgtcaaaatttataaagatacaaaaggcattactgaaatggtactttctgtaatttgatactatttggcttaatcatcttcacttgactatttgtaatactgttgtaatgttaactctgttaagtacccaagctgcttgtcttccaccaaagagtgctttattaacaagaatctgtgaaaatcacatttaaacactgttgcatgttgtaagaccaggtggtaccttagtaacctaaaacttgcaagagaatattaatggtagctttagaagactcaggaggagaaactgacttcagagttggaagatgttgcaagtcgttcctttttctgtccttcagggactgaagaactgggaggctgcccattgtttggttgccagtcatacaaattaaaatcatatttccttccatgaatggaagaaacacactattggtttttccccttggaaacagcaatcccaaataatgtcggcttacaaaaaaaaaaagttaccacttttttagagtccttccctgtaacattggattttttttttcccttatgagatccacctaaggccattgacgtggcctgcgatctcagtgacaatgatctgcttctggatctcactgttgcctttggttagggaacacaactagtaactctgcagagtgccttctcccgcagccctactggaacacagcagagtctgtgccatgaagcagttacagaaacagaattgatgtgctgctaaaaaaaaaaaaaaaaatggggcccgaaataaaagaatatatagtactcacctcagttccttccataagaagtgggtggtttaatgattgttaagccatttttgcctgtgccgggagcatggagggctgagatgtcgacaggcagtgggaaacaaatgccctcctaagccacaaggcgtgcgccagattagtaggcaactccattttaagaagctgcctttttcacaaaactggaagaaataaaagcggttggaataaacaagttaaaagtctttaatgcaaaaagtaattgaaaggcagtgcctccattttggtgtactttcttggaagaaagtataaaattgaccggcatcatgagagacggaagatgccgtgttctcagccaaacaagcaactctttccccgccaggcactgtcgggtggggtcaggccagcttttaaacactggggactggatcacagaaaaacagtggttttctgtccctggaaatgaataggcacaaagacccacttggctgtgggcagactactcttcaataagatttgggtgggaggaggaacattccttttgctattttgagctgagacaatataaatattcaaactgtgccatgcataaagcattgaattctcagggcacctcttcttccccttaccccttttaaggccatcccctccattaataataatccaggtagttgtgaaaatcgtgcttctatctgatcccttcttagtttggcttttcatcccatcagaacaagtaaacgtaggcgccacagctcttgtgagtactgtctccctcacggtgaatgagcctcctggtgtttcgtccaagaaaagaaagggtgtcactggaaccacagccctttttcattttataaactgcctcttcatgttgcctgctcaagtttccacctagaattgctatcactgtggctctttctaaaaatctttctatttaactggttcactgaaattagtcatagaaaacttgtgatttggtgaagaggcattccttgtaataaccaaatgacttgggatggtgtgcatagcaagggcagtgttacacttatgaggactgtctctagcatccaggaagtctctgggtctgagggatggaaagttcttcctgctatgaatgagagtggactcttcccctcacccccaactgaaaccacaaacaaccagaatcttctggaattctgacttagagtcgttgttatagaagaccttgttgctatggaacatgaaactgtgtgtcagatggagagatccccttaacctaagagccttaaatagccctgaaagtacactgggacggtttgcgatggaattaaaattggaagtgaatatttttaggtgctcttgaagctttctggggactcaaaattatcaaaagtcagggacagtccggaggaagagcgtctgcaaaactgggttcctagaagtatagacggacttagctttttgtagaatttggtgaggagcagcgcctcgtgagagcagaatggcctggcgtggccagtgcttcccggcagcacgcagctctgcggcctccagaattcccctgttctgagcttgatgcccctagcctgtcccctacctacttcctcccctcctctctagccctctcacaggggtgattgctacctctctgttttcttgggcctaggcaagttttagaggagttcccaagcattgttatgaggccagtgtgctcgctgggctgggcgggatggcctgggcttgtgtgtggcctgagggctctcctggggccttctcttttcccagtcacctttggagccacagaagcagtgcactcattggatgtctgttcttaacacagcttctctttctacattaaaaaaaatcattattgcattttggaaagcagtgctcatcaaaagcaacttttaaaacctattttattgttcctttaaatgttctctcccgctgaaactgccctggagaggctatctgctgctcttccatttacccacatcaggttattctccatgtcactcagtggagatgactccagatgtgtttaaagactggacaattcacctatactgtgtaggaaattacctccttaattacctggtagaattgtcagcagacatgttcatccgatgatagtactgcagttttctattaataatttgcagacttttatctaacctgcactcatgtacagattattaaaagttttaaaatgtaactgatcagtattgatcaatcattgtcttgatttttttttacagcgtatatttctaatcatattttttaaagccaagagaactggttgaatgaatgtttattttcctgaaggtatttttaagataaagcttcctaatggcgtgtaaactttgcatatgtatgtagtttgatacatattgtcacatttgaaaatcttgtgggttgtaactggttttatacaaaatatcgaatagtggaaattgtataattacaatcatgtaattaaaagtattaacccaa

SEQ ID NO: 228308 - protein, 480 aa, Artificial Sequence
  derived and/or modified sequence
MERDEPPPSGGGGGGGSAGFLEPPAALPPPPRNGFCQDELAELDPGTISVSDDRAEQRTCLICGDRATGLHYGIISCEGCKGFFKRSICNKRVYRCSRDKNCVMSRKQRNRCQYCRLLKCLQMGMNRKAIREDGMPGGRNKSIGPVQISEEEIERIMSGQEFEEEANHWSNHGDSDHSSPGNRASESNQPSPGSTLSSSRSVELNGFMAFREQYMGMSVPPHYQYIPHLFSYSGHSPLLPQQARSLDPQSYSLIHQLLSAEDLEPLGTPMLIEDGYAVTQAELFALLCRLADELLFRQIAWIKKLPFFCELSIKDYTCLLSSTWQELILLSSLTVYSKQIFGELADVTAKYSPSDEELHRFSDEGMEVIERLIYLYHKFHQLKVSNEEYACMKAINFLNQDIRGLTSASQLEQLNKRYWYICQDFTEYKYTHQPNRFPDLMMCLPEIRYIAGKMVNVPLEQLPLLFKVVLHSCKTSVGKE

SEQ ID NO: 228309 - DNA, 1443 bp, Artificial Sequence
  derived and/or modified sequence
atggagagagacgagcccccaccttccggcggtggtggcgggggtggttcagctggatttctggaaccccccgccgccttacctccccctccaagaaatggattttgccaggacgaactcgcagaactggatcctggaaccatctcagtttccgatgatagggcggaacagaggacttgcttgatttgcggtgatcgcgcaaccggcctgcactacgggattattagctgcgagggctgtaagggttttttcaaaagatctatttgcaataaacgggtttaccgttgcagtcgggacaaaaattgtgtcatgtcccgtaaacagcgcaaccgctgccagtactgccgcctgctgaaatgtctgcagatgggaatgaataggaaggccattcgtgaggacggcatgcctggcggaagaaataaaagtataggccctgtacaaatcagcgaagaagagatcgaaaggatcatgtccggccaagagttcgaggaagaggctaaccattggtccaatcatggcgactccgatcacagtagccctggcaatcgcgcgtccgagtccaaccaaccaagccctggttctacactctcatcaagtaggtccgtggaattaaatggctttatggcctttagggaacagtacatgggcatgagtgttcccccccattaccagtacattccacacttgttctcctatagcggccattctcctcttctgccccaacaggctaggtcactagacccccagtcatacagcctgatccaccaactcctctctgcagaggatctcgagcccttgggcactccgatgctcatcgaggacggctatgccgtcacacaggcagagctgttcgccttactttgtcgactcgccgatgaactgctcttccggcagatcgcttggatcaaaaaactgccgtttttctgcgagctgtccatcaaggactacacctgcttattatctagtacatggcaggaactcatactcctctcaagcttgacagtgtattcaaaacaaatcttcggagaactggctgacgttacagctaagtacagccctagcgacgaggaactgcatcgcttcagcgacgagggtatggaagtgatagagagactgatttatctctaccacaaatttcatcagctcaaagttagtaatgaggaatacgcctgtatgaaggccatcaatttcttgaatcaggacattaggggtttgacgtcagctagtcagctggaacagctaaataaacgttactggtacatctgccaggacttcaccgagtataagtacacgcaccagcctaaccgtttccccgacctgatgatgtgtttgcctgaaatccgatatatagcgggcaaaatggtgaacgtcccgctggagcagttgcctctcctttttaaagtggtgcttcactcctgtaaaacgtccgtggggaaagaatag

SEQ ID NO: 228310 - DNA, 6697 bp, Artificial Sequence
  derived and/or modified sequence
gcggcgcggagccgggcggctcggggcccagagagagccgcggccgggagctcgcgggctcctgacaacctcctcccctcggcggacgacgaccacggcgactagggcgccggtcatggcggagcaacaaacccggcgcggaccctaggcaccaccgcatggagcgggacgaaccgccgcctagcggagggggaggcggcgggggctcggcggggttcctggagcctcccgccgcgctccctccgccgccgcgcaacggtttctgtcaggatgaattggcagagcttgacccaggcactatttctgtttcagatgatcgggctgaacaacgaacctgtctcatttgtggggaccgcgctacaggcttgcactatgggatcatctcctgtgagggctgcaaagggtttttcaagcggagcatttgcaacaaacgggtatatcgatgcagtcgtgacaagaactgtgtcatgtctcggaagcagaggaacaggtgccagtactgccgcctgctcaaatgcctccagatggggatgaaccggaaggctatcagagaagatggcatgcctggaggccggaataagagcattgggccagtccagatatcggaagaagaaatcgaaaggatcatgtctgggcaggagtttgaggaagaggccaatcactggagcaaccatggtgatagtgaccacagttcccctgggaacagggcttcggagagcaaccagccctcaccaggctccacactgtcttccagtaggtctgtggaactgaatggattcatggccttcagggaacagtacatgggaatgtctgtgcctccacattaccaatatataccgcacctttttagctattctggccactcaccacttctgccccaacaagctcgcagcctggatccccagtcatacagtctgattcaccagctgttatcagccgaggacctggaaccattgggcacgcccatgttgattgaagatggatacgctgtgacacaggcagaactatttgccctgctttgccgcctggccgacgagctgctctttaggcagattgcctggatcaagaaactgcctttcttctgcgagctctcaatcaaggattacacgtgcctcttgagctctacgtggcaggagctaatcctgctgtcttccctcaccgtttacagcaagcagatctttggggaactggctgatgtcactgccaagtactcgccctccgatgaagaactacacagatttagtgatgaagggatggaggtgatcgagcggctcatctacctctatcacaagttccatcagctaaaggtcagcaacgaggagtatgcttgcatgaaagcaattaacttcctaaatcaagatatcaggggtctgaccagtgcctcacagctggaacaattgaataaacgatactggtacatttgccaggattttactgaatataaatacacacatcagccgaaccgctttcctgatctcatgatgtgcttacctgagattcgatatattgcaggaaagatggtgaatgtgcccctggagcagctgcccctcctctttaaggtggtgctgcattcctgcaagaccagtgtgggcaaggaatgacctgttccaggcgccctcctcaggccaaccacagcgtcttgggtgggcaggacaggctctggagggaaaagccagagagaccaagatggaggctgtggagcagcatttcccgttgcctccatagcaagaagagtttttgtttgtttgtctgtttttttaacctcatttttctatatatttatttcacgacagagttgaatgtatggccttcaacatgatgcacatgcttttgtgtgaatgcagccaatgcattttcttacagtttacagaatgtgaagatgtttaatgttacagtgttgtcattgtttagaaatagttcttttgtattttgagggagagggtgggatggggctaagatgactatttccataatgttgacaaagatgactacctcaatggaaatggggggtgtggccatccctactttttccacattttctcagcagactcatacatttgtctgtcagagagcaaattgccttttttagccacagaattgccagataaaacggcacactgtaagggggcaaagtgttgttaggagattcactaagcaaggttggtgagacggcaacagggtaggaggtgaggattgagccacgtcctttccttggaaagcgtgaaaattaagagagtagggcacagtgaccatatttaaggcaggtgtccttccacccaacaagtcctaagggcagaagaatttctgttctcacaccttgctgccccccttacccctgcaccaccatcattgtctaccactgcgaactttccatctaggcaaagtcctggcaatcacttgatccacaggactcgcctcccagctccctcggggcccccagctacctagtttccttacctggatctcctgaggcccaccttcctccttcccactcccttacacatttgacttcctattggccctttgaaaaaccagctgagcagaatgccatgttctgaagcctggtgcccactactgatttattctcctttcaccttgttttcttcaaagggtagtagggcaaggccagactgcaaaaagaatagacactccccttttgaaatctgttcctctcccctccccttcctaccgcaccctcaggtctaaatccgaaaacttcaggcttttttaaacaatgagaaggaccattcacctgtctgctgaccagaaatgttgcccctaagttcttctccaagttctccttttctctccagagtgagaccagttttcctcagggacccaggacacaaagcccaaggcccagagtggctcagctgccccttacttcagcagtggactggccagccaaggcctggagggctggagccagaagcacctggaagggaaggggggctttaaactacctcaggttcctaatggcccggctgctacctctgcagacatggcctggactccttgacctctcactacctgccccaccttatcccaggacgtgttccttaccctcttgactttggccagcgctacaccaggtctgtctttgaactctttcaggtgcttgtcctgcctacacccaggtatctttcacagccagtgtggcaagcagaccacttagttggctgcatgcctgggtaggttggaagggcccacggcaccttcttctgcctatttagtcaaaggctgtttgctgtctcctcaactcaacctagtaaagctacccaggagggcaccacgtcgtgtgcatactgggtagtccatgtctgattgtaattgtttctttctggtgaaatgttacgggtaccagcagagtgatgattttggcccttgatggatctaaaactcggaacattactcctcaatgccgtttccccagttgctctgagaaggaagagacatgttcctcaggaaaagctccagctagcatgtttttcacgtcagtgggaagattcttgtgtgttcgtgtgtatctgtttatttctaagttcacgatacttgttcccctgaattttatttaaccaactagatcacattctttggccacaggtcagactctgagctgctttcctccagatcgggaaggagacacatatcacagatgccttctctaagacagctcctgtgtacagcatcgttctttgctgaggcctctatctgtccaattattatttttgaaattgcttttcaaattaaacattttacccgttgtgttgggtgtcaaaagaaattgctctctgatgaggcaagaacatgtctctccaacaacgtagtattgaacagagcaagttgttaatttgtggagtaggggaaaggttctgcaagttgccattgtacaaatccagttttacaaatgtttgcagcagattccacagaacaaagagcccattcattgccgagagccctgcagaatctcagagcaaagtggctgtgtgttccgagccggagcctgacctgtggaccgtctttaatgtcttctgcaccagtccttttatgacgtgggctttttttaaacagggtaaagtgaatgtgttgcattgcaaactcaggtattatgaggagaaggtaggagtgtagctagcagcgtggagacattaggtcagccactagatgtatttgtgaatttggtttgaaggacacggagaaaggttggaggggaggtttggtgtgtttgttttttgctttcttccccataatgtttggttaacaggtagcctttttgcgagtggaaggagagaaaagttgtgcatgttttctctaatttctctttctgccctctctctgatccccaaccaccaaaagcactcactttgagtgaggatttttttttttttttttttttttttttttgaggcggagtctcgctctgtcgctcaggctggagtgcagtggtgcgatcttggctcactgcaagctccgcctcccgggttcatgccattctcctgcctcagcctcctgagtagctgggactacaggcgcccgccaccacacccggctaactttttttgtatttttagtagaaacattgtttcaccacgttagccaggatggtctccatctcctgacctcgtgatccgcctgcctcggcctcccaaagtgctgggattacaggcgtgagccactgcacccagccgagtgagaatttttatgccataaaaatacgactctgaaagctacatggaaaaggagaatcccacctccttgcactacattgaaacatgcaagcctttccctccctctcctttttgatgttttcttgtcccaagacaaaagtttggcatcttggaacttattcatgctctctggctgcctttgtagacttttggagtcctttgcaaggtttggtggtctcgtcgttaatctggagaaattccccagaatctgtctcaaagcgctcaacctggctcagaggacacccagcccctatgccccactcacaagagaggtgggcaagcccccagggataggaggaagtaagcaggatcctccctgtcctgtttcccagaaccagagcaaggaatggggaatcctaagggtttctgtggcatcactgaatgtcacccactccacatcaacctgcctctcacctgccaccctttttcagggaggtgagtacctgccatggtcactgttaccagatccttaaaatcctgggctctgagctaggtgcattgctctgttacccatttcctacatttgtttgtttgttcttgatttcctgggggaatgggactgatggagacagacaaacccactgtgggcagcatctaagccatgtccaaggttggtcgaattaagggaaccctggcctctcagcaggacagaaagctgagctgtggttccaggccctcctctctgggcccctggtgtgtatcttttttccttgttgcttttgaaatttttgcaattattttaagaatccagtctttcagaccagcccttttattaagctttgaatttttaattgatttttttaaagtaaaaaaaaaaaaaacccaaaaaacaaacaaaatttaacaaaaaaatccgctactcttactcccctgcctccccctaccccagcccatgagagttcccttgcactcccctctgcctttgcaactgatcatcctccctttctccttggcttgaagcatctatgtccagtatctgtgaaatgatgttttatctgtgtgtcaggatgagaaacggcagtcattccaccaagtgttggaaactggttagcctggagacaagggtttctggggccacagctcagggatgtgtatttaattacaggatccccagaaactcctctctaggctgccacagcaacattttttctgggcttgggagccatacctgaactgtttcctccaaggcgggaactccagagagcctgccaagtctggagcaagctggggcttctgctttggccagacctgggccaccatgagacttgaaggcttctagctgtcctacgacacgagccacggtggccctgcctctccccgctcatagaagcctggtccctctgtctagcccagttcccatctagcatccgtcttctgggcctgaagccctaaatggaccacagcctgcacaggaatcaactgtaggctcaaagggaggcggtgagtaaggtcagagcctgctccaagcccaagaacaaaagttgtgttatgggtggaggctagtcccccagatctagccctgccgtctttgccctttaatgaccattgttttctttctctaaaatgtcttgtaataggtgataatgttgttgattcaaatttccatgaaaaagaaaaaaaaaactacctcttaagcgacatcctggtcgattcctctctgaggaatcctgtgggaaaagaatactgtagctcctgctctgtttacatgtttctgtcgggaaagaagccccgcctgccctggggtgttggtgtttttgtctgtgttgccatcccaggtctgccataggggctggtggctgcattgtgatgtctgggctgtgtctggggattccttcccacctacccagccagggactagtcacccccctgaagaggcctccatttccttcctgtgctccagggcatagggagcaccactcccacagacaccacctttaagggctctagtggcacacacatccacgagccta

SEQ ID NO: 228311 - DNA, 1443 bp, Artificial Sequence
  derived and/or modified sequence
atggagagagatgagcccccaccttctgggggcggcggcggcggcggcagcgctggcttcctggagcccccagctgccctgcccccacctccaagaaatggcttctgccaggatgagctggccgagctggaccccggcaccatctctgtgtctgatgacagagctgagcagaggacctgcctgatctgtggggaccgggccaccggcctgcactacggcatcatcagctgtgagggctgcaagggcttcttcaagaggagcatctgcaacaagagggtgtaccgctgcagccgggacaagaactgtgtgatgagcaggaagcagaggaaccgctgccagtactgccgcctgctgaagtgcctgcagatgggcatgaacaggaaggccatccgggaggatggcatgcctgggggcaggaacaagagcatcggccctgtgcagatcagcgaggaggagattgagcgcatcatgagcggccaggagtttgaggaggaggccaaccactggagcaaccacggggacagcgaccacagcagccctggcaacagagccagcgagagcaaccagcccagccctggcagcaccctgagcagcagccgctctgtggagctgaatggcttcatggccttccgggagcagtacatgggcatgtctgtgcccccccactaccagtacatcccccacctgttctcctacagcggccacagccccctgctgccccagcaggcccggagcctggacccccagagctacagcctcatccaccagctgctgtctgctgaggacctggagcccctgggcacccccatgctgattgaagatggctatgctgtgacccaggccgagctgtttgccctgctgtgccgcctggctgatgagctgctcttccggcagatcgcctggatcaagaagctgcccttcttctgtgagctgagcatcaaggactacacctgcctgctgagcagcacctggcaggagctgatcctgctgagcagcctgactgtgtacagcaagcagatctttggagagctggctgatgtgacagccaagtacagccccagtgatgaggagctgcaccgcttcagtgatgagggcatggaggtgattgagcggctcatctacctgtaccacaagttccaccagctgaaggtgtccaatgaggagtatgcctgcatgaaggccatcaacttcctgaaccaggacatccggggcctgaccagcgccagccagctggagcagctgaacaagcgctactggtacatctgccaggacttcacagagtacaagtacacccaccagcccaaccgcttcccagacctgatgatgtgcctgcctgagatccgctacatcgccggcaagatggtgaatgtgcccctggagcagctgcccctgctcttcaaggtggtgctgcacagctgcaagacctctgtgggcaaggagtag

SEQ ID NO: 228312 - DNA, 1443 bp, Artificial Sequence
  derived and/or modified sequence
atggagcgggacgagcccccccccagcggcggcggcggcggcggcggctcagcgggcttcctggagccaccagctgctcttcctcctcctcccaggaatggcttctgtcaagacgagctggcggagctggatcctggcactatatcagtatctgatgatcgcgccgagcagcggacatgcctgatatgcggcgatcgcgctaccggtctccactatggcattatctcctgtgaaggatgtaagggtttctttaagagatcaatttgcaataaaagggtttaccgctgtagcagagacaaaaattgtgttatgagtagaaaacaaaggaacaggtgccagtattgtcgtctgctgaaatgtctgcaaatggggatgaacaggaaagctattagggaggacggcatgccaggtggccggaacaaatcaattggacctgtacagatttccgaagaagaaatagaaaggattatgtccgggcaggaatttgaagaagaggccaaccactggagtaaccatggggacagtgatcactcctcaccaggaaatcgagcaagcgagagtaatcagccgtcgcctgggtctacactgagttccagtcgcagcgtcgaattaaatgggtttatggctttcagggagcagtatatgggaatgtcggtccctccgcactaccagtacatcccacatctattttcttattctggtcatagccccttgctccctcagcaggctaggagcctggacccgcagtcatactcactaattcatcaactgctgagcgccgaggacctcgagccactggggactcccatgctgatcgaggacggctacgccgtgacgcaggcagagctgtttgcgcttttgtgccgactggctgatgaactattattccggcaaatcgcttggatcaaaaagcttccattcttctgtgagctgtctataaaggattacacctgccttcttagctcaacctggcaggaactgattctcctctcatctttaaccgtgtatagtaaacagatattcggtgagctcgccgacgttaccgcaaaatatagcccgagtgatgaggagcttcacaggttcagtgatgaaggaatggaagtgatagaacggctgatttatctctatcataaatttcatcagctgaaggttagtaatgaggagtatgcctgtatgaaggctattaattttctgaatcaggatataaggggcctgacaagtgcaagtcagcttgagcaattaaacaaaaggtactggtatatttgtcaggactttaccgagtacaagtacacacatcagcctaaccggttccccgacctgatgatgtgcttacccgagattaggtacattgccggtaaaatggtgaacgtccctctggaacagttaccattattgtttaaggtggtgttgcattcctgcaaaacctccgtcggcaaagagtag

SEQ ID NO: 228313 - DNA, 1443 bp, Artificial Sequence
  derived and/or modified sequence
atggaacgggacgagccccctccttctggtggcggtggtggcggaggtagtgcgggattcctggaaccacccgctgccctgcccccaccgccaagaaatggtttttgtcaagacgaactcgcggaactcgatccgggtacaatcagcgtgtcggacgaccgcgcagagcagcgaacttgtttgatctgcggtgatcgggcaaccggcctgcactacgggatcatctcatgtgaagggtgcaagggtttcttcaaacgctccatatgcaataagagagtctacaggtgttccagggacaaaaactgtgtgatgagtcgcaaacaaaggaaccggtgccaatactgcagactgctgaaatgcctccaaatgggcatgaatcgaaaagcgattagggaggacggcatgcccggagggagaaacaaaagcatcggacctgtgcaaatttccgaagaggaaatcgaacgaatcatgagcggacaggaatttgaggaggaggctaatcactggtccaaccacggagattctgaccactctagtccgggaaaccgggcttccgagtcgaatcagccatccccaggcagcacgctcagctcctcccgctctgttgagctgaacgggtttatggcttttcgggaacagtacatgggaatgtccgtccctccacactatcagtatattccgcacttattctcgtactccgggcattccccgctactgcctcagcaggctcggagcctagaccctcagtcctatagtctgattcaccagcttcttagcgccgaggatctggagcctctgggtacgcccatgctgatcgaggacggctacgcagtgactcaagctgagctgtttgccctcttatgcaggttggccgatgagctgctattccgccagatcgcatggatcaaaaaacttccttttttttgcgagttgagcataaaagattacacatgcctcctcagctcaacttggcaggagctcattttgctgtccagcttgaccgtctactccaaacagatctttggcgaactggccgacgtgacggcaaagtattcgcccagcgatgaggagttacatcggttctccgacgaagggatggaagtgattgagcgtctgatttacttataccataaatttcaccaactgaaagtgtctaacgaagagtacgcctgcatgaaagctatcaacttcctgaaccaggatatccgcggactgactagcgcctcccagcttgagcagttgaataaacggtactggtacatttgccaggattttacggagtacaaatatacacatcagcctaaccgtttcccggatcttatgatgtgtctcccggagattcgatatatagctgggaagatggtgaacgtccccctggaacagcttccactgttgttcaaggttgtgctgcattcctgcaagacctctgtcggcaaagagtag

SEQ ID NO: 228314 - DNA, 1443 bp, Artificial Sequence
  derived and/or modified sequence
atggagagagacgagcccccccccagcggcggcggcggcggcggcggcagcgccggcttcctggagccccccgccgccctgccccccccccccagaaacggcttctgccaggacgagctggccgagctggaccccggcaccatcagcgtgagcgacgacagagccgagcagagaacctgcctgatctgcggcgacagagccaccggcctgcactacggcatcatcagctgcgagggctgcaagggcttcttcaagagaagcatctgcaacaagagagtgtacagatgcagcagagacaagaactgcgtgatgagcagaaagcagagaaacagatgccagtactgcagactgctgaagtgcctgcagatgggcatgaacagaaaggccatcagagaggacggcatgcccggcggcagaaacaagagcatcggccccgtgcagatcagcgaggaggagatcgagagaatcatgagcggccaggagttcgaggaggaggccaaccactggagcaaccacggcgacagcgaccacagcagccccggcaacagagccagcgagagcaaccagcccagccccggcagcaccctgagcagcagcagaagcgtggagctgaacggcttcatggccttcagagagcagtacatgggcatgagcgtgcccccccactaccagtacatcccccacctgttcagctacagcggccacagccccctgctgccccagcaggccagaagcctggacccccagagctacagcctgatccaccagctgctgagcgccgaggacctggagcccctgggcacccccatgctgatcgaggacggctacgccgtgacccaggccgagctgttcgccctgctgtgcagactggccgacgagctgctgttcagacagatcgcctggatcaagaagctgcccttcttctgcgagctgagcatcaaggactacacctgcctgctgagcagcacctggcaggagctgatcctgctgagcagcctgaccgtgtacagcaagcagatcttcggcgagctggccgacgtgaccgccaagtacagccccagcgacgaggagctgcacagattcagcgacgagggcatggaggtgatcgagagactgatctacctgtaccacaagttccaccagctgaaggtgagcaacgaggagtacgcctgcatgaaggccatcaacttcctgaaccaggacatcagaggcctgaccagcgccagccagctggagcagctgaacaagagatactggtacatctgccaggacttcaccgagtacaagtacacccaccagcccaacagattccccgacctgatgatgtgcctgcccgagatcagatacatcgccggcaagatggtgaacgtgcccctggagcagctgcccctgctgttcaaggtggtgctgcacagctgcaagaccagcgtgggcaaggagtag

SEQ ID NO: 228315 - protein, 336 aa, Artificial Sequence
  derived and/or modified sequence
MDCVGWPPGRKWHLEKNTSCGGSSGICASYVTQMADDQGCIEEQGVEDSANEDSVDAKPDRSSFVPSLFSKKKKNVTMRSIKTTRDRVPTYQYNMNFEKLGKCIIINNKNFDKVTGMGVRNGTDKDAEALFKCFRSLGFDVIVYNDCSCAKMQDLLKKASEEDHTNAACFACILLSHGEENVIYGKDGVTPIKDLTAHFRGDRCKTLLEKPKLFFIQACRGTELDDGIQADSGPINDTDANPRYKIPVEADFLFAYSTVPGYYSWRSPGRGSWFVQALCSILEEHGKDLEIMQILTRVNDRVARHFESQSDDPHFHEKKQIPCVVSMLTKELYFSQ

SEQ ID NO: 228316 - DNA, 1011 bp, Artificial Sequence
  derived and/or modified sequence
atggattgcgtgggctggcccccagggagaaaatggcacctcgagaagaacacctcttgtggcgggtcctctggaatatgtgcatcttatgttacacagatggcagacgaccaagggtgcatcgaagagcaaggagtggaggacagtgccaacgaggacagcgtcgatgccaagccagaccgctcatcattcgtacctagcctgttttctaagaagaagaagaacgtcacaatgagatctatcaaaacaacccgagaccgcgtccccacataccagtataatatgaattttgaaaagcttggcaaatgcataattattaacaacaaaaatttcgataaagtgactgggatgggagtacgaaatggaactgacaaagatgcagaggctttgttcaaatgtttccgaagcctgggcttcgacgtgattgtctataacgattgcagttgcgcaaaaatgcaggacttgctaaaaaaagctagcgaggaggaccacaccaacgctgcctgcttcgcctgcatcctgctcagccatggtgaagagaacgtgatctacggcaaagatggggtgactcctatcaaggacctcaccgcccattttagaggagatcgctgcaaaactctgttggagaagccaaaactgttctttattcaagcctgtaggggcaccgagctcgacgacggcatccaagcagactcggggcctatcaatgatacagacgctaatcccagatataagattccggtggaggcggatttcctattcgcctacagcaccgtgcccggatattattcttggaggtcccccggtcgaggcagctggttcgttcaggctttgtgtagcattcttgaggaacatggcaaggaccttgaaatcatgcagattcttacccgggtgaacgatcgcgtggcccgtcacttcgaatctcagtcggacgatccccactttcatgaaaagaagcagatcccctgtgttgtgtcgatgctgactaaagaactctatttcagtcagtag

SEQ ID NO: 228317 - DNA, 1011 bp, Artificial Sequence
  derived and/or modified sequence
atggactgtgtgggctggcccccaggcaggaagtggcacctggagaagaacaccagctgtggcggcagcagcggcatctgtgccagctatgtgacccagatggctgatgaccagggctgcatcgaggagcagggcgtggaggacagcgccaatgaagacagcgtggatgccaagccagacaggagcagctttgtgcccagcctcttcagcaagaagaagaagaatgtgaccatgaggagcatcaagaccacccgggacagagtgcccacctaccagtacaacatgaactttgagaagctgggcaagtgcatcatcatcaacaacaagaactttgacaaggtgacaggcatgggcgtgagaaatggaacagacaaggatgctgaggccctcttcaagtgcttccgcagcctgggctttgatgtgattgtgtacaatgactgcagctgtgccaagatgcaggacctgctgaagaaggccagcgaggaggaccacaccaatgctgcctgctttgcctgcatcctgctgagccatggagaggagaatgtcatctacggcaaggatggagtgacccccatcaaggacctgacagcccacttccggggggaccgctgcaagaccctgctggagaagcccaagctgttcttcatccaggcctgccggggcacagagctggatgatggcatccaggccgacagcggccccatcaatgacacagatgccaacccccgctacaagatccctgtggaggccgacttcctgtttgcctacagcacagtgcccggctactacagctggaggagccctggccggggctcctggtttgtgcaggccctgtgcagcatcctggaggagcacggcaaggacctggagatcatgcagatcctgaccagggtgaatgacagagtggcccggcactttgagagccagagtgatgacccccacttccacgagaagaagcagatcccctgtgtggtgtccatgctgaccaaggagctgtacttcagccagtag

SEQ ID NO: 228318 - DNA, 1011 bp, Artificial Sequence
  derived and/or modified sequence
atggactgcgtgggctggccccccggccggaagtggcacctggagaagaacaccagctgcgggggctcttctgggatatgcgccagctacgttacccagatggctgacgatcagggatgcattgaagaacagggagtggaagactctgccaacgaggatagtgtggacgcgaaacccgaccgaagttccttcgtaccatcactcttcagcaaaaagaaaaaaaatgtgacaatgaggtctatcaagaccactcgtgacagagtgccgacataccagtacaacatgaatttcgagaaactcggcaagtgcatcataattaataacaagaattttgacaaagtcactggaatgggcgtgagaaacgggaccgacaaggatgcagaggccctgttcaaatgctttcgcagcctgggctttgacgtcatagtgtataacgattgctcatgcgctaaaatgcaggacttattgaagaaagcatccgaggaggatcacaccaacgccgcttgcttcgcatgcatccttctgtctcacggcgaggaaaacgtgatttatgggaaagacggagtcacccccatcaaggacctcaccgctcactttcgaggcgacagatgcaaaaccctgctcgagaagcccaagctcttttttattcaggcctgccgggggaccgagctggacgacgggatacaggccgacagcggtccgattaacgataccgacgccaacccacggtataaaattcccgttgaggctgactttttgtttgcttattccaccgtgccaggatattatagctggcggagccccggacgaggaagctggtttgtgcaggccctatgctctatcttggaggaacacgggaaagacctggaaatcatgcagatcctcacaagggtgaatgaccgcgtagcacggcacttcgagtctcagagtgacgacccccactttcacgagaaaaaacaaatcccatgcgttgtgagtatgctgacaaaggagctttatttctctcagtag

SEQ ID NO: 228319 - DNA, 1011 bp, Artificial Sequence
  derived and/or modified sequence
atggattgtgtcggttggcctccaggcaggaaatggcatctggagaaaaataccagctgtggtgggtcctctgggatctgtgcctcttacgtcacgcagatggccgacgaccagggttgcatcgaggagcagggcgttgaagattccgctaacgaggatagtgtcgatgccaaaccagaccgatcatcgtttgtgccttcgcttttttcaaagaaaaagaagaatgtgacgatgcgctcaattaaaaccacccgggacagggtaccaacatatcagtataacatgaattttgagaagctaggaaagtgcatcatcatcaacaataagaatttcgataaagtgaccgggatgggcgtccgtaacggcacagacaaagatgccgaggctttgttcaaatgctttagaagcctgggctttgacgtgatcgtgtataatgattgttcttgtgccaagatgcaggacttactaaaaaaggcctccgaggaggatcacactaacgctgcctgttttgcctgcatcctactcagccatggagaagagaatgttatctatggcaaagacggggtgacccccatcaaggacctcacagcccacttccgcggtgacaggtgtaaaaccttactggagaagccgaagctcttctttatccaggcatgcagaggaacggaactcgatgatgggatccaggctgatagtggcccaattaatgacaccgacgctaaccccaggtacaagatcccagtcgaagccgattttctcttcgcttatagcacggtaccgggttactatagttggaggagcccgggacggggaagttggtttgtacaggcgttgtgttcgatcctcgaggagcacgggaaggatctcgagatcatgcagattctcaccagagtgaatgaccgtgtggcccgtcatttcgagtctcagtcagatgaccctcatttccacgagaaaaaacagatcccttgcgttgtcagcatgctgactaaggaactgtacttctctcagtag

SEQ ID NO: 228320 - DNA, 2659 bp, Artificial Sequence
  derived and/or modified sequence
cccgcgcgcgggctcaactttgtagagcgaggggccaacttggcagagcgcgcggccagctttgcagagagcgccctccagggactatgcgtgcggggacacgggtcgctttgggctcttccacccctgcggagcgcactaccccgagccaggggcggtgcaagccccgcccggccctacccagggcggctcctccctccgcagcgccgagacttttagtttcgctttcgctaaaggggccccagacccttgctgcggagcgacggagagagactgtgccagtcccagccgccctaccgccgtgggaacggcaggaagtggcacttggaaaagaacaccagctgcggtggtagcagtgggatttgtgcttcttatgttacccagatggcagatgatcagggctgtattgaagagcagggggttgaggattcagcaaatgaagattcagtggatgctaagccagaccggtcctcgtttgtaccgtccctcttcagtaagaagaagaaaaatgtcaccatgcgatccatcaagaccacccgggaccgagtgcctacatatcagtacaacatgaattttgaaaagctgggcaaatgcatcataataaacaacaagaactttgataaagtgacaggtatgggcgttcgaaacggaacagacaaagatgccgaggcgctcttcaagtgcttccgaagcctgggttttgacgtgattgtctataatgactgctcttgtgccaagatgcaagatctgcttaaaaaagcttctgaagaggaccatacaaatgccgcctgcttcgcctgcatcctcttaagccatggagaagaaaatgtaatttatgggaaagatggtgtcacaccaataaaggatttgacagcccactttaggggggatagatgcaaaacccttttagagaaacccaaactcttcttcattcaggcttgccgagggaccgagcttgatgatggcatccaggccgactcggggcccatcaatgacacagatgctaatcctcgatacaagatcccagtggaagctgacttcctcttcgcctattccacggttccaggctattactcgtggaggagcccaggaagaggctcctggtttgtgcaagccctctgctccatcctggaggagcacggaaaagacctggaaatcatgcagatcctcaccagggtgaatgacagagttgccaggcactttgagtctcagtctgatgacccacacttccatgagaagaagcagatcccctgtgtggtctccatgctcaccaaggaactctacttcagtcaatagccatatcaggggtacattctagctgagaagcaatgggtcactcattaatgaatcacatttttttatgctcttgaaatattcagaaattctccaggattttaatttcaggaaaatgtattgattcaacagggaagaaactttctggtgctgtcttttgttctctgaattttcagagactttttttataatgttattcatttggtgactgtgtaactttctcttaagattaattttctctttgtatgtctgttaccttgttaatagacttaatacatgcaacagaagtgacttctggagaaagctcatggctgtgtccactgcaattggtggtaacagtggtagagtcatgtttgcacttggcaaaaagaatcccaatgtttgacaaaacacagccaaggggatatttactgctctttattgcagaatgtgggtattgagtgtgatttgaatgatttttcattggcttagggcagattttcatgcaaaagttctcatatgagttagaggagaaaaagcttaatgattctgatatgtatccatcaggatccagtctggaaaacagaaaccattctaggtgtttcaacagagggagtttaatacaggaaattgacttacatagatgataaaagagaagccaaacagcaagaagctgttaccacacccagggctatgaggataatgggaagaggtttggtttcctgtgtccagtagtgggatcatccagaggagctggaaccatggtgggggctgcctagtgggagttaggaccaccaatggattgtggaaaatggagccatgacaagaacaaagccactgactgagatggagtgagctgagacagataagagaataccttggtctcacctatcctgccctcacatcttccaccagcaccttactgcccaggcctatctggaagccacctcaccaaggaccttggaagagcaagggacagtgaggcaggagaagaacaagaaatggatgtaagcctggcccataatgtgaacataagtaatcactaatgctcaacaatttatccattcaatcatttattcattgggttgtcagatagtctatgtatgtgtaaaacaatctgttttggctttatgtgcaaaatctgttatagctttaaaatatatctggaactttttagattattccaagccttattttgagtaaatatttgttacttttagttctataagtgaggaagagtttatggcaaagatttttggcactttgttttcaagatggtgttatcttttgaattcttgataaatgactgtttttttctgcctaatagtaactggttaaaaaacaaatgttcatatttattgattaaaaatgtggttgcttaattcct

SEQ ID NO: 228321 - DNA, 2421 bp, Artificial Sequence
  derived and/or modified sequence
gactgtgccagtcccagccgccctaccgccgtgggaacgatgctgtaatggactgtgttggttggcctccaggcaggaagtggcacttggaaaagaacaccagctgcggtggtagcagtgggatttgtgcttcttatgttacccagatggcagatgatcagggctgtattgaagagcagggggttgaggattcagcaaatgaagattcagtggatgctaagccagaccggtcctcgtttgtaccgtccctcttcagtaagaagaagaaaaatgtcaccatgcgatccatcaagaccacccgggaccgagtgcctacatatcagtacaacatgaattttgaaaagctgggcaaatgcatcataataaacaacaagaactttgataaagtgacaggtatgggcgttcgaaacggaacagacaaagatgccgaggcgctcttcaagtgcttccgaagcctgggttttgacgtgattgtctataatgactgctcttgtgccaagatgcaagatctgcttaaaaaagcttctgaagaggaccatacaaatgccgcctgcttcgcctgcatcctcttaagccatggagaagaaaatgtaatttatgggaaagatggtgtcacaccaataaaggatttgacagcccactttaggggggatagatgcaaaacccttttagagaaacccaaactcttcttcattcaggcttgccgagggaccgagcttgatgatggcatccaggccgactcggggcccatcaatgacacagatgctaatcctcgatacaagatcccagtggaagctgacttcctcttcgcctattccacggttccaggctattactcgtggaggagcccaggaagaggctcctggtttgtgcaagccctctgctccatcctggaggagcacggaaaagacctggaaatcatgcagatcctcaccagggtgaatgacagagttgccaggcactttgagtctcagtctgatgacccacacttccatgagaagaagcagatcccctgtgtggtctccatgctcaccaaggaactctacttcagtcaatagccatatcaggggtacattctagctgagaagcaatgggtcactcattaatgaatcacatttttttatgctcttgaaatattcagaaattctccaggattttaatttcaggaaaatgtattgattcaacagggaagaaactttctggtgctgtcttttgttctctgaattttcagagactttttttataatgttattcatttggtgactgtgtaactttctcttaagattaattttctctttgtatgtctgttaccttgttaatagacttaatacatgcaacagaagtgacttctggagaaagctcatggctgtgtccactgcaattggtggtaacagtggtagagtcatgtttgcacttggcaaaaagaatcccaatgtttgacaaaacacagccaaggggatatttactgctctttattgcagaatgtgggtattgagtgtgatttgaatgatttttcattggcttagggcagattttcatgcaaaagttctcatatgagttagaggagaaaaagcttaatgattctgatatgtatccatcaggatccagtctggaaaacagaaaccattctaggtgtttcaacagagggagtttaatacaggaaattgacttacatagatgataaaagagaagccaaacagcaagaagctgttaccacacccagggctatgaggataatgggaagaggtttggtttcctgtgtccagtagtgggatcatccagaggagctggaaccatggtgggggctgcctagtgggagttaggaccaccaatggattgtggaaaatggagccatgacaagaacaaagccactgactgagatggagtgagctgagacagataagagaataccttggtctcacctatcctgccctcacatcttccaccagcaccttactgcccaggcctatctggaagccacctcaccaaggaccttggaagagcaagggacagtgaggcaggagaagaacaagaaatggatgtaagcctggcccataatgtgaacataagtaatcactaatgctcaacaatttatccattcaatcatttattcattgggttgtcagatagtctatgtatgtgtaaaacaatctgttttggctttatgtgcaaaatctgttatagctttaaaatatatctggaactttttagattattccaagccttattttgagtaaatatttgttacttttagttctataagtgaggaagagtttatggcaaagatttttggcactttgttttcaagatggtgttatcttttgaattcttgataaatgactgtttttttctgcctaatagtaactggttaaaaaacaaatgttcatatttattgattaaaaatgtggttgcttaattcct

SEQ ID NO: 228322 - DNA, 2377 bp, Artificial Sequence
  derived and/or modified sequence
gagacttttagtttcgctttcgctaaaggggccccagacccttgctgcggagcgacggagagagactgtgccagtcccagccgccctaccgccgtgggaacgatggcagatgatcagggctgtattgaagagcagggggttgaggattcagcaaatgaagattcagtggatgctaagccagaccggtcctcgtttgtaccgtccctcttcagtaagaagaagaaaaatgtcaccatgcgatccatcaagaccacccgggaccgagtgcctacatatcagtacaacatgaattttgaaaagctgggcaaatgcatcataataaacaacaagaactttgataaagtgacaggtatgggcgttcgaaacggaacagacaaagatgccgaggcgctcttcaagtgcttccgaagcctgggttttgacgtgattgtctataatgactgctcttgtgccaagatgcaagatctgcttaaaaaagcttctgaagaggaccatacaaatgccgcctgcttcgcctgcatcctcttaagccatggagaagaaaatgtaatttatgggaaagatggtgtcacaccaataaaggatttgacagcccactttaggggggatagatgcaaaacccttttagagaaacccaaactcttcttcattcaggcttgccgagggaccgagcttgatgatggcatccaggccgactcggggcccatcaatgacacagatgctaatcctcgatacaagatcccagtggaagctgacttcctcttcgcctattccacggttccaggctattactcgtggaggagcccaggaagaggctcctggtttgtgcaagccctctgctccatcctggaggagcacggaaaagacctggaaatcatgcagatcctcaccagggtgaatgacagagttgccaggcactttgagtctcagtctgatgacccacacttccatgagaagaagcagatcccctgtgtggtctccatgctcaccaaggaactctacttcagtcaatagccatatcaggggtacattctagctgagaagcaatgggtcactcattaatgaatcacatttttttatgctcttgaaatattcagaaattctccaggattttaatttcaggaaaatgtattgattcaacagggaagaaactttctggtgctgtcttttgttctctgaattttcagagactttttttataatgttattcatttggtgactgtgtaactttctcttaagattaattttctctttgtatgtctgttaccttgttaatagacttaatacatgcaacagaagtgacttctggagaaagctcatggctgtgtccactgcaattggtggtaacagtggtagagtcatgtttgcacttggcaaaaagaatcccaatgtttgacaaaacacagccaaggggatatttactgctctttattgcagaatgtgggtattgagtgtgatttgaatgatttttcattggcttagggcagattttcatgcaaaagttctcatatgagttagaggagaaaaagcttaatgattctgatatgtatccatcaggatccagtctggaaaacagaaaccattctaggtgtttcaacagagggagtttaatacaggaaattgacttacatagatgataaaagagaagccaaacagcaagaagctgttaccacacccagggctatgaggataatgggaagaggtttggtttcctgtgtccagtagtgggatcatccagaggagctggaaccatggtgggggctgcctagtgggagttaggaccaccaatggattgtggaaaatggagccatgacaagaacaaagccactgactgagatggagtgagctgagacagataagagaataccttggtctcacctatcctgccctcacatcttccaccagcaccttactgcccaggcctatctggaagccacctcaccaaggaccttggaagagcaagggacagtgaggcaggagaagaacaagaaatggatgtaagcctggcccataatgtgaacataagtaatcactaatgctcaacaatttatccattcaatcatttattcattgggttgtcagatagtctatgtatgtgtaaaacaatctgttttggctttatgtgcaaaatctgttatagctttaaaatatatctggaactttttagattattccaagccttattttgagtaaatatttgttacttttagttctataagtgaggaagagtttatggcaaagatttttggcactttgttttcaagatggtgttatcttttgaattcttgataaatgactgtttttttctgcctaatagtaactggttaaaaaacaaatgttcatatttattgattaaaaatgtggttgcttaattcct

SEQ ID NO: 228323 - DNA, 2694 bp, Artificial Sequence
  derived and/or modified sequence
ctcccgcgcgcgggctcaactttgtagagcgaggggccaacttggcagagcgcgcggccagctttgcagagagcgccctccagggactatgcgtgcggggacacgggtcgctttgggctcttccacccctgcggagcgcactaccccgagccaggggcggtgcaagccccgcccggccctacccagggcggctcctccctccgcagcgccgagacttttagtttcgctttcgctaaaggggccccagacccttgctgcggagcgacggagagagactgtgccagtcccagccgccctaccgccgtgggaacgatgctgtaatggactgtgttggttggcctccaggcaggaagtggcacttggaaaagaacaccagctgcggtggtagcagtgggatttgtgcttcttatgttacccagatggcagatgatcagggctgtattgaagagcagggggttgaggattcagcaaatgaagattcagtggatgctaagccagaccggtcctcgtttgtaccgtccctcttcagtaagaagaagaaaaatgtcaccatgcgatccatcaagaccacccgggaccgagtgcctacatatcagtacaacatgaattttgaaaagctgggcaaatgcatcataataaacaacaagaactttgataaagtgacaggtatgggcgttcgaaacggaacagacaaagatgccgaggcgctcttcaagtgcttccgaagcctgggttttgacgtgattgtctataatgactgctcttgtgccaagatgcaagatctgcttaaaaaagcttctgaagaggaccatacaaatgccgcctgcttcgcctgcatcctcttaagccatggagaagaaaatgtaatttatgggaaagatggtgtcacaccaataaaggatttgacagcccactttaggggggatagatgcaaaacccttttagagaaacccaaactcttcttcattcaggcttgccgagggaccgagcttgatgatggcatccaggccgactcggggcccatcaatgacacagatgctaatcctcgatacaagatcccagtggaagctgacttcctcttcgcctattccacggttccaggctattactcgtggaggagcccaggaagaggctcctggtttgtgcaagccctctgctccatcctggaggagcacggaaaagacctggaaatcatgcagatcctcaccagggtgaatgacagagttgccaggcactttgagtctcagtctgatgacccacacttccatgagaagaagcagatcccctgtgtggtctccatgctcaccaaggaactctacttcagtcaatagccatatcaggggtacattctagctgagaagcaatgggtcactcattaatgaatcacatttttttatgctcttgaaatattcagaaattctccaggattttaatttcaggaaaatgtattgattcaacagggaagaaactttctggtgctgtcttttgttctctgaattttcagagactttttttataatgttattcatttggtgactgtgtaactttctcttaagattaattttctctttgtatgtctgttaccttgttaatagacttaatacatgcaacagaagtgacttctggagaaagctcatggctgtgtccactgcaattggtggtaacagtggtagagtcatgtttgcacttggcaaaaagaatcccaatgtttgacaaaacacagccaaggggatatttactgctctttattgcagaatgtgggtattgagtgtgatttgaatgatttttcattggcttagggcagattttcatgcaaaagttctcatatgagttagaggagaaaaagcttaatgattctgatatgtatccatcaggatccagtctggaaaacagaaaccattctaggtgtttcaacagagggagtttaatacaggaaattgacttacatagatgataaaagagaagccaaacagcaagaagctgttaccacacccagggctatgaggataatgggaagaggtttggtttcctgtgtccagtagtgggatcatccagaggagctggaaccatggtgggggctgcctagtgggagttaggaccaccaatggattgtggaaaatggagccatgacaagaacaaagccactgactgagatggagtgagctgagacagataagagaataccttggtctcacctatcctgccctcacatcttccaccagcaccttactgcccaggcctatctggaagccacctcaccaaggaccttggaagagcaagggacagtgaggcaggagaagaacaagaaatggatgtaagcctggcccataatgtgaacataagtaatcactaatgctcaacaatttatccattcaatcatttattcattgggttgtcagatagtctatgtatgtgtaaaacaatctgttttggctttatgtgcaaaatctgttatagctttaaaatatatctggaactttttagattattccaagccttattttgagtaaatatttgttacttttagttctataagtgaggaagagtttatggcaaagatttttggcactttgttttcaagatggtgttatcttttgaattcttgataaatgactgtttttttctgcctaatagtaactggttaaaaaacaaatgttcatatttattgattaaaaatgtggttgcttaattcct

SEQ ID NO: 228324 - DNA, 834 bp, Artificial Sequence
  derived and/or modified sequence
ccaggagcagcatctccaccagcaagctgggctgctgggtgggtacttccttcaaagctgagggagcgtcctacgcccacgcgcgcaggagggcgccccccgcaaagcaacgtctaggagaccacagtggatgccacagcgggcccgaagcggatcagccttgtgggatggcagatgatcagggctgtattgaagagcagggggttgaggattcagcaaatgaagattcagtggatgctaagccagaccggtcctcgtttgtaccgtccctcttcagtaagaagaagaaaaatgtcaccatgcgatccatcaagaccacccgggaccgagtgcctacatatcagtacaacatgaattttgaaaagctgggcaaatgcatcataataaacaacaagaactttgataaagtgacaggtatgggcgttcgaaacggaacagacaaagatgccgaggcgctcttcaagtgcttccgaagcctgggttttgacgtgattgtctataatgactgctcttgtgccaagatgcaagatctgcttaaaaaagcttctgaagaggaccatacaaatgccgcctgcttcgcctgcatcctcttaagccatggagaagaaaatgtaatttatgggaaagatggtgtcacaccaataaaggatttgacagcccactttaggggggatagatgcaaaacccttttagagaaacccaaactcttcttcattcaggcttgccgagggaccgagcttgatgatggcatccaggccgactcggggcccatcaatgacacagatgctaatcctcgatacaagatcccagtggaagctgacttcctcttcgcct

SEQ ID NO: 228325 - DNA, 2229 bp, Artificial Sequence
  derived and/or modified sequence
aaaggggccccagacccttgctgcggagcgacggagagagactgtgccagtcccagccgccctaccgccgtgggaacgatggcagatgatcagggctgtattgaagagcagggggttgaggattcagcaaatgaagattcagtggatgctaagccagaccggtcctcgtttgtaccgtccctcttcagtaagaagaagaaaaatgtcaccatgcgatccatcaagaccacccgggaccgagtgcctacatatcagtacaacatgaattttgaaaagctgggcaaatgcatcataataaacaacaagaactttgataaagtgacaggtatgggcgttcgaaacggaacagacaaagatgccgaggcgctcttcaagtgcttccgaagcctgggttttgacgtgattgtctataatgactgctcttgtgccaagatgcaagatctgcttaaaaaagcttctgaagaggaccatacaaatgccgcctgcttcgcctgcatcctcttcttcattcaggcttgccgagggaccgagcttgatgatggcatccaggccgactcggggcccatcaatgacacagatgctaatcctcgatacaagatcccagtggaagctgacttcctcttcgcctattccacggttccaggctattactcgtggaggagcccaggaagaggctcctggtttgtgcaagccctctgctccatcctggaggagcacggaaaagacctggaaatcatgcagatcctcaccagggtgaatgacagagttgccaggcactttgagtctcagtctgatgacccacacttccatgagaagaagcagatcccctgtgtggtctccatgctcaccaaggaactctacttcagtcaatagccatatcaggggtacattctagctgagaagcaatgggtcactcattaatgaatcacatttttttatgctcttgaaatattcagaaattctccaggattttaatttcaggaaaatgtattgattcaacagggaagaaactttctggtgctgtcttttgttctctgaattttcagagactttttttataatgttattcatttggtgactgtgtaactttctcttaagattaattttctctttgtatgtctgttaccttgttaatagacttaatacatgcaacagaagtgacttctggagaaagctcatggctgtgtccactgcaattggtggtaacagtggtagagtcatgtttgcacttggcaaaaagaatcccaatgtttgacaaaacacagccaaggggatatttactgctctttattgcagaatgtgggtattgagtgtgatttgaatgatttttcattggcttagggcagattttcatgcaaaagttctcatatgagttagaggagaaaaagcttaatgattctgatatgtatccatcaggatccagtctggaaaacagaaaccattctaggtgtttcaacagagggagtttaatacaggaaattgacttacatagatgataaaagagaagccaaacagcaagaagctgttaccacacccagggctatgaggataatgggaagaggtttggtttcctgtgtccagtagtgggatcatccagaggagctggaaccatggtgggggctgcctagtgggagttaggaccaccaatggattgtggaaaatggagccatgacaagaacaaagccactgactgagatggagtgagctgagacagataagagaataccttggtctcacctatcctgccctcacatcttccaccagcaccttactgcccaggcctatctggaagccacctcaccaaggaccttggaagagcaagggacagtgaggcaggagaagaacaagaaatggatgtaagcctggcccataatgtgaacataagtaatcactaatgctcaacaatttatccattcaatcatttattcattgggttgtcagatagtctatgtatgtgtaaaacaatctgttttggctttatgtgcaaaatctgttatagctttaaaatatatctggaactttttagattattccaagccttattttgagtaaatatttgttacttttagttctataagtgaggaagagtttatggcaaagatttttggcactttgttttcaagatggtgttatcttttgaattcttgataaatgactgtttttttctgcctaatagtaactggttaaaaaacaaatgttcatatttattgattaaaaatgtggttgctt

SEQ ID NO: 228326 - DNA, 1011 bp, Artificial Sequence
  derived and/or modified sequence
atggactgcgtgggctggccccccggcagaaagtggcacctggagaagaacaccagctgcggcggcagcagcggcatctgcgccagctacgtgacccagatggccgacgaccagggctgcatcgaggagcagggcgtggaggacagcgccaacgaggacagcgtggacgccaagcccgacagaagcagcttcgtgcccagcctgttcagcaagaagaagaagaacgtgaccatgagaagcatcaagaccaccagagacagagtgcccacctaccagtacaacatgaacttcgagaagctgggcaagtgcatcatcatcaacaacaagaacttcgacaaggtgaccggcatgggcgtgagaaacggcaccgacaaggacgccgaggccctgttcaagtgcttcagaagcctgggcttcgacgtgatcgtgtacaacgactgcagctgcgccaagatgcaggacctgctgaagaaggccagcgaggaggaccacaccaacgccgcctgcttcgcctgcatcctgctgagccacggcgaggagaacgtgatctacggcaaggacggcgtgacccccatcaaggacctgaccgcccacttcagaggcgacagatgcaagaccctgctggagaagcccaagctgttcttcatccaggcctgcagaggcaccgagctggacgacggcatccaggccgacagcggccccatcaacgacaccgacgccaaccccagatacaagatccccgtggaggccgacttcctgttcgcctacagcaccgtgcccggctactacagctggagaagccccggcagaggcagctggttcgtgcaggccctgtgcagcatcctggaggagcacggcaaggacctggagatcatgcagatcctgaccagagtgaacgacagagtggccagacacttcgagagccagagcgacgacccccacttccacgagaagaagcagatcccctgcgtggtgagcatgctgaccaaggagctgtacttcagccagtag

SEQ ID NO: 228327 - protein, 220 aa, Artificial Sequence
  derived and/or modified sequence
MADDQGCIEEQGVEDSANEDSVDAKPDRSSFVPSLFSKKKKNVTMRSIKTTRDRVPTYQYNMNFEKLGKCIIINNKNFDKVTGMGVRNGTDKDAEALFKCFRSLGFDVIVYNDCSVTQAGVQRRDLGRLQPPPPRFKQYSCLSLLSSWDYRHAPPRLANFCIFRREGFRHVGQAGLKLLASSDPPTSGSQSAGITGVSLHTQPQIMKVSLRHCNTFICFA

SEQ ID NO: 228328 - protein, 220 aa, Artificial Sequence [sequence omitted]

SEQ ID NO: 228329 - protein, 253 aa, Artificial Sequence
  derived and/or modified sequence
MADDQGCIEEQGVEDSANEDSVDAKPDRSSFVPSLFSKKKKNVTMRSIKTTRDRVPTYQYNMNFEKLGKCIIINNKNFDKVTGMGVRNGTDKDAEALFKCFRSLGFDVIVYNDCSCAKMQDLLKKASEEDHTNAACFACILLSHGEENMESCSVTQAGVQRRDLGRLQPPPPRLAEGPSLMMASRPTRGPSMTQMLILDTRSQWKLTSSSPIPRFQAITRGGAQEEAPGLCKPSAPSWRSTEKTWKSCRSSPG

SEQ ID NO: 228330 - DNA, 663 bp, Artificial Sequence
  derived and/or modified sequence
atggccgacgatcaaggatgcattgaggaacagggggttgaggacagcgccaacgaggactccgtcgatgcaaagcccgaccgttcctctttcgtgccaagcctgttttcaaaaaaaaagaagaacgttacgatgcggtctattaagacaacacgagaccgggtacctacatatcaatataacatgaacttcgagaagttgggcaaatgcatcatcattaataataaaaatttcgataaggtgacagggatgggcgtgcggaatgggaccgataaggatgccgaggctttgttcaagtgctttagatccctggggtttgatgttatcgtgtacaatgattgtagtgtcacgcaggccggtgtgcagcggagagacctggggaggttacagcccccaccccctcgttttaaacaatactcgtgcctctctctcctctcatcttgggattataggcatgctcctcctagactggccaacttctgtatttttaggcgggagggattccgccacgttgggcaagctggcctgaagcttctggcctcgtctgaccccccaaccagcggatcgcagagcgcgggaatcactggggtctctctccacacccaaccacaaatcatgaaagtctcattgcgtcactgcaatactttcatttgcttcgcctag

SEQ ID NO: 228331 - DNA, 663 bp, Artificial Sequence
  derived and/or modified sequence
atggcagacgaccagggctgcatcgaagagcaaggagttgaggactcagccaacgaggatagcgttgacgccaagccagaccggtcctccttcgtgcctagcctcttttcaaagaaaaagaaaaatgtcactatgcgtagcattaagaccaccagagatcgcgtacctacgtaccagtacaacatgaattttgagaaattgggaaaatgtatcatcattaataacaagaactttgataaggtcacaggaatgggcgtccggaatggcaccgacaaggacgcagaggccttgtttaagtgcttcaggtccctggggtttgacgtgatcgtctataatgattgttcttttacccaggcaggggtgcagcggcgagatttagggaggctgcagcccccacctcctcgctttaaacaatacagctgcctgagtctgctaagctcttgggattaccggcacgcccctccacgcctggccaatttctgtatcttccggcgggagggatttcgtcatgtgggacaggccggactcaagctgcttgcgtcaagcgaccctcctacttccgggtctcagtcagccggtataactggagtctctctgcacacccagccacagatcatgaaggtcagcctgagacactgtaatactttcatctgtttcgcttag

SEQ ID NO: 228332 - DNA, 762 bp, Artificial Sequence
  derived and/or modified sequence
atggctgacgatcagggatgtattgaggaacagggagttgaagacagcgctaacgaagatagtgttgatgcaaagcctgacaggtcatctttcgtgccctccctgttctctaagaagaagaagaatgtcactatgaggagtataaaaactacacgcgacagggttccaacgtaccaatacaacatgaactttgagaagctgggaaagtgcattatcattaataacaagaatttcgacaaggtcaccggaatgggcgtgcgcaatggaacagataaggatgctgaagctctgttcaaatgttttagaagtctggggtttgacgtcattgtttataatgactgctcatgcgcaaagatgcaggatctgttaaagaaggcgtccgaggaggaccatacgaacgccgcatgctttgcatgcatcctgctgtcacatggagaagagaatatggaaagttgctccgtgacccaggctggggtgcagcggcgagatctgggacgcctacaacctccacccccccgcctggccgagggccctagcctgatgatggcatctagaccaacgagggggccctccatgacacagatgctcatactcgacacaagaagccagtggaagctgacctctagctctcctataccccgcttccaagctatcacccgaggcggtgcccaggaagaggcaccagggctctgtaagccatcagcaccatcctggaggtctactgaaaagacatggaagtcctgtaggtcttctcccggttag

SEQ ID NO: 228333 - DNA, 663 bp, Artificial Sequence
  derived and/or modified sequence
atggctgatgaccagggctgcatcgaggagcagggcgtggaggacagcgccaatgaagattctgtggatgccaagccagacaggagcagctttgtgcccagcctcttcagcaagaagaagaagaatgtgaccatgaggagcatcaagaccacccgggacagagtgcccacctaccagtacaacatgaactttgagaagctgggcaagtgcatcatcatcaacaacaagaactttgacaaggtgacaggcatgggcgtgagaaatggaacagacaaggatgctgaggccctcttcaagtgcttccgcagcctgggctttgatgtgattgtgtacaatgactgcagcgtgacccaggccggcgtgcagaggcgggacctgggccgcctgcagcccccaccaccccgcttcaagcagtacagctgcctgagcctgctgagctcctgggactacagacatgccccaccccggctggccaacttctgcatcttccggcgggagggcttccgccacgtgggccaggccggcctgaagctgctggccagcagtgacccccccaccagcggcagccagagcgctggcatcactggagtgtccctgcacacccagccccagatcatgaaggtgtccctgcggcactgcaacaccttcatctgctttgcctag

SEQ ID NO: 228334 - DNA, 663 bp, Artificial Sequence
  derived and/or modified sequence
atggctgatgaccagggctgcatcgaggagcagggcgtggaggacagcgccaatgaagattctgtggatgccaagccagacaggagcagctttgtgcccagcctcttcagcaagaagaagaagaatgtgaccatgaggagcatcaagaccacccgggacagagtgcccacctaccagtacaacatgaactttgagaagctgggcaagtgcatcatcatcaacaacaagaactttgacaaggtgacaggcatgggcgtgagaaatggaacagacaaggatgctgaggccctcttcaagtgcttccgcagcctgggctttgatgtgattgtgtacaatgactgcagcttcacccaggccggcgtgcagaggcgggacctgggccgcctgcagcccccaccaccccgcttcaagcagtacagctgcctgagcctgctgagctcctgggactacagacatgccccaccccggctggccaacttctgcatcttccggcgggagggcttccgccacgtgggccaggccggcctgaagctgctggccagcagtgacccccccaccagcggcagccagagcgctggcatcactggagtgtccctgcacacccagccccagatcatgaaggtgtccctgcggcactgcaacaccttcatctgctttgcctag

SEQ ID NO: 228335 - DNA, 762 bp, Artificial Sequence
  derived and/or modified sequence
atggctgatgaccagggctgcatcgaggagcagggcgtggaggacagcgccaatgaagattctgtggatgccaagccagacaggagcagctttgtgcccagcctcttcagcaagaagaagaagaatgtgaccatgaggagcatcaagaccacccgggacagagtgcccacctaccagtacaacatgaactttgagaagctgggcaagtgcatcatcatcaacaacaagaactttgacaaggtgacaggcatgggcgtgagaaatggaacagacaaggatgctgaggccctcttcaagtgcttccgcagcctgggctttgatgtgattgtgtacaatgactgcagctgtgccaagatgcaggacctgctgaagaaggccagcgaggaggaccacaccaatgctgcctgctttgcctgcatcctgctgagccacggggaggagaacatggagagctgcagcgtgacccaggccggcgtgcagaggcgggacctgggccgcctgcagcccccaccaccccggctggccgagggccccagcctgatgatggccagccggcccacccggggccccagcatgacccagatgctgatcctggacaccaggagccagtggaagctgaccagcagcagccccatcccccgcttccaggccatcacccggggcggggcccaggaggaggcccctggcctgtgcaagcccagcgcccccagctggaggagcacagagaagacctggaagagctgccgcagcagccctggatag

SEQ ID NO: 228336 - DNA, 663 bp, Artificial Sequence
  derived and/or modified sequence
atggccgacgaccagggctgcatcgaggagcagggcgtggaggactcagcaaacgaggattccgtggacgcaaagcccgacagatcaagcttcgtcccctccttgttttctaaaaaaaagaagaatgttacgatgcgttctattaaaacaacacgagatcgcgtgccaacgtaccaatacaatatgaattttgagaagctgggcaagtgtatcatcataaacaacaagaatttcgacaaagtcacaggtatgggcgtgagaaatggcactgataaggatgccgaggccctgtttaaatgctttcgctcgctggggttcgacgtgatcgtttataatgactgttcagtgacgcaggcaggcgtgcaacgtagagatttgggcaggcttcagccacctcctccaaggttcaagcagtacagttgcctgagtctccttagctcctgggattatcggcacgccccccccagactggcaaatttttgcatatttcgcagagaagggttccgccacgttgggcaggcgggattgaaactgctggcgagttcggatcctccgaccagcggtagtcagtctgcgggaatcacaggtgtgtcacttcacacccaaccgcagattatgaaggttagccttcggcattgcaacacttttatctgctttgcttag

SEQ ID NO: 228337 - DNA, 663 bp, Artificial Sequence
  derived and/or modified sequence
atggccgacgaccagggctgcatcgaggagcagggcgtggaggactccgccaatgaagacagtgtggatgcaaaacccgacaggtcgtcattcgttcccagtctcttctccaagaagaagaaaaatgtgaccatgaggtcgattaaaactacccgggatagagttcctacatatcagtacaatatgaatttcgaaaagctgggcaagtgcatcatcatcaataataaaaacttcgataaggtgacaggcatgggagttcgcaacggaacggataaggacgcagaggccctctttaagtgctttagatccctgggattcgacgtgatcgtgtataacgattgcagtttcactcaagctggggttcagcggagggatctgggtcgcttgcaacctccccccccgcgttttaagcaatactcttgcctgtccttgctctccagctgggattataggcatgcgccaccacggctggccaacttctgtatcttccgtagagaggggttccggcacgtgggacaggccgggctcaaattgcttgcctcgtcagaccctccgacgagtggcagccagagtgcaggcatcacaggggtgagcctgcatacccagccccagattatgaaggtctccctgcgccactgcaacaccttcatctgctttgcctag

SEQ ID NO: 228338 - DNA, 762 bp, Artificial Sequence
  derived and/or modified sequence
atggccgacgaccagggctgcatcgaggagcagggcgtggaggacagcgctaacgaagactctgtggacgctaaacccgatagaagctcatttgtgccaagcttgttctccaagaagaaaaagaatgtcacaatgagatctatcaagaccacccgcgaccgcgtaccaacgtatcagtacaacatgaatttcgaaaaactaggcaagtgtatcatcatcaataacaaaaactttgataaagtgacaggcatgggcgtaagaaatggtactgataaggacgcggaagcccttttcaaatgcttccgcagcttaggatttgacgtgatagtatacaatgattgtagctgtgccaagatgcaggacctgctgaagaaagctagtgaagaggaccacacaaatgcagcttgcttcgcctgcattcttctatcgcatggagaagagaacatggaatcttgtagcgttactcaagccggcgtgcagaggcgggacctaggccggctgcagccaccccctccccggctagccgaaggtccgagtctcatgatggcatcacggcctaccaggggaccgtcaatgactcagatgttaatattggatacccgctctcagtggaaactgacaagctccagccctattcctcggttccaagctataacccggggtggtgcccaggaagaagcgcctggcctatgcaaacccagcgccccatcctggcggtcaaccgagaagacatggaaatcttgccgctcgtcaccagggtag

SEQ ID NO: 228339 - DNA, 663 bp, Artificial Sequence
  derived and/or modified sequence
atggccgacgaccagggttgcatcgaagaacaaggtgtcgaagactcggccaacgaagactctgtggacgctaagcctgatcgctcaagctttgttcccagtctgtttagcaagaaaaagaaaaatgttaccatgaggagcatcaaaaccacacgcgatagggtacctacttaccagtacaatatgaacttcgagaagttaggaaaatgtataattattaacaacaaaaacttcgacaaagtaaccggaatgggtgtcaggaatggaaccgataaggatgcggaggcactgtttaaatgcttccgatccctagggttcgatgtcatcgtctataatgattgctctgttactcaggcaggtgtccagagacgggatcttgggagactccaacctccccctccacgctttaaacaatatagctgtctatccctgctgtcatcgtgggactacaggcacgcaccacccaggttagccaacttttgcatcttccgccgagagggatttcgacacgtaggtcaggccggactcaaactgctggcgtctagcgatcctcccacctccggctcccaatctgccggtataactggtgtatcactccatacacaaccacagattatgaaagtgtctctgcgccattgtaacacttttatctgttttgcttag

SEQ ID NO: 228340 - DNA, 663 bp, Artificial Sequence
  derived and/or modified sequence
atggctgacgaccaagggtgtattgaagaacaaggagtggaagatagtgcaaacgaggactcggttgacgctaagcccgaccgtagttcgtttgtaccctcattgttttctaagaagaagaaaaacgttaccatgagatcaatcaagactactagggatcgcgtgccgacataccagtacaatatgaattttgagaagctcggcaaatgcatcattattaacaataaaaacttcgataaggtcactgggatgggggtacgaaacggcactgataaggatgctgaagcactgtttaagtgcttcaggtcactcgggttcgacgttatcgtgtacaacgactgctcatttactcaggctggagtacagaggcgcgacctcggacgcctgcaacctcccccacctaggtttaagcaatactcttgtttgtcactgctgtctagttgggattaccggcacgccccaccgaggctagctaatttttgtatcttccgtagagagggatttagacacgtgggtcaggccggactcaaactccttgcctcctctgaccccccaacttcaggctctcagtctgccggaataacgggtgtgagcctacatactcagcctcagatcatgaaagtttctctgagacactgcaatacctttatctgcttcgcatag

SEQ ID NO: 228341 - DNA, 762 bp, Artificial Sequence
  derived and/or modified sequence
atggccgacgatcaaggctgtattgaagagcagggcgttgaggatagcgccaacgaggactccgtcgacgcgaaacccgaccgctcatcgtttgtgccctccctcttcagtaagaagaagaaaaatgtgacaatgcggagcataaaaaccacccgcgatcgggtcccaacatatcaatataacatgaactttgagaaactgggtaagtgtattatcattaataacaaaaatttcgataaagtcaccggcatgggtgtccgcaacggtaccgataaggatgcagaggcccttttcaagtgctttcgcagtctcggatttgacgtgatcgtttataacgattgctcatgcgcgaagatgcaggacctccttaagaaagcttctgaggaggatcacacgaatgctgcctgcttcgcgtgcatcctgctgtcgcacggcgaggagaatatggagagctgcagtgtcactcaggctggcgttcagaggagagacctcgggaggctccaaccccctcctcctcgcctggctgagggcccttcacttatgatggcttcgcgccctacacgcggacccagcatgactcaaatgttgattctggataccaggagtcaatggaagctcacctccagcagcccaattccgcgttttcaagctataacgcggggtggggcacaggaggaggcaccgggtctctgcaaaccctctgcaccgagttggcggtccacggagaaaacatggaagtcctgtaggagcagtcccggttag

SEQ ID NO: 228342 - DNA, 777 bp, Artificial Sequence
  derived and/or modified sequence
agacccttgctgcggagcgacggagagagactgtgccagtcccagccgccctaccgccgtgggaacgatggcagatgatcagggctgtattgaagagcagggggttgaggattcagcaaatgaagattcagtggatgctaagccagaccggtcctcgtttgtaccgtccctcttcagtaagaagaagaaaaatgtcaccatgcgatccatcaagaccacccgggaccgagtgcctacatatcagtacaacatgaattttgaaaagctgggcaaatgcatcataataaacaacaagaactttgataaagtgacaggtatgggcgttcgaaacggaacagacaaagatgccgaggcgctcttcaagtgcttccgaagcctgggttttgacgtgattgtctataatgactgctctgtcacccaggctggagtgcagcggcgtgatctcggaagactgcaacctccacctcccaggttcaagcaatactcctgcctcagcctcctgagtagctgggattacaggcacgcaccaccacgcctggctaatttttgtatttttagaagagaggggtttcgccatgttggccaggctggtctcaaactcctggcgtcaagtgatccacccacctcaggctcccaaagtgctgggattacaggtgtgagcctccacacccagccacaaattatgaaggtttctttaagacattgcaatacttttatttgctttgcttagtcatttgaaacacattcattcatttatcttttcatcaaattatcatt

SEQ ID NO: 228343 - DNA, 741 bp, Artificial Sequence
  derived and/or modified sequence
aaaggggccccagacccttgctgcggagcgacggagagagactgtgccagtcccagccgccctaccgccgtgggaacgatggcagatgatcagggctgtattgaagagcagggggttgaggattcagcaaatgaagattcagtggatgctaagccagaccggtcctcgtttgtaccgtccctcttcagtaagaagaagaaaaatgtcaccatgcgatccatcaagaccacccgggaccgagtgcctacatatcagtacaacatgaattttgaaaagctgggcaaatgcatcataataaacaacaagaactttgataaagtgacaggtatgggcgttcgaaacggaacagacaaagatgccgaggcgctcttcaagtgcttccgaagcctgggttttgacgtgattgtctataatgactgctctttcacccaggctggagtgcagcggcgtgatctcggaagactgcaacctccacctcccaggttcaagcaatactcctgcctcagcctcctgagtagctgggattacaggcacgcaccaccacgcctggctaatttttgtatttttagaagagaggggtttcgccatgttggccaggctggtctcaaactcctggcgtcaagtgatccacccacctcaggctcccaaagtgctgggattacaggtgtgagcctccacacccagccacaaattatgaaggtttctttaagacattgcaatacttttatttgctttgcttag

SEQ ID NO: 228344 - DNA, 2387 bp, Artificial Sequence
  derived and/or modified sequence
gcaagctgggctgctgggtgggtacttccttcaaagctgagggagcgtcctacgcccacgcgcgcaggagggcgccccccgcaaagcaacgtctaggagaccacagtggatgccacagcgggcccgaagcggatcagccttgtgggatggcagatgatcagggctgtattgaagagcagggggttgaggattcagcaaatgaagattcagtggatgctaagccagaccggtcctcgtttgtaccgtccctcttcagtaagaagaagaaaaatgtcaccatgcgatccatcaagaccacccgggaccgagtgcctacatatcagtacaacatgaattttgaaaagctgggcaaatgcatcataataaacaacaagaactttgataaagtgacaggtatgggcgttcgaaacggaacagacaaagatgccgaggcgctcttcaagtgcttccgaagcctgggttttgacgtgattgtctataatgactgctcttgtgccaagatgcaagatctgcttaaaaaagcttctgaagaggaccatacaaatgccgcctgcttcgcctgcatcctcttaagccatggagaagaaaatatggaatcttgctctgtcacccaggctggagtgcagcggcgtgatctcggaagactgcaacctccacctcccaggcttgccgagggaccgagcttgatgatggcatccaggccgactcggggcccatcaatgacacagatgctaatcctcgatacaagatcccagtggaagctgacttcctcttcgcctattccacggttccaggctattactcgtggaggagcccaggaagaggctcctggtttgtgcaagccctctgctccatcctggaggagcacggaaaagacctggaaatcatgcagatcctcaccagggtgaatgacagagttgccaggcactttgagtctcagtctgatgacccacacttccatgagaagaagcagatcccctgtgtggtctccatgctcaccaaggaactctacttcagtcaatagccatatcaggggtacattctagctgagaagcaatgggtcactcattaatgaatcacatttttttatgctcttgaaatattcagaaattctccaggattttaatttcaggaaaatgtattgattcaacagggaagaaactttctggtgctgtcttttgttctctgaattttcagagactttttttataatgttattcatttggtgactgtgtaactttctcttaagattaattttctctttgtatgtctgttaccttgttaatagacttaatacatgcaacagaagtgacttctggagaaagctcatggctgtgtccactgcaattggtggtaacagtggtagagtcatgtttgcacttggcaaaaagaatcccaatgtttgacaaaacacagccaaggggatatttactgctctttattgcagaatgtgggtattgagtgtgatttgaatgatttttcattggcttagggcagattttcatgcaaaagttctcatatgagttagaggagaaaaagcttaatgattctgatatgtatccatcaggatccagtctggaaaacagaaaccattctaggtgtttcaacagagggagtttaatacaggaaattgacttacatagatgataaaagagaagccaaacagcaagaagctgttaccacacccagggctatgaggataatgggaagaggtttggtttcctgtgtccagtagtgggatcatccagaggagctggaaccatggtgggggctgcctagtgggagttaggaccaccaatggattgtggaaaatggagccatgacaagaacaaagccactgactgagatggagtgagctgagacagataagagaataccttggtctcacctatcctgccctcacatcttccaccagcaccttactgcccaggcctatctggaagccacctcaccaaggaccttggaagagcaagggacagtgaggcaggagaagaacaagaaatggatgtaagcctggcccataatgtgaacataagtaatcactaatgctcaacaatttatccattcaatcatttattcattgggttgtcagatagtctatgtatgtgtaaaacaatctgttttggctttatgtgcaaaatctgttatagctttaaaatatatctggaactttttagattattccaagccttattttgagtaaatatttgttacttttagttctataagtgaggaagagtttatggcaaagatttttggcactttgttttcaagatggtgttatcttttgaattcttgataaatgactgtttttttctgcctaatagtaactggttaaaaaacaaatgttcatatttattgattaaaaatgtggttgcttaattcct

SEQ ID NO: 228345 - DNA, 663 bp, Artificial Sequence
  derived and/or modified sequence
atggccgacgaccagggctgcatcgaggagcagggcgtggaggacagcgccaacgaggacagcgtggacgccaagcccgacagaagcagcttcgtgcccagcctgttcagcaagaagaagaagaacgtgaccatgagaagcatcaagaccaccagagacagagtgcccacctaccagtacaacatgaacttcgagaagctgggcaagtgcatcatcatcaacaacaagaacttcgacaaggtgaccggcatgggcgtgagaaacggcaccgacaaggacgccgaggccctgttcaagtgcttcagaagcctgggcttcgacgtgatcgtgtacaacgactgcagcgtgacccaggccggcgtgcagagaagagacctgggcagactgcagccccccccccccagattcaagcagtacagctgcctgagcctgctgagcagctgggactacagacacgccccccccagactggccaacttctgcatcttcagaagagagggcttcagacacgtgggccaggccggcctgaagctgctggccagcagcgacccccccaccagcggcagccagagcgccggcatcaccggcgtgagcctgcacacccagccccagatcatgaaggtgagcctgagacactgcaacaccttcatctgcttcgcctag

SEQ ID NO: 228346 - DNA, 663 bp, Artificial Sequence
  derived and/or modified sequence
atggccgacgaccagggctgcatcgaggagcagggcgtggaggacagcgccaacgaggacagcgtggacgccaagcccgacagaagcagcttcgtgcccagcctgttcagcaagaagaagaagaacgtgaccatgagaagcatcaagaccaccagagacagagtgcccacctaccagtacaacatgaacttcgagaagctgggcaagtgcatcatcatcaacaacaagaacttcgacaaggtgaccggcatgggcgtgagaaacggcaccgacaaggacgccgaggccctgttcaagtgcttcagaagcctgggcttcgacgtgatcgtgtacaacgactgcagcttcacccaggccggcgtgcagagaagagacctgggcagactgcagccccccccccccagattcaagcagtacagctgcctgagcctgctgagcagctgggactacagacacgccccccccagactggccaacttctgcatcttcagaagagagggcttcagacacgtgggccaggccggcctgaagctgctggccagcagcgacccccccaccagcggcagccagagcgccggcatcaccggcgtgagcctgcacacccagccccagatcatgaaggtgagcctgagacactgcaacaccttcatctgcttcgcctag

SEQ ID NO: 228347 - DNA, 762 bp, Artificial Sequence
  derived and/or modified sequence
atggccgacgaccagggctgcatcgaggagcagggcgtggaggacagcgccaacgaggacagcgtggacgccaagcccgacagaagcagcttcgtgcccagcctgttcagcaagaagaagaagaacgtgaccatgagaagcatcaagaccaccagagacagagtgcccacctaccagtacaacatgaacttcgagaagctgggcaagtgcatcatcatcaacaacaagaacttcgacaaggtgaccggcatgggcgtgagaaacggcaccgacaaggacgccgaggccctgttcaagtgcttcagaagcctgggcttcgacgtgatcgtgtacaacgactgcagctgcgccaagatgcaggacctgctgaagaaggccagcgaggaggaccacaccaacgccgcctgcttcgcctgcatcctgctgagccacggcgaggagaacatggagagctgcagcgtgacccaggccggcgtgcagagaagagacctgggcagactgcagccccccccccccagactggccgagggccccagcctgatgatggccagcagacccaccagaggccccagcatgacccagatgctgatcctggacaccagaagccagtggaagctgaccagcagcagccccatccccagattccaggccatcaccagaggcggcgcccaggaggaggcccccggcctgtgcaagcccagcgcccccagctggagaagcaccgagaagacctggaagagctgcagaagcagccccggctag

SEQ ID NO: 228348 - protein, 390 aa, Artificial Sequence
  derived and/or modified sequence
MMQSATVPAEGAVKGLPEMLGVPMQQIPQCAGCNQHILDKFILKVLDRHWHSSCLKCADCQMQLADRCFSRAGSVYCKEDFFKRFGTKCTACQQGIPPTQVVRKAQDFVYHLHCFACIICNRQLATGDEFYLMEDGRLVCKEDYETAKQNDDSEAGAKRPRTTITAKQLETLKNAYKNSPKPARHVREQLSSETGLDMRVVQVWFQNRRAKEKRLKKDAGRHRWGQFYKSVKRSRGSSKQEKESSAEDCGVSDSELSFREDQILSELGHTNRIYGNVGDVTGGQLMNGSFSMDGTGQSYQDLRDGSPYGIPQSPSSISSLPSHAPLLNGLDYTVDSNLGIIAHAGQGVSQTLRAMAGGPTSDISTGSSVGYPDFPTSPGSWLDEMDHPPF

SEQ ID NO: 228349 - DNA, 1913 bp, Artificial Sequence
  derived and/or modified sequence
ccggagagcgagatcaaagggactggaaacagactggggactggcggggggagggggccggccagcctgtggagtcctccctgagaagcggagggcccggcttccaccgtgactccagcggcctgcttggggttttaattattattttgaaatttctgaatcgagctagagcgagagagcgagagatctccgtagactgcgactcgctggctttcgctccgagatgatgcagagtgcgactgtccccgcggaaggggctgtcaaggggctcccggagatgctaggtgtgccgatgcaacagattccccagtgcgctggctgcaaccagcacatcctggacaagttcatcctgaaggtcctggacagacactggcacagctcctgcctcaagtgtgcagactgccagatgcagctggcggacaggtgcttctccagggctgggagcgtctactgcaaggaggacttcttcaagcgcttcggcacaaaatgcacggcctgccagcagggtatccccccaacccaggtggtccgcaaggcccaggactttgtctaccacctgcactgctttgcttgcatcatctgcaaccggcagctggccacgggggacgaattctacctcatggaggacgggcggctggtgtgcaaggaagactacgagacagccaagcagaacgatgactcagaggctggagctaagcggccccggaccaccatcacagccaagcagctggagacattaaagaatgcatacaagaactcccccaagcctgcccggcacgtgagggagcagctgtcctcagagacaggcctggacatgagggtcgtacaggtttggtttcagaacagaagggccaaagagaaacgcctgaagaaggatgcagggcggcaccgctgggggcagttctataagagcgtcaagaggagccggggcagcagcaagcaggagaaggagagctctgcagaggactgtggggttagtgacagtgagctgagcttccgagaggatcaaattctctcagaacttggccacaccaataggatttatggcaacgtgggggacgttacaggcggacagttaatgaatgggagcttctccatggacgggacaggacaatcctatcaggacttgagggatgggagcccctatggaatcccccagtctccatcctccatatcgtccctgccatcccacgctcctttgctcaatgggctggattacacggtggacagtaatttgggcatcattgcgcatgcagggcagggagtaagccagacgctgagagccatggctgggggacccacctctgacatctccacaggaagcagtgtaggctatcccgactttccaactagcccaggctcttggctcgatgaaatggatcatcctcctttttaaacttctctcctccccaccctacctgcccccctggcttgagagaatatcttcaaggatcaaaagagacttgccttttaaggatcgaaagtacgccaatgtgaatttccattattttcaatggaagtcctccgctgattcctagaaggctgtgagaccacactagggcattgtttccctggggaagcagtgggagagcagactcatctcagaacacagcacagggggtaatggcctagagctctagggacactggcttgttgggtctctcccctgctgttctgcttaggggcttggctgctcagtgctttggtagcacaaggtgactgtgataggcccccttggcctttgggaactttgctccaactggtgtgtctcacacaatgcctcccaaaacactgctctcaccagaactgagactcctaaggtagaggcctcacagcccttgagtaaaataaaagtgatttctggaccatcaaaaaaaaaaaaaaaaaaaaaaaaaaaaaaaaaaaaaaaaaaa

SEQ ID NO: 228350 - DNA, 1173 bp, Artificial Sequence
  derived and/or modified sequence
atgatgcagagtgcaaccgttcccgctgagggagctgttaaaggcttgcctgagatgctgggcgtacctatgcagcagatccctcagtgcgccggctgcaaccagcacatattggataaattcattttgaaagtgctggacaggcattggcatagttcatgcctgaagtgtgccgattgtcaaatgcagcttgccgatcgatgcttttccagggcaggcagtgtttactgtaaagaagacttttttaagagatttgggaccaaatgtaccgcctgtcagcaggggatcccccccacccaggtggtgcggaaggcgcaggatttcgtctaccatctacactgctttgcttgcataatttgtaatcgccagcttgctacaggcgatgaattctacctcatggaggacgggcggttggtgtgcaaagaggactacgagactgccaaacagaacgatgatagtgaggccggcgctaagcgccctaggactaccatcacagcaaagcagcttgaaactctgaagaatgcatataaaaattcacccaagccagctaggcatgtgcgtgaacagctgtcatccgagaccggcctggacatgagagttgttcaggtatggttccagaatcggagagccaaagaaaaaaggttgaaaaaggatgccgggcgtcatcgttggggccagttctataaatctgtgaagcgatcaaggggatctagcaaacaggaaaaggagagctctgccgaagattgcggtgtttctgatagcgaactgagcttccgcgaagatcaaattttgtccgaactgggacatacaaacaggatttatgggaacgttggagatgtcactggaggccaactaatgaacggcagtttttccatggatgggaccgggcagtcctatcaggacttacgggacggctcaccctacggaatcccccagtcaccctcttcaataagtagcctgccctcccatgccccgctactgaacgggcttgattacactgtagacagcaacttgggcattatcgctcacgccggccagggcgtatctcagactcttagggccatggccggcggccccacaagcgacatcagcacaggatcttctgtggggtatccggatttccccacaagccccggctcttggctggacgaaatggatcatccgccattctag

SEQ ID NO: 228351 - DNA, 1173 bp, Artificial Sequence
  derived and/or modified sequence
atgatgcagagcgccaccgtgcctgctgagggcgctgtgaagggcctgcctgagatgctgggcgtgcccatgcagcagatcccccagtgtgccggctgcaaccagcacatcctggacaagttcatcctgaaggtgctggacagacactggcacagcagctgcctgaagtgtgccgactgccagatgcagctggccgaccgctgcttcagccgggccggctctgtgtactgcaaggaggacttcttcaagagatttggcaccaagtgcacagcctgccagcagggcatcccccccacccaggtggtgaggaaggcccaggactttgtgtaccacctgcactgctttgcctgcatcatctgcaaccggcagctggccactggagatgagttctacctgatggaggatggccgcctggtgtgcaaggaggactatgaaacagccaagcagaatgatgattctgaggccggggccaagaggcccaggaccaccatcacagccaagcagctggagaccctgaagaatgcctacaagaacagccccaagccagcccggcacgtgcgggagcagctgagcagcgagaccggcctggacatgagggtggtgcaggtgtggttccagaacagaagagccaaggagaagaggctgaagaaggatgctggccgccaccgctggggccagttctacaagtctgtgaagaggagccggggcagcagcaagcaggagaaggagagcagcgctgaggactgtggggtgtctgacagcgagctgtccttccgggaggaccagatcctgtctgagctgggccacaccaaccgcatctatggaaatgtgggagatgtgactggaggccagctgatgaatggcagcttctccatggatggcaccggccagagctaccaggacctgagagatggcagcccctacggcatcccccagagccccagcagcatcagcagcctgcccagccacgcccccctgctgaatggcctggactacacagtggacagcaacctgggcatcatcgcccacgccggccagggcgtgtcccagaccctgcgggccatggccggcggccccaccagtgacatcagcacaggcagctctgtgggctacccagacttccccaccagccctggctcctggctggatgagatggaccacccccccttctag

SEQ ID NO: 228352 - DNA, 7083 bp, Artificial Sequence
  derived and/or modified sequence
aacctgggatgtgcaccaaccccggagagcgagatcaaagggactggaaacagactggggactggcggggggagggggccggccagcctgtggagtcctccctgagaagcggagggcccggcttccaccgtgactccagcggcctgcttggggttttaattattattttgaaatttctgaatcgagctagagcgagagagcgagagatctccgtagactgcgactcgctggctttcgctccgagatgatgcagagtgcgactgtccccgcggaaggggctgtcaaggggctcccggagatgctaggtgtgccgatgcaacagattccccagtgcgctggctgcaaccagcacatcctggacaagttcatcctgaaggtcctggacagacactggcacagctcctgcctcaagtgtgcagactgccagatgcagctggcggacaggtgcttctccagggctgggagcgtctactgcaaggaggacttcttcaagcgcttcggcacaaaatgcacggcctgccagcagggtatccccccaacccaggtggtccgcaaggcccaggactttgtctaccacctgcactgctttgcttgcatcatctgcaaccggcagctggccacgggggacgaattctacctcatggaggacgggcggctggtgtgcaaggaagactacgagacagccaagcagaacgatgactcagaggctggagctaagcggccccggaccaccatcacagccaagcagctggagacattaaagaatgcatacaagaactcccccaagcctgcccggcacgtgagggagcagctgtcctcagagacaggcctggacatgagggtcgtacaggtttggtttcagaacagaagggccaaagagaaacgcctgaagaaggatgcagggcggcaccgctgggggcagttctataagagcgtcaagaggagccggggcagcagcaagcaggagaaggagagctctgcagaggactgtggggttagtgacagtgagctgagcttccgagaggatcaaattctctcagaacttggccacaccaataggatttatggcaacgtgggggacgttacaggcggacagttaatgaatgggagcttctccatggacgggacaggacaatcctatcaggacttgagggatgggagcccctatggaatcccccagtctccatcctccatatcgtccctgccatcccacgctcctttgctcaatgggctggattacacggtggacagtaatttgggcatcattgcgcatgcagggcagggagtaagccagacgctgagagccatggctgggggacccacctctgacatctccacaggaagcagtgtaggctatcccgactttccaactagcccaggctcttggctcgatgaaatggatcatcctcctttttaaacttctctcctccccaccctacctgcccccctggcttgagagaatatcttcaaggatcaaaagagacttgccttttaaggatcgaaagtacgccaatgtgaatttccattattttcaatggaagtcctccgctgattcctagaaggctgtgagaccacactagggcattgtttccctggggaagcagtgggagagcagactcatctcagaacacagcacagggggtaatggcctagagctctagggacactggcttgttgggtctctcccctgctgttctgcttaggggcttggctgctcagtgctttggtagcacaaggtgactgtgataggcccccttggcctttgggaactttgctccaactggtgtgtctcacacaatgcctcccaaaacactgctctcaccagaactgagactcctaaggtagaggcctcacagcccttgagtaaaataaaagtgatttctggaccatccttattgaaccctatatttcaaaatgaaaagatcagttattaaaggtcagtgaacactttgatggccagtttgatattaaaaacatgccccctccttttttatttttgctgtgaagatatgaattctttcctacaaaccagagaatatgaacctgttttggtttttaagtgtcccatctatatcattgactctgatggcaagaggtggttttcattgcaggtgactgaggctgagctgagtagccctggaccaccgctgcagattgcctgagtcgtccccttggtgcacagtgtgccttcttcaattgcttgtatcatttattccacaagacaggctgtgggctgtaaaatgagcaaaactaaaatgtggggagaacaaaatgacaatcaatcagtgaacatttgtagacacatttggattccaaacctgcagtctgttcagccatatcggctgatgccagtcttccagagttccccatcccttgtagggtgaaatatttggagtctgttttgaaggagttggtttagatgagcttgcaagtctacccctctgaaagctttctctgctgtcctagctgactcaattggaggacagttttggtcatttccaggaaccagcaatttttttttggcctaccttggttgggaagagtaatttagggagcagccctaaaattgtccaaagggttctaagtggttcttgggctgcatctctctggattgctggctggacacctgccatgccttgggctgcagtcccatggtcagaaagccagaactctctggccagtggtggtgcagggactccccgttgtgcaggtttgcagtagcaaatcactaagcctgaggccagagcaaggccaacccccgctttacgagttgccactcctgcgacagactgcactgctgtgggaaacgctgtcctgaatggtgctgcagctcccacccaccttgtgcacccatctaccatcaggaagctctccatgtgcaaactggaatttagccagctggaatttattcctgtccctctgggaagctgtgtttgcttcttctggcctcccattctcttaaatgagatcagcagagtaggaaagggtgagaaggcattgcctatcacatgaagtgatggggccagagaccctaaggacccttccttctacgaatggttggtcaccttttgaggactgcaaagacttaggcatgtcataggcagactaaaggaagaatacacagttcctcttggactgctacatcttttgtaagcccttttccaggactaaactaagttcaattaagtaagttctttaaaacagtaaattccgggatcagccttcgggccctcttctctgaccaattttatagcgtaccctcgttttttggtgtgctgcagtggtcatgatttttgcttgagaagtctgcaaacatagacacttctcttgaggttccatgtttatggatgatgttgtgttaatcctagccaattctgtgctattgggaattctccaatcatgaacactggggtggggaggaagacacaaatgccatgtgaggaaaggaaaatgcagtcgtctttttggaggatggctttttaaatacacccttcttagcaggctgcttaaaatacacaggagaaaaggctctgctgggcaatgaaccagatgaaaagctgcccacccagatcactgttgcaggttgactatttggcttagcaactcatgggatttcagaggcccttgaagtttttggtgagtatagtgtgggggagagcaggctttttaaaaggggggggggcatcctcctctgtgtagcactgtttaagatcactgtaagtaagttgaccagtttttgtaagttaatcatactaattcccagttcaatagtggaaggagaggccttcctcatttatactaataatataataaatctcttgaggaactcagtgagcagttgacgaggtcaatagttctttggcatcagtagggctggttagctggaaaaacccttgagagcactggcctgaaaaccaggagagctttgttttccagagccacctccccagaaagcagcaaacactgctgcctgtttagaagcacagccacagtaggtctaagattttaaatggatctccctacaggttgggttagcattatgggtgggctggtgccactaatgagccattgcatgacaggactcttctggggtttggaaatggagaaaagccgggcattcattacttttagcttctcttagaggcactcctctgttgcttggaagtctattatggggtataaggtgctacatggtagctgtttccccccttgctaaaatgacatggatgaattttaaaaatgaaatgagaccttctagaggcaaccattatctgcagtgcctggctggtcgactttagagtaggaagctcttgaatccaggagcaaattagttaaaaccccaagttccagtggtaactggtataagcaaaatggaaactgaggggctatggaggaatctctgtttgttggaacgtaatgaaaccatggaggaaataccagatttaagggctaagaagctggcccgatgggtaaatcagtgttgggagtcaggttcttggcccttcaaggacttgctatgcaacctcaggcaaattcctctcagtctttgtgctttctctttcttgtctcatctgacagttatgaatataacgtaaaataaagatcaactatcattgataacactgttcctgcaaatgaatactgtgaaacatcagggaaagaggaaaaaattaagccacaagaaaaccatttggcagtgtccttaaactttttttgggggggggcagtgtaaaacatgaaacctagtaagataattgggccattagatcttcatcattaaactcactttgcaaggaagtgtaagaaatctgtaaaacaaaagacattcctatctcagaagctcaaactggtgatttccaactgcctctttacaggagggggctcaaggcttctgatgagcaaaggctgtgtgttgtatgacagtccactctctgcacctacacttccacgtgccacgactgacaacttggttataaccatgaaaataatgaccatacctccccagccagcagggtctggaaggcctgaggaggctcatttttaaacactgcactttaaaaattggaaaccgtgagatgaagaaaaattcaattaagcggaaatgagttttgttttattgcctgctgctgaagggctctgggcatgctgaaagctaaatgaaaagcacatcactggctctcttctttcttggattggtcaattggccctttttgcagtagttgctccaactgttctaaacagtgagtgactggagccaaaaagagagagctcagcaaagccatcccatccacactctgcttggtaggaccacactaaaagcacagtttcatgctgctagctctggtaaggagacagctgcaggtttgggaggtgcaccaagcattcctttgcttagggaggcagagcacaggtgaacagaggaaggacacccccactctcatctattgcccaccgagaggcaagaatcacaccaactttcccacttgaggactgtgttcggccaaacaagcaggttcagggctgcgggattccagaagttgctctgagcttgcaatcagacctcaaagccccagatcccctcagctctggatcgttgccctcatccttcacaatgtaaattttgtacagttaaagagaaatgaagtctcgtttcctggggaaaaaaaagaaaaaaagaaaaaaaaaagacccacccatccttatttattgccatatgactttggaaaacagaagctggtgcgtttgtttgtatatgcctcctgtgtgttggcatgagatgtgtacggtaaaattatgtaaaataaatatggaaattctttagatgctgatgtgtcttgcttttcatttggtttgctggaagttttttctcttgacataaatagaataaaaactgagtgatgtgaggtcctttccttttatcatcagaaggaaaccaaatatacaactctgaatgccagaactattatacttagagccatgaaataccagaaccactcaataaaggactgattagaggaagttccctggtttttctaatagtcatttcctgggcacgatcctctgcccccagacttaggaaatgagcagtagaaatgttgaccatataacttttagttcctgtttgttcagtggcatttttaaaatttttttttgagacagagtcttgcgctgttgcccaggctggagtgcagtggtgtgatctcagctcactgcaacctctgcttcctgggttcgagtgattttcgtgcctcagcctccagagtacgtgggattacaggcatgcgcaaacacgcctggctaattttttgtatttttagtagagacggggttttgccacgttggccaggctggtctcgaactcctgacctcaagtgatccgcccacctgggcctcccaaagtgctggaattacaggtgtgagccaccatgcccggcctgtccagtagcattttaaaagtccttcacactcatacatttttctttctagagaaagtatatgcaaatgtctatatttacagagggacagaaacacctcatcagagtcatcagggctcctggacaaacattttccaggagaatctccatttaggtttgttttctctgcaggagtctttattagtgtgcagaccctaagtttagctggaatggaaacagcaacagggactttttcattacattaaaaaaaaaaaaagtcatagcatttctttacagctgggattccactgtggaaaaactacagcgtgtttcttttccccactagtcattagttttgtttggctgaagagaagatccaaagcagtggcactgtccaatatggtagctactagccacacatggctatttaaatttaaattagtattaaataaaactaaaagtttagttccttacactagacacattttaggtgctcaacagcttcatgtgaccagtggctactgtatttggacgacactgatataaaacagttctatcattgcagatggctctactggacggtgctcatagagtcttgttagggagagtgggcaaggaaatctcattcatcacatgtttagctattagttatcctggaatacttggtgaa

SEQ ID NO: 228353 - DNA, 1173 bp, Artificial Sequence
  derived and/or modified sequence
atgatgcagagcgccaccgtgcccgccgagggcgccgtgaagggcttacctgagatgttgggagtacccatgcaacaaatcccgcaatgtgccggttgtaatcagcacatactcgataaattcatcctcaaagtgttagatcggcactggcactccagctgcctcaaatgcgctgattgccagatgcaacttgccgatagatgctttagccgggcaggcagtgtgtactgcaaagaggatttctttaagcggttcggaacaaagtgcaccgcctgtcagcagggcatcccccccacgcaagtcgtgcggaaagcacaggacttcgtctatcatctccactgtttcgcctgcattatctgtaataggcagctcgctaccggcgatgagttttacctgatggaggatgggcgtcttgtatgtaaggaagactatgagacggccaagcagaacgacgattcagaggctggagcaaaacggcctcgaaccactattactgccaaacaactagagactcttaaaaacgcttataagaacagccccaagccagctcggcacgtgcgcgaacagcttagctctgaaaccgggctagatatgcgcgtcgtgcaagtgtggtttcagaaccgtagggccaaagagaaaagactgaaaaaggacgctggtcgacatcgctgggggcaattctacaagtccgtgaaacggagccgcggatcttccaagcaagaaaaggaatcttccgccgaggattgcggggtgtctgattcagagctctccttccgggaagaccagatcttgtccgagttggggcacaccaataggatctacggcaatgtcggagacgtaaccggaggacagttgatgaacggatctttttcaatggacggcacaggtcagagttaccaggacctccgggatgggagcccttatggcatcccccagtcaccttcatctatttcatctttgcctagccacgctccgctgcttaacggtttagactacactgtcgatagcaatttaggaattatcgcccatgccggccagggggtgagtcaaactcttagagccatggccgggggaccaacttctgacatttccacaggttcatctgtgggctatcccgatttccctacctctcccgggtcttggcttgatgaaatggatcatcctccattctag

SEQ ID NO: 228354 - DNA, 1173 bp, Artificial Sequence
  derived and/or modified sequence
atgatgcagtcagccactgtgcccgctgagggggcagtaaagggattaccagagatgctgggggtccccatgcaacagataccccagtgtgccggatgcaaccagcatattcttgacaagttcattttgaaggtcttagacagacactggcattccagttgcctcaaatgcgctgattgccaaatgcagctcgcagatcgatgtttttcaagagcaggcagtgtgtactgtaaagaagatttcttcaaaagatttgggaccaagtgtactgcctgccagcagggtatcccccctacacaggtggtgcggaaagcccaggactttgtgtatcaccttcactgcttcgcctgcatcatttgtaatagacagcttgccaccggagatgagttctatctgatggaggacgggcgactggtctgtaaagaggattacgaaacagccaagcagaatgatgacagcgaagcgggtgctaagagacctcgcacaaccattacagctaagcagctcgagacactcaaaaatgcctataaaaactctcccaaaccggcaaggcacgttcgagaacagctctcaagtgagactggtctggatatgagggtcgttcaggtgtggttccaaaataggagagcaaaggaaaagcgactgaaaaaggacgctggccgacatcgatgggggcaattttataagagcgttaaacgcagccggggatctagcaaacaagagaaggaatcgtcggccgaggattgcggggtgtctgatagcgaactgtcctttagagaggatcaaattctgagcgagctgggtcataccaacaggatttacgggaatgtaggcgatgtgaccggcggacagctaatgaacggctcattctctatggacggcacaggacagtcatatcaggacctgcgggacggctcgccatacggaatcccacagtccccatctagcatctcaagcctgccaagtcacgctccgctgcttaacgggctggactatacggttgacagcaatctgggtatcatcgcccacgccggtcagggcgtctcccaaaccctcagagctatggccggaggccctacctcagatatcagtacaggatcgagtgtcggatatcccgactttcccacctctcctggctcatggctggatgagatggaccaccctccattttag

SEQ ID NO: 228355 - DNA, 1173 bp, Artificial Sequence
  derived and/or modified sequence
atgatgcagagcgccaccgtgcccgccgagggcgccgtgaagggcctgcccgagatgctgggcgtgcccatgcagcagatcccccagtgcgccggctgcaaccagcacatcctggacaagttcatcctgaaggtgctggacagacactggcacagcagctgcctgaagtgcgccgactgccagatgcagctggccgacagatgcttcagcagagccggcagcgtgtactgcaaggaggacttcttcaagagattcggcaccaagtgcaccgcctgccagcagggcatcccccccacccaggtggtgagaaaggcccaggacttcgtgtaccacctgcactgcttcgcctgcatcatctgcaacagacagctggccaccggcgacgagttctacctgatggaggacggcagactggtgtgcaaggaggactacgagaccgccaagcagaacgacgacagcgaggccggcgccaagagacccagaaccaccatcaccgccaagcagctggagaccctgaagaacgcctacaagaacagccccaagcccgccagacacgtgagagagcagctgagcagcgagaccggcctggacatgagagtggtgcaggtgtggttccagaacagaagagccaaggagaagagactgaagaaggacgccggcagacacagatggggccagttctacaagagcgtgaagagaagcagaggcagcagcaagcaggagaaggagagcagcgccgaggactgcggcgtgagcgacagcgagctgagcttcagagaggaccagatcctgagcgagctgggccacaccaacagaatctacggcaacgtgggcgacgtgaccggcggccagctgatgaacggcagcttcagcatggacggcaccggccagagctaccaggacctgagagacggcagcccctacggcatcccccagagccccagcagcatcagcagcctgcccagccacgcccccctgctgaacggcctggactacaccgtggacagcaacctgggcatcatcgcccacgccggccagggcgtgagccagaccctgagagccatggccggcggccccaccagcgacatcagcaccggcagcagcgtgggctaccccgacttccccaccagccccggcagctggctggacgagatggaccacccccccttctag

SEQ ID NO: 228356 - protein, 479 aa, Artificial Sequence
  derived and/or modified sequence
MDFSRNLYDIGEQLDSEDLASLKFLSLDYIPQRKQEPIKDALMLFQRLQEKRMLEESNLSFLKELLFRINRLDLLITYLNTRKEEMERELQTPGRAQISAYRVMLYQISEEVSRSELRSFKFLLQEEISKCKLDDDMNLLDIFIEMEKRVILGEGKLDILKRVCAQINKSLLKIINDYEEFSKERSSSLEGSPDEFSNGEELCGVMTISDSPREQDSESQTLDKVYQMKSKPRGYCLIINNHNFAKAREKVPKLHSIRDRNGTHLDAGALTTTFEELHFEIKPHDDCTVEQIYEILKIYQLMDHSNMDCFICCILSHGDKGIIYGTDGQEAPIYELTSQFTGLKCPSLAGKPKVFFIQACQGDNYQKGIPVETDSEEQPYLEMDLSSPQTRYIPDEADFLLGMATVNNCVSYRNPAEGTWYIQSLCQSLRERCPRGDDILTILTEVNYEVSNKDDKKNMGKQMPQPTFTLRKKLVFPSD

SEQ ID NO: 228357 - DNA, 1440 bp, Artificial Sequence
  derived and/or modified sequence
atggatttcagcagaaatctgtatgatattggtgagcagttagactcagaggatttagccagccttaagttcctctcactggattatattccccagcggaaacaggagcccatcaaggatgccctgatgctgttccaacgcctgcaagaaaaacggatgctggaggaatcaaacctctcgttcttgaaggagttgctttttcgcatcaatcgactagacctgctcataacatatctgaacacgcgcaaggaggaaatggaacgagagctgcagacccctgggagggcccagatctccgcgtatcgcgttatgctgtatcagattagcgaggaagtatctagatccgaactccggtcgttcaagtttttgctgcaggaagagatttccaagtgtaagctagacgacgacatgaacttgctggacatctttattgagatggagaagagagtgatcctgggcgagggcaaacttgacatcctgaaacgcgtttgtgcccaaattaacaaatccctcttaaagatcatcaacgattatgaggagttctcaaaagagcgctcctcttccctggaaggatccccagatgagtttagtaatggtgaggaactgtgtggagtaatgactatttctgactcacctagggagcaggacagtgagagccagactctggacaaggtgtatcagatgaagtctaagcctcgcgggtactgtttgatcataaataaccacaactttgcaaaagcgcgcgagaaagttcctaagctgcattccattcgggacagaaacgggactcatctagatgctggagcactcaccacaactttcgaggaactccactttgagatcaaacctcacgatgattgcacagttgagcaaatttacgagatcctaaagatctaccagctcatggatcactccaacatggactgcttcatttgctgtattttgagccatggcgacaaagggattatctatggcacagatggccaagaggctccaatctacgaattgactagccagtttacagggctcaaatgtccctcactcgccggcaagcctaaagtcttttttatccaagcttgtcagggggataactatcagaaaggtatccccgtagagaccgattctgaggaacagccgtacctggagatggatctatcaagcccgcaaacgcgctacatccctgatgaagccgattttctgctagggatggctaccgttaacaactgcgtaagctaccgcaatccggccgaggggacatggtacattcagtctctgtgccagtccctgagagaaagatgtcccagaggcgacgacatcctcaccatcctaactgaggtaaactatgaggtgagcaacaaggacgataagaaaaacatgggcaagcagatgccacagcccacattcacattgcgcaagaagctcgtctttccatctgactag

SEQ ID NO: 228358 - DNA, 1440 bp, Artificial Sequence
  derived and/or modified sequence
atggacttcagcaggaacctgtatgacatcggggagcagctggacagcgaggacctggccagcctgaagttcctgagcctggactacatcccccagaggaagcaggagcccatcaaggatgccctgatgctgttccagaggctgcaggagaagaggatgctggaggagagcaacctgtccttcctgaaggagctgctcttccgcatcaaccggctggacctgctgatcacctacctgaacaccaggaaggaggagatggagcgggagctgcagaccccaggccgggcccagatcagcgcctacagagtgatgctgtaccagatcagcgaggaggtgagccgctctgagctgcgctccttcaagttcctgctgcaggaggagatcagcaagtgcaagctggatgatgacatgaacctgctggacatcttcatcgagatggagaagagggtcatcctgggggagggcaagctggacatcctgaagagggtgtgtgcccagatcaacaagagcctgctgaagatcatcaatgactatgaggagttcagcaaggagaggagcagcagcctggagggcagcccagatgagttcagcaatggagaggagctgtgtggggtgatgaccatcagtgacagcccccgggagcaggacagcgagagccagaccctggacaaggtgtaccagatgaagagcaagccccggggctactgcctgatcatcaacaaccacaactttgccaaggcccgggagaaggtgcccaagctgcacagcatccgggacagaaatggcacccacctggatgctggggccctgaccaccacctttgaggagctgcactttgagatcaagccccatgatgactgcaccgtggagcagatctatgagatcctgaagatctaccagctgatggaccacagcaacatggactgcttcatctgctgcatcctgagccatggagacaagggcatcatctacggcacagatggccaggaggcccccatctatgagctgaccagccagttcaccggcctgaagtgccccagcctggccggcaagcccaaggtgttcttcatccaggcctgccagggcgacaactaccagaagggcatccctgtggagacagattctgaggagcagccctacctggagatggacctgagcagcccccagacccgctacatcccagatgaagctgacttcctgctgggcatggccaccgtgaacaactgtgtgtcctacagaaatcctgctgagggcacctggtacatccagagcctgtgccagagcctgcgggagcgctgccccagaggagatgacatcctgaccatcctgacagaggtgaactatgaggtgagcaacaaggatgacaagaagaacatgggcaagcagatgccccagcccaccttcaccctgaggaagaagctggtgttccccagcgactag

SEQ ID NO: 228359 - DNA, 1440 bp, Artificial Sequence
  derived and/or modified sequence
atggacttcagccggaacctgtacgacatcggcgagcagctggacagcgaagacctcgcatcactcaagttcctgtctctggactatattccgcagaggaagcaggaaccgattaaggatgccctgatgctgtttcaacgcctgcaggaaaagcgaatgttggaggaatctaacctgtccttcctgaaggaacttctgttccggattaataggttggatctgcttattacatacctgaatacgcgcaaagaggaaatggagagggagctacaaacacccggacgtgcccagatctccgcctacagagttatgctgtatcagataagtgaggaagtgtcacgttctgagttgcgaagcttcaaatttctgctacaggaagagatcagtaaatgcaagcttgacgatgacatgaacttgctggatatttttatagagatggagaaacgggtaatcttgggtgagggcaagctcgacatactgaaaagggtctgcgcccaaataaataagtccctgctgaagataatcaacgattatgaggagtttagtaaagaacggagttcctccttggagggaagccctgacgagttttctaatggggaggaactctgtggagtaatgacaataagcgactctccacgcgagcaagattcggaatcacaaactctggacaaagtgtaccagatgaagagcaagccacgaggttattgtcttataatcaataaccacaattttgccaaagcccgggagaaggtgcccaaactccactccatacgcgacaggaatggaactcatctggatgcaggcgccctaacaacgacattcgaagagctccacttcgagatcaagcctcatgacgactgcacagttgagcagatttacgaaatactgaagatttaccaattaatggaccatagcaacatggactgttttatatgctgtattttgtcgcatggcgacaagggcataatctacggtacagacggccaggaggcacctatttacgaactcacttctcaattcacaggccttaagtgtccatctctggcgggtaagccaaaagtgttttttatccaagcttgccagggcgacaattaccagaagggaattccagtcgaaaccgactccgaggagcagccttatctggagatggatctgtcttccccacaaacccgctatattccagacgaggccgacttcctccttggtatggccactgtcaataattgcgtcagctataggaatccagcagaggggacttggtatatccagagcctttgccagtctctgagggaacggtgtccgagaggcgacgatatcctaacgatccttacagaggtcaactatgaagtctctaacaaagatgataaaaaaaacatgggtaaacagatgccccaaccaacatttaccttgcgcaagaagcttgtattcccctccgattag

SEQ ID NO: 228360 - DNA, 1440 bp, Artificial Sequence
  derived and/or modified sequence
atggatttctccaggaatctgtacgacattggtgaacagctcgacagcgaagacctcgcttctcttaaatttctgtcattggattatatccctcaacggaaacaggaacccataaaggatgccctcatgctgtttcagcgtttacaggaaaaacggatgcttgaggagagtaatctgtcttttctcaaagaactgctgtttagaattaatagacttgaccttttgatcacttacttgaacacacggaaggaagagatggagagggagctgcagacacctggacgcgcacaaatctctgcctaccgcgtgatgctttaccagatttctgaggaggtttctcgatccgagctgcggagtttcaagttcctcttgcaggaagaaatatccaagtgcaagctggatgacgacatgaacctgctcgacattttcattgaaatggaaaaacgggtgattttaggggagggtaaactcgatatcctgaagcgggtgtgtgcgcagatcaacaagagcctccttaagattattaacgactacgaagaattcagcaaggagagatccagctcattagaggggagcccggacgagttttctaatggtgaggagctgtgtggggttatgactatcagcgacagtccaagggagcaagattctgagtctcagaccctggataaggtttaccagatgaagtctaagcctaggggctattgtctcataatcaataaccacaactttgcaaaagccagagaaaaagtgcccaaactccactcaatcagggaccgcaacgggacgcatctggacgctggcgctttaaccactacctttgaggaactccattttgaaatcaagccccacgacgactgtaccgtggaacaaatctatgaaatccttaagatttatcagcttatggaccacagcaacatggattgcttcatatgctgcattctcagtcacggtgataaggggattatctatgggacagacggacaagaggcccctatttatgaacttactagccaattcaccgggcttaagtgcccgagcctagctggcaagccgaaggtgttctttattcaagcttgccaaggggacaactaccagaagggtatccctgtggaaaccgacagcgaggaacagccgtatttggagatggacttatcctcaccccaaacgaggtacattcctgacgaagctgattttctgctcgggatggccacagtcaataattgcgtctcttacaggaatcctgccgaaggaacttggtacattcagagcttgtgtcagtccctgcgcgagagatgcccaagaggagacgatatactgactatcctgaccgaggtgaattacgaggttagcaataaagacgacaagaaaaatatgggcaagcagatgcctcaaccgacctttactctgcgaaaaaaactggtttttccctctgattag

SEQ ID NO: 228361 - DNA, 1440 bp, Artificial Sequence
  derived and/or modified sequence
atggacttcagcagaaacctgtacgacatcggcgagcagctggacagcgaggacctggccagcctgaagttcctgagcctggactacatcccccagagaaagcaggagcccatcaaggacgccctgatgctgttccagagactgcaggagaagagaatgctggaggagagcaacctgagcttcctgaaggagctgctgttcagaatcaacagactggacctgctgatcacctacctgaacaccagaaaggaggagatggagagagagctgcagacccccggcagagcccagatcagcgcctacagagtgatgctgtaccagatcagcgaggaggtgagcagaagcgagctgagaagcttcaagttcctgctgcaggaggagatcagcaagtgcaagctggacgacgacatgaacctgctggacatcttcatcgagatggagaagagagtgatcctgggcgagggcaagctggacatcctgaagagagtgtgcgcccagatcaacaagagcctgctgaagatcatcaacgactacgaggagttcagcaaggagagaagcagcagcctggagggcagccccgacgagttcagcaacggcgaggagctgtgcggcgtgatgaccatcagcgacagccccagagagcaggacagcgagagccagaccctggacaaggtgtaccagatgaagagcaagcccagaggctactgcctgatcatcaacaaccacaacttcgccaaggccagagagaaggtgcccaagctgcacagcatcagagacagaaacggcacccacctggacgccggcgccctgaccaccaccttcgaggagctgcacttcgagatcaagccccacgacgactgcaccgtggagcagatctacgagatcctgaagatctaccagctgatggaccacagcaacatggactgcttcatctgctgcatcctgagccacggcgacaagggcatcatctacggcaccgacggccaggaggcccccatctacgagctgaccagccagttcaccggcctgaagtgccccagcctggccggcaagcccaaggtgttcttcatccaggcctgccagggcgacaactaccagaagggcatccccgtggagaccgacagcgaggagcagccctacctggagatggacctgagcagcccccagaccagatacatccccgacgaggccgacttcctgctgggcatggccaccgtgaacaactgcgtgagctacagaaaccccgccgagggcacctggtacatccagagcctgtgccagagcctgagagagagatgccccagaggcgacgacatcctgaccatcctgaccgaggtgaactacgaggtgagcaacaaggacgacaagaagaacatgggcaagcagatgccccagcccaccttcaccctgagaaagaagctggtgttccccagcgactag

SEQ ID NO: 228362 - protein, 278 aa, Artificial Sequence [sequence omitted]

SEQ ID NO: 228363 - protein, 124 aa, Artificial Sequence
  derived and/or modified sequence
MDFSRNLYDIGEQLDSEDLASLKFLSLDYIPQRKQEPIKDALMLFQRLQEKRMLEESNLSFLKELLFRINRLDLLITYLNTRKEEMERELQTPGRAQISAYRVMLYQISEEVSRSELRSFKFLL

SEQ ID NO: 228364 - DNA, 1395 bp, Artificial Sequence
  derived and/or modified sequence
atggacttttcaagaaacctctatgatatcggagaacaactcgattctgaggacttggctagtcttaaatttctcagcctcgactatatcccacaacgcaaacaggagccgatcaaggatgctttgatgctctttcagaggttacaagagaagcgcatgctcgaagaatcgaacctgagcttcttgaaggagttgctcttccgtattaaccgtctggatctgctcattacttatctgaacactcgcaaagaggagatggaaagggaacttcaaacacctggcagagcacagatctctgcatacagagtaatgctgtatcagatctctgaagaggtctcccggagtgaactgagaagcttcaagttccttctgcaagaggagattagtaagtgcaagctcgatgatgacatgaacctgttggatatcttcatcgagatggagaagagggtgattctcggggaagggaaattagacatcctcaaacgcgtgtgtgctcagatcaacaaatcactcctgaaaatcatcaacgactatgaggagttttccaagggtgaagagctctgtggtgtaatgacaatttcagattctcctcgtgaacaggactcagagtctcagactctcgacaaagtctatcaaatgaagtccaagcccagaggctactgtctgatcattaataaccacaatttcgccaaggcccgcgaaaaggtccccaaactccacagcatccgtgataggaatggtacacatctcgatgccggcgctctcacgacaaccttcgaggagttacatttcgaaataaagccgcacgatgactgcaccgtggaacaaatttatgaaatcctcaagatctatcagctgatggatcattcgaatatggactgtttcatctgctgcatacttagccacggagacaaaggcataatttacgggaccgacgggcaagaggctcctatttacgagctcaccagccagttcaccggtttgaaatgccctagcctcgcagggaagccgaaggtcttcttcatacaggcttgccagggggataattaccagaaaggtatccctgttgaaactgactccgaagaacaaccctatctggaaatggatctcagctcaccacagacgagatacatcccagatgaggcagacttccttctgggtatggcgaccgttaacaactgcgtcagttacaggaaccccgctgagggtacgtggtacattcagtctctgtgccagagcctccgggaaaggtgtcctcgaggggatgacattctgacaattttaactgaagtaaactacgaggtgagcaataaggatgacaaaaaaaatatgggaaagcagatgcctcagcctaccttcaccctaagaaagaaactcgtgttcccgtctgactag

SEQ ID NO: 228365 - DNA, 837 bp, Artificial Sequence
  derived and/or modified sequence
atggatttttcgcgaaacttgtacgacattggcgagcagcttgactccgaggacctggcttctttgaaattcctgagtcttgactatatcccccagcgaaaacaagagccaatcaaagacgccctaatgctgtttcaacgtttgcaagagaagagaatgcttgaagagtcaaatttgagcttcctgaaggaattacttttccgcattaacaggctggacctcttgataacttatctgaacaccaggaaggaagagatggaacgagagctccagacccctggccgggctcagatcagcgcgtatagggtcatgttataccagattagcgaggaggtttcccggtcagaacttcgctcatttaagtttttgcttcaggaagagattagcaagtgtaaactggatgatgacatgaacctgctggatatttttatagagatggagaagcgcgttatcctgggagagggaaaactagacattctaaaaagagtatgcgcacaaattaacaagagcctcctgaagatcataaatgactatgaggaatttagtaagggagaggaattgtgcggtgtcatgacaatctccgatagtccacgcgagcaggacagcgaatcgcagacccttgataaagtctatcagatgaagagtaagccccgaggttactgcctcatcattaacaaccataatttcgccaaggcacgtgagaaggttccaaagctgcatagtatcagggacaggaatggaactcatctggatgccggctcccatagtgtggcccaggccggggttcagtggtgtgacctttcttcgctgcagccaccacccccgtggttcaaatag

SEQ ID NO: 228366 - DNA, 1395 bp, Artificial Sequence
  derived and/or modified sequence
atggactttagtcggaacctttacgacatcggcgagcagctcgattctgaggacttggcctctctgaaattcctgagtttggactatatcccacaacgtaaacaggagccaatcaaagacgcgttgatgctgttccagcgcttgcaggagaagaggatgctggaagaatcgaatctgagtttcctgaaggaacttctgttccggattaacaggcttgacctgctaattacatacctaaacacgaggaaagaggaaatggagcgagaactgcaaaccccgggcagagcccagatttctgcgtatagggtcatgctttaccaaattagtgaggaggtgagcagatcagaactgcgatcattcaagtttctgttacaggaagagatcagtaaatgcaagctggatgacgatatgaatctgttggacatttttatagagatggaaaaaagagtgatactgggggaggggaagttggatattctcaagcgagtatgtgcccagataaacaaatcactcctgaagatcatcaatgactatgaggagttttcaaagggcgaggagctgtgcggcgtcatgactattagtgactctccacgggagcaggattccgaatctcaaacactggacaaggtatatcagatgaaatccaagccccgaggatactgtctaatcatcaacaaccataacttcgcaaaagctcgggaaaaggtgccgaaactccactctattagggatcgtaatgggacccacttggatgccggagccctcaccacgacctttgaggagctacactttgagattaagcctcatgacgactgcacagtcgagcaaatctatgagatacttaagatctaccaactgatggatcacagcaatatggactgctttatctgctgcatcctctcgcacggcgacaagggcattatctacgggacagacggtcaggaggctcccatttatgagctgacgtctcagtttaccggactaaaatgcccaagtctcgccgggaaacccaaggtattctttattcaggcctgccagggggataattaccagaaagggatcccagtggaaaccgatagcgaggaacagccatatctcgagatggatttgagctcacctcagacacggtatatacccgatgaggcggattttctgctagggatggccaccgtcaataactgtgtgagctatagaaatccagccgaagggacctggtatattcagagtctgtgtcagagtctaagagagcgctgtcctcgcggagatgacatactgaccatacttacggaggtgaactatgaggtttccaacaaggatgataaaaagaatatgggcaaacagatgccccagcccaccttcactcttcggaaaaagctagtgtttccctctgactag

SEQ ID NO: 228367 - DNA, 1395 bp, Artificial Sequence
  derived and/or modified sequence
atggacttcagcaggaacctgtatgacatcggggagcagctggacagcgaggacctggccagcctgaagttcctgagcctggactacatcccccagaggaagcaggagcccatcaaggatgccctgatgctgttccagaggctgcaggagaagaggatgctggaggagagcaacctgtccttcctgaaggagctgctcttccgcatcaaccggctggacctgctgatcacctacctgaacaccaggaaggaggagatggagcgggagctgcagaccccaggccgggcccagatcagcgcctacagagtgatgctgtaccagatcagcgaggaggtgagccgctctgagctgcgctccttcaagttcctgctgcaggaggagatcagcaagtgcaagctggatgatgacatgaacctgctggacatcttcatcgagatggagaagagggtcatcctgggggagggcaagctggacatcctgaagagggtgtgtgcccagatcaacaagagcctgctgaagatcatcaatgactatgaggagttcagcaaaggagaggagctgtgtggggtgatgaccatcagtgacagcccccgggagcaggacagcgagagccagaccctggacaaggtgtaccagatgaagagcaagccccggggctactgcctgatcatcaacaaccacaactttgccaaggcccgggagaaggtgcccaagctgcacagcatccgggacagaaatggcacccacctggatgctggggccctgaccaccacctttgaggagctgcactttgagatcaagccccatgatgactgcaccgtggagcagatctatgagatcctgaagatctaccagctgatggaccacagcaacatggactgcttcatctgctgcatcctgagccacggggacaagggcatcatctatggaacagatggccaggaggcccccatctatgagctgaccagccagttcaccggcctgaagtgccccagcctggccggcaagcccaaggtgttcttcatccaggcctgccagggcgacaactaccagaagggcatccctgtggagacagacagcgaggagcagccctacctggagatggacctgagcagcccccagacccgctacatcccagatgaggccgacttcctgctgggcatggccaccgtgaacaactgtgtgtcctacagaaatcctgctgagggcacctggtacatccagagcctgtgccagagcctgcgggagcgctgccccagaggagatgacatcctgaccatcctgacagaggtgaactatgaggtgagcaacaaggatgacaagaagaacatgggcaagcagatgccccagcccaccttcaccctgaggaagaagctggtgttccccagcgactag

SEQ ID NO: 228368 - DNA, 837 bp, Artificial Sequence
  derived and/or modified sequence
atggacttcagcaggaacctgtatgacatcggggagcagctggacagcgaggacctggccagcctgaagttcctgagcctggactacatcccccagaggaagcaggagcccatcaaggatgccctgatgctgttccagaggctgcaggagaagaggatgctggaggagagcaacctgtccttcctgaaggagctgctcttccgcatcaaccggctggacctgctgatcacctacctgaacaccaggaaggaggagatggagcgggagctgcagaccccaggccgggcccagatcagcgcctacagagtgatgctgtaccagatcagcgaggaggtgagccgctctgagctgcgctccttcaagttcctgctgcaggaggagatcagcaagtgcaagctggatgatgacatgaacctgctggacatcttcatcgagatggagaagagggtcatcctgggggagggcaagctggacatcctgaagagggtgtgtgcccagatcaacaagagcctgctgaagatcatcaatgactatgaggagttcagcaaaggagaggagctgtgtggggtgatgaccatcagtgacagcccccgggagcaggacagcgagagccagaccctggacaaggtgtaccagatgaagagcaagccccggggctactgcctgatcatcaacaaccacaactttgccaaggcccgggagaaggtgcccaagctgcacagcatccgggacagaaatggcacccacctggatgctggcagccacagcgtggcccaggccggcgtgcagtggtgtgacctgagcagcctgcagcccccaccaccctggttcaagtag

SEQ ID NO: 228369 - DNA, 1395 bp, Artificial Sequence
  derived and/or modified sequence
atggacttcagccggaacctgtacgacatcggcgagcagctggacagtgaagacctagcatctctgaagtttctgtcattggattacattccccagaggaagcaggaacccatcaaggatgcgctgatgcttttccaacggcttcaggaaaaaaggatgctcgaagaatcaaacctgtcttttctgaaggaactcttatttcgtattaatcgactggacttgttgattacatatctcaacacccgaaaggaagaaatggaaagagaactccagacccccggtcgggctcagatcagtgcatatcgggtaatgctataccagattagcgaagaagtgtctcggagtgagctccgaagcttcaagttcctgctgcaggaagagatctccaaatgcaaactggacgatgacatgaatcttctggatatcttcattgagatggaaaagagggtcatcctgggcgaaggaaagctggacatcctgaagcgggtgtgtgcccagatcaacaagtcattgcttaaaataatcaacgattatgaagagttctctaagggagaggagctttgtggtgtgatgaccatcagcgacagcccccgtgagcaggatagcgaaagtcagaccttagataaagtttaccaaatgaaaagtaagcctcgtggctattgtctgataatcaacaatcataattttgcaaaggctagggaaaaagtccctaagttacactcaatccgggatcgaaatgggacccacctggacgctggagctctgacaacaacttttgaagagctccactttgaaataaaacctcacgacgactgcaccgtcgaacaaatatatgaaattcttaagatctaccagctcatggatcactccaatatggactgtttcatttgttgtatccttagtcatggggataagggcataatctacggcacagatgggcaggaagcaccaatctacgagttgacttctcagttcacaggcctgaagtgtcccagtctggccggcaagccgaaagtttttttcatccaggcatgtcagggggacaattatcagaagggcatccccgtcgagaccgactctgaagagcagccgtacttggaaatggatctgtccagcccacagacccggtacattcccgacgaggccgattttctgctgggcatggctacagtgaataactgcgtcagctatcgaaatccagctgagggtacttggtacatccagtccctatgtcaatctctgcgagagaggtgccctcgtggggacgatatcttaaccatcctcaccgaagtgaattatgaggtgtctaacaaggatgacaaaaagaatatggggaaacagatgccacagcctacgttcactttgcggaagaaattggtgtttcctagcgattag

SEQ ID NO: 228370 - DNA, 837 bp, Artificial Sequence
  derived and/or modified sequence
atggacttcagccggaacctgtacgacatcggcgagcagctggactcagaggacctcgcaagtctgaagtttctctccctcgactacatccctcagcggaagcaggagcctattaaggatgcccttatgctcttccaacgtttacaggagaagcgaatgttagaagaatccaacctgtcattcctgaaggagctgctgttccggattaacagacttgatttgctgatcacatacttgaacactaggaaagaggaaatggagagggaacttcagacgcccggaagggcgcagatttccgcctaccgtgtaatgctgtaccaaatctccgaggaagtatcccgcagcgaacttcggtcctttaagtttcttctccaggaggagatttccaagtgcaagctggatgatgacatgaatctgctggacatctttattgaaatggagaaacgggtcatcctcggtgagggcaagctcgacattctgaaaagagtttgcgcgcaaatcaacaagagtctgctaaaaatcatcaatgactacgaggagttcagtaagggagaggagctgtgtggcgtgatgaccatctccgatagcccccgcgaacaggactccgagtctcaaactctggataaagtgtatcagatgaaatccaaaccacgaggatactgcttgattatcaacaaccataacttcgcgaaggctcgagaaaaggtgccgaaactgcattctatccgagaccggaacggtacccacctcgatgcagggagccactcagtggcacaagccggggtgcagtggtgtgatctgagctctctccaacctcctccaccatggttcaagtag

SEQ ID NO: 228371 - DNA, 1395 bp, Artificial Sequence
  derived and/or modified sequence
atggacttcagccggaacctgtacgacatcggcgagcagctggactccgaggatctagccagcctgaaatttctgtctctcgattacataccacagagaaagcaggaacctatcaaggatgccctcatgctgttccagcgcttgcaggaaaaacggatgctcgaggagtccaacctctcgttccttaaagaattgctgtttcggatcaatagactggacctgctcataacatacctgaatactaggaaggaggagatggaaagagaactccagactcctggccgggcacagattagcgcttaccgtgtcatgttataccagatctcagaggaagtgtcccgatctgagctgagaagttttaagttccttctccaggaagagatcagcaagtgtaagctcgatgatgatatgaacttactcgatattttcattgaaatggagaagcgcgtcattctcggcgagggaaagctggatatccttaagcgtgtgtgtgcacagataaacaagtcgctgctgaagattatcaacgactatgaagaattctctaaaggcgaagaactctgcggagtgatgaccatctctgatagccctagagaacaggactcggagtcccagactctggataaagtgtaccagatgaagagtaagccccgtgggtattgcctcattattaacaaccacaatttcgcaaaagccagggagaaggtcccgaaactgcactcaatccgagaccgaaatggaacccacttggacgcaggagctctcacgacaacatttgaggagcttcacttcgaaattaagccacacgatgattgtactgtcgaacagatttacgagattcttaagatctaccaactcatggatcactctaatatggactgtttcatatgttgcatactgagtcatggagataaggggatcatatatggaactgacggccaggaagcacccatctacgagctgacaagccaattcacggggctcaaatgcccctctcttgcgggcaagcccaaagtgttcttcattcaggcctgccaaggagataactaccagaaggggattcctgtcgaaacagattctgaggagcagccctacctggagatggatctgtcttctccccagactcggtatatcccggatgaagcagacttcctgctgggcatggctaccgtgaacaattgtgtgtcgtatcgtaaccctgccgagggcacgtggtacatccagtctctctgccagtctctgagggaacggtgtcctcgcggtgacgatatactcaccatcttgactgaggtcaactacgaggtatcaaacaaagacgataagaagaacatgggaaagcagatgccccagcctacctttacactgcgcaaaaaacttgtgtttccttcagactag

SEQ ID NO: 228372 - DNA, 1395 bp, Artificial Sequence
  derived and/or modified sequence
atggatttcagtagaaacctgtatgatataggggaacaactggattctgaggacctggcctccttaaagttcctcagccttgattacatccctcagcggaaacaggagccaattaaggacgccctcatgctgtttcagcgtctgcaagagaagcgaatgctggaagagagcaacttatctttcctgaaggagctactgtttcgaatcaatcgtctggatcttttaattacttacctaaacacccggaaggaagagatggaacgggagctgcagacccccggacgtgctcagattagcgcatatcgggtgatgctctatcagattagcgaggaagtgtctcggagcgaactccgtagctttaagtttcttcttcaggaggaaatctcaaagtgtaaattggatgacgacatgaatctgctggacatcttcatcgagatggagaagcgggtcatcctcggtgaaggtaaactcgatatcctcaagcgcgtctgcgctcaaataaataaatctctcttaaagataatcaatgactatgaggagttttccaagggggaagaactttgcggagtaatgacaattagcgatagcccaagggagcaggactcggaatcccagacacttgataaagtctatcagatgaaaagcaagcctcggggatattgccttataattaataatcataatttcgcaaaggctcgcgagaaagtgcctaagcttcatagtattcgggatcgcaacggaactcacctggatgccggtgctttgactaccaccttcgaagagcttcactttgagattaagccccacgacgattgtacagtagagcaaatttacgaaatactcaagatctaccagctgatggaccactccaatatggattgttttatttgttgcattctgtcacatggggacaagggaataatctatggcacagacggacaagaggcgccaatctacgagctgacctctcagtttactggtctgaagtgcccgtctctcgctggaaagccaaaggtgtttttcatccaggcctgccagggagacaactaccaaaaagggatcccagtggaaaccgactccgaagaacagccctacctggaaatggatctgtcaagcccacaaacccggtatattcctgacgaggccgatttcctccttggaatggctacagttaacaactgcgtgtcttaccggaatcccgctgaaggaacttggtatattcagagtctgtgccagtccttacgtgaaaggtgtccacggggagatgacatcctgacaattctaaccgaagtgaactacgaggtgtcgaacaaagacgataaaaaaaatatgggcaagcagatgcctcagcctactttcacactgcggaaaaagctggtctttccttctgactag

SEQ ID NO: 228373 - DNA, 837 bp, Artificial Sequence
  derived and/or modified sequence
atggatttttcccgaaacctctatgatattggtgaacagctagactccgaagatctggctagcctgaaattcctaagtctcgactacatccctcagagaaagcaagagcctattaaggacgccctaatgctctttcagagactgcaggaaaaaaggatgctcgaggagagcaacctcagcttcctgaaggagctcctttttcggatcaatcgcctggatctgttgatcacctacctgaacacaagaaaagaagaaatggagagggagctgcaaactcccggacgcgctcagatcagtgcctatagagtcatgctctaccagataagcgaggaggtctctagatccgagctgcggagcttcaagttccttttacaggaggagatatctaaatgcaagctggacgacgatatgaatctgttggatatctttatcgagatggagaaacgtgtgattttgggtgagggaaagctagacattctgaagcgcgtttgtgcccagatcaacaagagcttactgaaaatcattaacgattatgaggagtttagtaaaggcgaagagttgtgcggagttatgacaatctctgactcacccagggagcaggactcagagtcccagactctcgacaaagtgtaccagatgaaatcaaagcccagaggatattgtctgattatcaacaaccacaactttgccaaggccagagagaaagtgcctaaactgcactccatacgggacaggaacgggactcacctcgatgccggaagccactccgtggcccaggcgggtgtacagtggtgtgacctgagcagtcttcagcctccaccaccttggtttaagtag

SEQ ID NO: 228374 - DNA, 1395 bp, Artificial Sequence
  derived and/or modified sequence
atggacttcagtagaaatctctacgatattggagagcagcttgacagcgaggatctcgcctctttaaagttcctctctctggactatatcccccagagaaaacaggagcccataaaagacgccctaatgctattccagcggcttcaggagaagaggatgcttgaggaatctaatctgtcgttcctgaaagaacttctctttcgcatcaaccgactggacttgctgattacttatttgaatactcggaaggaagagatggaacgagaactgcagacacctggccgtgcccaaatatcagcatatagggtgatgctttaccagatatccgaggaggtttctcgcagtgagctaagatcctttaaatttttgttgcaggaggagattagcaaatgcaagttggacgacgatatgaacctgttagatatttttatcgagatggaaaagcgagtcatcctgggagagggcaagctcgacatcctgaaacgggtctgcgcacagatcaacaaatctctcctgaagatcatcaacgactatgaagagttttcaaaaggtgaggaattgtgcggtgttatgacaatctccgacagccctagggaacaagattccgagagccaaacattggacaaagtgtatcagatgaaaagcaagcctagaggttattgcctgattatcaacaatcataacttcgcaaaggcacgcgagaaggtgccaaagctacacagcattcgcgaccgcaacgggactcatctggacgcgggagctttgacgaccacttttgaggaattgcacttcgaaatcaagccacacgatgactgtaccgtggaacagatttatgaaattttaaaaatttaccagctgatggaccattccaatatggattgttttatctgttgcattttgtcacatggggataagggtattatctatggaacagatgggcaggaggcacctatatatgaactcacatctcagtttactggtctcaagtgtccatcgcttgccggaaagccaaaggtcttcttcatccaggcttgtcagggggacaactatcagaagggtattcctgtggaaacggactcagaggagcaaccgtacctcgagatggatctctcctctccccagaccagatacatccctgacgaggcggattttctgctgggcatggccacggtgaacaactgcgtatcttataggaacccagccgagggaacctggtatatccagtctctgtgtcaatccctcagagaaaggtgtccgagaggggatgatattctgaccattctcactgaggtaaactatgaagtgtccaacaaggacgataagaagaatatgggcaagcagatgccacagccaactttcactctgcgcaaaaaactggtgttccctagcgactag

SEQ ID NO: 228375 - DNA, 1395 bp, Artificial Sequence
  derived and/or modified sequence
atggacttcagcagaaacctgtacgacatcggcgagcagctggacagcgaggacctggccagcctgaagttcctgagcctggactacatcccccagagaaagcaggagcccatcaaggacgccctgatgctgttccagagactgcaggagaagagaatgctggaggagagcaacctgagcttcctgaaggagctgctgttcagaatcaacagactggacctgctgatcacctacctgaacaccagaaaggaggagatggagagagagctgcagacccccggcagagcccagatcagcgcctacagagtgatgctgtaccagatcagcgaggaggtgagcagaagcgagctgagaagcttcaagttcctgctgcaggaggagatcagcaagtgcaagctggacgacgacatgaacctgctggacatcttcatcgagatggagaagagagtgatcctgggcgagggcaagctggacatcctgaagagagtgtgcgcccagatcaacaagagcctgctgaagatcatcaacgactacgaggagttcagcaagggcgaggagctgtgcggcgtgatgaccatcagcgacagccccagagagcaggacagcgagagccagaccctggacaaggtgtaccagatgaagagcaagcccagaggctactgcctgatcatcaacaaccacaacttcgccaaggccagagagaaggtgcccaagctgcacagcatcagagacagaaacggcacccacctggacgccggcgccctgaccaccaccttcgaggagctgcacttcgagatcaagccccacgacgactgcaccgtggagcagatctacgagatcctgaagatctaccagctgatggaccacagcaacatggactgcttcatctgctgcatcctgagccacggcgacaagggcatcatctacggcaccgacggccaggaggcccccatctacgagctgaccagccagttcaccggcctgaagtgccccagcctggccggcaagcccaaggtgttcttcatccaggcctgccagggcgacaactaccagaagggcatccccgtggagaccgacagcgaggagcagccctacctggagatggacctgagcagcccccagaccagatacatccccgacgaggccgacttcctgctgggcatggccaccgtgaacaactgcgtgagctacagaaaccccgccgagggcacctggtacatccagagcctgtgccagagcctgagagagagatgccccagaggcgacgacatcctgaccatcctgaccgaggtgaactacgaggtgagcaacaaggacgacaagaagaacatgggcaagcagatgccccagcccaccttcaccctgagaaagaagctggtgttccccagcgactag

SEQ ID NO: 228376 - DNA, 837 bp, Artificial Sequence
  derived and/or modified sequence
atggacttcagcagaaacctgtacgacatcggcgagcagctggacagcgaggacctggccagcctgaagttcctgagcctggactacatcccccagagaaagcaggagcccatcaaggacgccctgatgctgttccagagactgcaggagaagagaatgctggaggagagcaacctgagcttcctgaaggagctgctgttcagaatcaacagactggacctgctgatcacctacctgaacaccagaaaggaggagatggagagagagctgcagacccccggcagagcccagatcagcgcctacagagtgatgctgtaccagatcagcgaggaggtgagcagaagcgagctgagaagcttcaagttcctgctgcaggaggagatcagcaagtgcaagctggacgacgacatgaacctgctggacatcttcatcgagatggagaagagagtgatcctgggcgagggcaagctggacatcctgaagagagtgtgcgcccagatcaacaagagcctgctgaagatcatcaacgactacgaggagttcagcaagggcgaggagctgtgcggcgtgatgaccatcagcgacagccccagagagcaggacagcgagagccagaccctggacaaggtgtaccagatgaagagcaagcccagaggctactgcctgatcatcaacaaccacaacttcgccaaggccagagagaaggtgcccaagctgcacagcatcagagacagaaacggcacccacctggacgccggcagccacagcgtggcccaggccggcgtgcagtggtgcgacctgagcagcctgcagcccccccccccctggttcaagtag

SEQ ID NO: 228377 - protein, 235 aa, Artificial Sequence
  derived and/or modified sequence
MDFSRNLYDIGEQLDSEDLASLKFLSLDYIPQRKQEPIKDALMLFQRLQEKRMLEESNLSFLKELLFRINRLDLLITYLNTRKEEMERELQTPGRAQISAYRVMLYQISEEVSRSELRSFKFLLQEEISKCKLDDDMNLLDIFIEMEKRVILGEGKLDILKRVCAQINKSLLKIINDYEEFSKERSSSLEGSPDEFSNDFGQSLPNEKQTSGILSDHQQSQFCKSTGESAQTSQH

SEQ ID NO: 228378 - DNA, 708 bp, Artificial Sequence
  derived and/or modified sequence
atggatttctcccgaaacctctacgacataggcgagcaactggactctgaggacttggcctcgctcaagtttctgtccctggactatatcccgcaacggaagcaggagccaattaaggatgctctcatgcttttccaaaggctacaggagaagagaatgctggaagagagtaacctgtcattcctgaaggagttgctatttcggattaaccgcctggacttgcttatcacctatttaaatacccggaaggaagaaatggaaagagagcttcagactcccggacgggctcagatttccgcctacagggtgatgctctatcagatttccgaggaggtcagtaggtctgaattacggtcttttaagtttctgctgcaggaagagatcagcaagtgcaaattggatgatgatatgaacttgcttgacatcttcatagaaatggagaagagagttatcctcggggagggaaaacttgacattctaaaaagagtgtgtgcccagattaataagagcctgctcaagatcataaatgattatgaagaattctcaaaagagcggtcatcctcactagagggctctcctgatgagttctcgaacgactttggccagtcccttcctaatgaaaaacagacctcaggcatcctatcggaccaccagcagagtcaattctgtaaaagcacaggcgaatccgcccagacctctcagcactag

SEQ ID NO: 228379 - DNA, 708 bp, Artificial Sequence
  derived and/or modified sequence
atggacttctcccgcaacctctacgacataggtgagcaactcgattccgaagatctggcgagtcttaaatttttgtcactggattatattccacagcgaaagcaggagcctattaaggatgctctcatgttgttccagcgtctccaagagaagaggatgctggaggagtctaatttgagctttctgaaagagttgctgttccgcatcaatagactagatctgctgattacatacctcaatacccggaaggaggagatggaacgagagctgcaaactccaggacgcgcacaaatatctgcttatagagtgatgctgtatcagatttcagaggaggtctctaggtctgagcttcggtcatttaagtttttactacaggaggagattagcaagtgtaagctcgacgacgacatgaacttgctggatatattcatcgaaatggagaagcgagttattcttggcgaaggtaagctggacatacttaagagggtgtgtgcacagatcaacaagagtttgcttaagatcatcaatgattacgaagagttttctaaagagaggtcctcttctctagagggatctccggatgagttctccaacgactttggccagtctctgccgaacgagaagcagacttctggtattttgagcgatcaccagcaaagtcaattttgcaaatccaccggcgaatcggcccagacctctcagcactag

SEQ ID NO: 228380 - DNA, 597 bp, Artificial Sequence
  derived and/or modified sequence
atggacttttcccgtaacctatacgatatcggcgaacagttggattctgaggacctggcgtctctgaagttcctgtccctggattatatcccacaaaggaagcaggagccaatcaaagacgccttaatgctgtttcagaggctgcaggaaaaacggatgctggaggaaagcaacctgtcattcctgaaggaattactgttcagaatcaatcgactcgacctactgatcacctacctgaacacccgtaaagaagaaatggagcgtgagctccagacccctggtcgggcccagatatcagcctatagggtgatgttgtatcagatctccgaagaggtatcccgcagtgagctgagaagtttcaagttcctgcttcaggaggaaatcagtaagtgcaagctggatgacgatatgaaccttctggatatttttatcgaaatggagaaacgcgtgattctgggcgaaggtaaactagatatcctcaagagagtgtgcgcccaaattaataagagtctgctgaaaataatcaatgactatgaggagttctcgaaggaacgatcttctagcctggagggctctcctgacgagttttccaattag

SEQ ID NO: 228381 - DNA, 351 bp, Artificial Sequence
  derived and/or modified sequence
atggatttctctcgtaacctttatgacattggagagcaactggatagtgaggatctagcctcccttaaatttctctctctggattacatcccccagagaaaacaggaaccaattaaggacgccctcatgctgtttcagaggctgcaagaaaaacgtatgttggaggagagtaacctgtcatttttgaaagaactgcttttccgaataaacagactcgacttgctaatcacctacctgaacactagaaaggaggagatggaaagagaactgcagacccccggacgggcccagatcagcgcttacagagtcatgctctatcaaatcagcgaggaagtgtcccgttccgaatag

SEQ ID NO: 228382 - DNA, 375 bp, Artificial Sequence
  derived and/or modified sequence
atggacttctccagaaatctgtacgacataggtgagcagctcgacagcgaggacctggcgtcattgaagtttttatcccttgactatattccccagcggaaacaggagcctataaaggacgcactgatgctgttccagcgactccaggagaagcgcatgctggaagagtccaatctgagctttctgaaggagctactgtttcgcatcaacagactggatctgctcattacttacttgaacacacgaaaggaggaaatggagcgggagctgcagaccccagggcgggcccagatcagcgcctatcgggtgatgctctaccagatctcagaggaggtgagcagatcagagctccggagttttaagttcttgctgtag

SEQ ID NO: 228383 - DNA, 708 bp, Artificial Sequence
  derived and/or modified sequence
atggacttcagcaggaacctgtatgacatcggggagcagctggacagcgaggacctggccagcctgaagttcctgagcctggactacatcccccagaggaagcaggagcccatcaaggatgccctgatgctgttccagaggctgcaggagaagaggatgctggaggagagcaacctgtccttcctgaaggagctgctcttccgcatcaaccggctggacctgctgatcacctacctgaacaccaggaaggaggagatggagcgggagctgcagaccccaggccgggcccagatcagcgcctacagagtgatgctgtaccagatcagcgaggaggtgagccgctctgagctgcgctccttcaagttcctgctgcaggaggagatcagcaagtgcaagctggatgatgacatgaacctgctggacatcttcatcgagatggagaagagggtcatcctgggggagggcaagctggacatcctgaagagggtgtgtgcccagatcaacaagagcctgctgaagatcatcaatgactatgaggagttcagcaaggagaggagcagcagcctggagggcagcccagatgagttcagcaatgactttggccagagcctgcccaatgagaagcagaccagcggcatcctgagtgaccaccagcagagccagttctgcaagagcactggagagagcgcccagaccagccagcactag

SEQ ID NO: 228384 - DNA, 597 bp, Artificial Sequence
  derived and/or modified sequence
atggacttcagcaggaacctgtatgacatcggggagcagctggacagcgaggacctggccagcctgaagttcctgagcctggactacatcccccagaggaagcaggagcccatcaaggatgccctgatgctgttccagaggctgcaggagaagaggatgctggaggagagcaacctgtccttcctgaaggagctgctcttccgcatcaaccggctggacctgctgatcacctacctgaacaccaggaaggaggagatggagcgggagctgcagaccccaggccgggcccagatcagcgcctacagagtgatgctgtaccagatcagcgaggaggtgagccgctctgagctgcgctccttcaagttcctgctgcaggaggagatcagcaagtgcaagctggatgatgacatgaacctgctggacatcttcatcgagatggagaagagggtcatcctgggggagggcaagctggacatcctgaagagggtgtgtgcccagatcaacaagagcctgctgaagatcatcaatgactatgaggagttcagcaaggagaggagcagcagcctggagggcagcccagatgagttcagcaactag

SEQ ID NO: 228385 - DNA, 351 bp, Artificial Sequence
  derived and/or modified sequence
atggacttcagcaggaacctgtatgacatcggggagcagctggacagcgaggacctggccagcctgaagttcctgagcctggactacatcccccagaggaagcaggagcccatcaaggatgccctgatgctgttccagaggctgcaggagaagaggatgctggaggagagcaacctgtccttcctgaaggagctgctcttccgcatcaaccggctggacctgctgatcacctacctgaacaccaggaaggaggagatggagcgggagctgcagaccccaggccgggcccagatcagcgcctacagagtgatgctgtaccagatcagcgaggaggtgagccgctctgagtag

SEQ ID NO: 228386 - DNA, 375 bp, Artificial Sequence
  derived and/or modified sequence
atggacttcagcaggaacctgtatgacatcggggagcagctggacagcgaggacctggccagcctgaagttcctgagcctggactacatcccccagaggaagcaggagcccatcaaggatgccctgatgctgttccagaggctgcaggagaagaggatgctggaggagagcaacctgtccttcctgaaggagctgctcttccgcatcaaccggctggacctgctgatcacctacctgaacaccaggaaggaggagatggagcgggagctgcagaccccaggccgggcccagatcagcgcctacagagtgatgctgtaccagatcagcgaggaggtgagccgctctgagctgcgctccttcaagttcctgctgtag

SEQ ID NO: 228387 - DNA, 708 bp, Artificial Sequence
  derived and/or modified sequence
atggacttcagccggaacctgtacgacatcggcgagcagctggacagtgaagacctggcttcgctgaaatttctgagcctcgattacataccccaaaggaaacaagagccaattaaggacgccctcatgttattccagcgccttcaggaaaaacgcatgctggaagaatctaaccttagttttctgaaagaactgctgtttcgtattaatcggctcgatctgctcatcacgtacttgaacactagaaaggaagaaatggaacgagagctccaaacgccaggacgcgctcaaatctccgcttacagagtcatgctgtatcagatctcagaagaggtgagcagatcagagcttcggagctttaaatttctgctgcaggaggagatctcgaagtgcaagcttgacgacgatatgaacctcctggacattttcatcgagatggagaaacgcgtaatactcggcgaggggaagcttgatatcctgaagcgagtctgcgcccagataaacaaaagcttgttgaagatcatcaacgactatgaggagttttctaaagaaagatcgagctctctcgagggaagtcctgatgagttctccaacgactttggacaatccctcccaaatgaaaagcagacatccgggatcctctcggatcaccaacagtcacagttttgtaaatctaccggggagagcgcccagacgtcacagcactag

SEQ ID NO: 228388 - DNA, 708 bp, Artificial Sequence
  derived and/or modified sequence
atggacttcagccggaacctgtacgacatcggcgagcagctggacagcgaggacctcgcttcactcaaattccttagtctagactacatccctcagcgaaaacaagaaccaatcaaggatgccctgatgctgtttcaacgcctgcaggaaaaacgcatgctggaggagtccaacctctcattcctgaaggaactgctctttcgcatcaatagattagacctccttataacttacctgaatacaaggaaggaggagatggaaagagaactgcagacccccggtagggctcaaatttctgcgtatcgtgtgatgctgtatcaaatttcagaagaggtctctcgcagcgaactgcgaagtttcaaattcttgctgcaggaagagataagcaagtgcaaactggatgacgatatgaacctcctggacatctttattgagatggagaagcgtgtgatcctgggcgaggggaagcttgacatcctcaagagagtgtgtgcccaaataaacaaatccctcctcaagatcatcaacgattatgaagagttttctaaggagcgatcttcttcactcgaaggttcacctgatgaattctctaatgattttggccagagcttacctaacgagaagcaaacaagtggcatcctgtccgatcaccaacagagtcaattctgcaaaagtactggtgagtcggctcagacatctcagcattag

SEQ ID NO: 228389 - DNA, 597 bp, Artificial Sequence
  derived and/or modified sequence
atggacttcagccggaacctgtacgacatcggcgagcagctggactccgaggacttggcgtcactgaaatttctgagccttgactatataccacagagaaaacaggagccgatcaaggatgctcttatgctctttcagaggctccaggaaaaacgcatgctggaggaatccaatctctccttcctgaaggaactgttgttccgcattaacaggcttgacttgttaatcacctatctgaatacccgaaaggaagagatggaacgcgagttgcagactccgggacgggcacaaatatccgcttaccgggtgatgctttatcaaattagcgaggaagtctcgaggagcgaactccgctctttcaagtttctgctacaggaggaaatttccaagtgtaagcttgatgacgatatgaatctcttagatattttcatcgaaatggaaaaaagagtcatattgggggaagggaagctggacatactcaagagagtgtgcgcccaaatcaacaaatccctgttaaaaataataaacgattacgaggagttctctaaagagcggagctctagcctggaggggtccccggatgagttcagtaactag

SEQ ID NO: 228390 - DNA, 351 bp, Artificial Sequence
  derived and/or modified sequence
atggacttcagccggaacctgtacgacatcggcgagcagctggactccgaagatcttgcctccctcaaattcttatcacttgattatataccacagcggaagcaagaaccaatcaaggacgctcttatgctgttccagcgcctgcaggagaagaggatgttggaggagagcaacctcagtttcctgaaagaactacttttccggatcaatcgcttggatctcctaatcacatacctaaacacaagaaaggaagagatggaacgcgagttgcagactccagggcgcgctcagattagcgcttacagggttatgctttatcagatatctgaagaggtgtcacggagcgaatag

SEQ ID NO: 228391 - DNA, 375 bp, Artificial Sequence
  derived and/or modified sequence
atggacttcagccggaacctgtacgacatcggcgagcagctggacagcgaggatctagcctctcttaaatttttgtcgttggactacatcccacagcggaagcaggagcccatcaaagatgccctgatgctttttcagcgactgcaagagaagcggatgctagaggaatctaacttatcatttctgaaagagctcctgttcagaattaaccggctcgacctcctgattacatacctgaatacccgaaaggaggaaatggaacgggagctacagaccccaggacgtgctcagatctcagcgtacagggtgatgctgtatcagattagcgaggaagtttcgagaagcgaattgcgcagcttcaagtttctactatag

SEQ ID NO: 228392 - DNA, 708 bp, Artificial Sequence
  derived and/or modified sequence
atggacttcagccgaaacctttacgatataggcgagcagcttgacagtgaagatctggctagtctgaagttccttagcctggactatattccccagaggaagcaagagccaataaaagatgctcttatgctctttcagcgcttgcaggaaaagaggatgcttgaggaatccaatctctcgtttcttaaagaactgctgtttcgcataaacagattagacctcctgattacctaccttaacaccagaaaggaagaaatggaaagagaactgcagacccccggaagagcccagatcagcgcttacagagtcatgctgtatcagattagcgaagaagtgagcaggagcgaattgagatccttcaaattcctcctgcaggaggagatttcaaagtgcaaattggacgacgacatgaaccttctggatattttcattgaaatggagaaacgtgtgatccttggcgagggcaagttggacatactaaagcgggtgtgcgcacaaattaacaagtctctcctgaaaattattaacgactatgaggagtttagtaaagagcggtcctccagcctggaaggatcacctgatgaattcagtaacgattttggtcagagcctgccgaatgagaagcagacctctggcatcctctcggatcaccaacagtcacaattttgtaagtccacgggcgagtcagcgcaaacgtcccagcattag

SEQ ID NO: 228393 - DNA, 708 bp, Artificial Sequence
  derived and/or modified sequence
atggatttctctagaaacctttatgacatcggggaacagcttgactccgaagatctcgcatcgctcaagttcctcagtctggactatatcccacagcgcaaacaggagcccattaaagacgctcttatgttattccagcggctgcaggaaaagcgcatgctggaggagtctaacctcagtttcctaaaggaactgttgtttcggattaacagattggatctcctaataacatacctcaataccagaaaggaggaaatggagagagagctccaaacccccggtagggcacagatctctgcctaccgtgtgatgttgtatcagataagcgaagaagtttccagaagcgaattgcgttcttttaaattcctgctacaggaggagattagcaagtgtaagttggacgatgatatgaatcttcttgatattttcattgagatggagaagcgagttatcctcggcgagggtaaactggatatcttaaagcgagtatgcgctcagatcaataaatcccttctgaaaatcatcaatgattacgaggagtttagtaaggaacgatcttcatcccttgagggcagcccagatgaatttagcaacgattttgggcagagcctccctaatgaaaaacagacaagtgggattttgtctgatcatcaacagagccagttctgcaagtccaccggtgaatcggctcagactagccagcattag

SEQ ID NO: 228394 - DNA, 597 bp, Artificial Sequence
  derived and/or modified sequence
atggacttcagcagaaacctgtatgacatcggcgaacaactggacagcgaggacctggcctctctgaaatttctgtctctggactatattccccaaagaaagcaagagcccatcaaagacgccctgatgctctttcagaggctgcaggaaaaacgaatgttggaggaatccaacctgagcttcctaaaggagttgctgtttcggatcaaccgcttagatctcttgattacgtacttgaacactaggaaagaagaaatggaaagagagctgcaaacccctggtagggcacagatatcggcttatagggtgatgctttaccagataagcgaagaagtctccagatcagagctccgctcctttaagttcctgctccaagaggaaatatcaaaatgtaaactggacgacgatatgaacctcctagacattttcattgaaatggaaaaacgcgtgatcttgggggagggaaaactagatattttaaaaagagtctgtgcccaaattaacaaatctctcctcaagatcatcaacgattatgaagagtttagcaaagaaagaagctcttctttggagggcagcccggacgagttctctaactag

SEQ ID NO: 228395 - DNA, 351 bp, Artificial Sequence
  derived and/or modified sequence
atggacttttcacgcaatctttacgatatcggggagcagttagacagcgaggacctcgccagtctcaaattcctaagcctggattacattccacagaggaagcaggaacccatcaaggatgcactcatgctgttccagaggctgcaggagaagaggatgcttgaagagtcaaatttgtcctttcttaaagagctgctattcagaatcaatagactggacctgctgatcacctatctcaataccagaaaagaggaaatggagagagagctgcagactcccggtcgggcacagatttccgcctatcgagttatgctatatcagattagtgaagaagtgagccgatctgagtag

SEQ ID NO: 228396 - DNA, 375 bp, Artificial Sequence
  derived and/or modified sequence
atggacttcagtagaaatttgtatgacataggagagcagttagattctgaggatctggccagcctgaagttcctatccctcgattatattccccagcgtaaacaggaacccatcaaggatgccctgatgttgtttcaaagactccaagagaagcggatgctagaggagagtaaccttagctttttaaaggagctgctgttccgaatcaaccgcttggacctgctcatcacctacctgaatacaagaaaggaggaaatggagagagaattacagacacctggcagagcacagattagcgcctatagagtcatgctgtatcagatcagcgaagaagtcagtcggtccgagctgagatcatttaaattcctactgtag

SEQ ID NO: 228397 - DNA, 592 bp, Artificial Sequence
  derived and/or modified sequence
gttcagactgagcttcctgcctgcctgtaccccgccaacagcttcagaagaaggtgactggtggctgcctgaggaataccagtgggcaagagaattagcatttctggagcatctgctgtctgagcagcccctgggtgcgtccactttctgggcacgtgaggttgggccttggccgcctgagcccttgagttggtcacttgaaccttgggaatattgagatggacttcagcagaaatctttatgatattggggaacaactggacagtgaagatctggcctccctcaagttcctgagcctggactacattccgcaaaggaagcaagaacccatcaaggatgccttgatgttattccagagactccaggaaaagagaatgttggaggaaagcaatctgtccttcctgaaggagctgctcttccgaattaatagactggatttgctgattacctacctaaacactagaaaggaggagatggaaagggaacttcagacaccaggcagggctcaaatttctgcctacagggtcatgctctatcagatttcagaagaagtgagcagatcagaattgaggtcttttaagtttcttttgca

SEQ ID NO: 228398 - DNA, 708 bp, Artificial Sequence
  derived and/or modified sequence
atggacttcagcagaaacctgtacgacatcggcgagcagctggacagcgaggacctggccagcctgaagttcctgagcctggactacatcccccagagaaagcaggagcccatcaaggacgccctgatgctgttccagagactgcaggagaagagaatgctggaggagagcaacctgagcttcctgaaggagctgctgttcagaatcaacagactggacctgctgatcacctacctgaacaccagaaaggaggagatggagagagagctgcagacccccggcagagcccagatcagcgcctacagagtgatgctgtaccagatcagcgaggaggtgagcagaagcgagctgagaagcttcaagttcctgctgcaggaggagatcagcaagtgcaagctggacgacgacatgaacctgctggacatcttcatcgagatggagaagagagtgatcctgggcgagggcaagctggacatcctgaagagagtgtgcgcccagatcaacaagagcctgctgaagatcatcaacgactacgaggagttcagcaaggagagaagcagcagcctggagggcagccccgacgagttcagcaacgacttcggccagagcctgcccaacgagaagcagaccagcggcatcctgagcgaccaccagcagagccagttctgcaagagcaccggcgagagcgcccagaccagccagcactag

SEQ ID NO: 228399 - DNA, 597 bp, Artificial Sequence
  derived and/or modified sequence
atggacttcagcagaaacctgtacgacatcggcgagcagctggacagcgaggacctggccagcctgaagttcctgagcctggactacatcccccagagaaagcaggagcccatcaaggacgccctgatgctgttccagagactgcaggagaagagaatgctggaggagagcaacctgagcttcctgaaggagctgctgttcagaatcaacagactggacctgctgatcacctacctgaacaccagaaaggaggagatggagagagagctgcagacccccggcagagcccagatcagcgcctacagagtgatgctgtaccagatcagcgaggaggtgagcagaagcgagctgagaagcttcaagttcctgctgcaggaggagatcagcaagtgcaagctggacgacgacatgaacctgctggacatcttcatcgagatggagaagagagtgatcctgggcgagggcaagctggacatcctgaagagagtgtgcgcccagatcaacaagagcctgctgaagatcatcaacgactacgaggagttcagcaaggagagaagcagcagcctggagggcagccccgacgagttcagcaactag

SEQ ID NO: 228400 - DNA, 351 bp, Artificial Sequence
  derived and/or modified sequence
atggacttcagcagaaacctgtacgacatcggcgagcagctggacagcgaggacctggccagcctgaagttcctgagcctggactacatcccccagagaaagcaggagcccatcaaggacgccctgatgctgttccagagactgcaggagaagagaatgctggaggagagcaacctgagcttcctgaaggagctgctgttcagaatcaacagactggacctgctgatcacctacctgaacaccagaaaggaggagatggagagagagctgcagacccccggcagagcccagatcagcgcctacagagtgatgctgtaccagatcagcgaggaggtgagcagaagcgagtag

SEQ ID NO: 228401 - DNA, 375 bp, Artificial Sequence
  derived and/or modified sequence
atggacttcagcagaaacctgtacgacatcggcgagcagctggacagcgaggacctggccagcctgaagttcctgagcctggactacatcccccagagaaagcaggagcccatcaaggacgccctgatgctgttccagagactgcaggagaagagaatgctggaggagagcaacctgagcttcctgaaggagctgctgttcagaatcaacagactggacctgctgatcacctacctgaacaccagaaaggaggagatggagagagagctgcagacccccggcagagcccagatcagcgcctacagagtgatgctgtaccagatcagcgaggaggtgagcagaagcgagctgagaagcttcaagttcctgctgtag

SEQ ID NO: 228402 - protein, 189 aa, Artificial Sequence [sequence omitted]

SEQ ID NO: 228403 - DNA, 570 bp, Artificial Sequence
  derived and/or modified sequence
atgaccgagtacaagctggtggtggtgggcgccggcggcgtgggcaagagcgccctgaccatccagctgatccagaaccacttcgtggacgagtacgaccccaccatcgaggacagctacagaaagcaggtggtgatcgacggcgagacctgcctgctggacatcctggacaccgccggccaggaggagtacagcgccatgagagaccagtacatgagaaccggcgagggcttcctgtgcgtgttcgccatcaacaacaccaagagcttcgaggacatccaccactacagagagcagatcaagagagtgaaggacagcgaggacgtgcccatggtgctggtgggcaacaagtgcgacctgcccagcagaaccgtggacaccaagcaggcccaggacctggccagaagctacggcatccccttcatcgagaccagcgccaagaccagacagagagtggaggacgccttctacaccctggtgagagagatcagacagtacagactgaagaagatcagcaaggaggagaagacccccggctgcgtgaagatcaagaagtgcatcatcatgtag

SEQ ID NO: 228404 - DNA, 570 bp, Artificial Sequence
  derived and/or modified sequence
atgacagagtataaactcgtggtcgtcggtgcaggaggcgtcggcaaatctgccctcaccatacagctgatacaaaatcattttgtcgatgagtatgaccctaccatagaggattcttaccgaaagcaggtcgttatcgacggggaaacctgtctgctagatatcctggatacagctggacaggaggagtacagcgcgatgagggaccaatacatgcggacgggcgagggctttctctgcgtgttcgcgatcaacaacactaagagcttcgaagatatccatcactacagagaacaaatcaagcgggtcaaagactcggaggacgtaccgatggtgttggtgggtaataagtgtgacttaccttcccggacggtggatacaaagcaggctcaggatcttgccagaagctacggcattccatttattgagaccagtgccaaaacacggcagcgcgtggaagacgctttttacacactggtgagggagattagacagtatcgtcttaagaaaatttccaaagaagaaaagacccccggctgcgtcaagattaagaagtgcataataatgtag

SEQ ID NO: 228405 - DNA, 570 bp, Artificial Sequence
  derived and/or modified sequence
atgacagagtacaagctggtggtggtgggcgctgggggcgtgggcaagagcgccctgaccatccagctgatccagaaccactttgtggatgaatatgaccccaccattgaagattcctacaggaagcaggtggtgattgatggagagacctgcctgctggacatcctggacacagctggccaggaggagtacagcgccatgagggaccagtacatgaggactggagagggcttcctgtgtgtgtttgccatcaacaacaccaagagctttgaggacatccaccactaccgggagcagatcaagagggtgaaggacagtgaagatgtgcccatggtgctggtgggcaacaagtgtgacctgcccagcaggacagtggacaccaagcaggcccaggacctggcccggagctatggcatccccttcatcgagaccagcgccaagacccggcagagggtggaggatgccttctacaccctggtgcgggagatccggcagtaccgcctgaagaagatcagcaaggaggagaagaccccaggctgtgtgaagatcaagaagtgcatcatcatgtag

SEQ ID NO: 228406 - DNA, 570 bp, Artificial Sequence
  derived and/or modified sequence
atgaccgagtacaagctggtggtggtgggcgccggcggcgtgggcaagtctgccctgactattcagcttatccagaatcactttgtagacgagtacgaccccactatcgaagatagctacagaaagcaggtcgtaatcgacggagaaacctgcctcctggacatacttgatacggcgggacaagaggaatattccgcgatgcgggaccagtatatgcgcactggcgaaggtttcctatgtgtgtttgccattaacaacacgaaatcatttgaggacattcatcattaccgggagcagataaagcgagtaaaagattccgaggacgtgcccatggtactggtgggcaataagtgtgatctgcccagccgcaccgttgacaccaagcaggcccaggacttggctagatcctatggaatccccttcatagagacatctgccaaaacaagacagagagtggaggacgcgttttataccttggtccgagaaatcaggcagtatcggctgaagaagatttccaaagaagagaaaacaccaggatgcgtcaagataaaaaagtgcattataatgtag

SEQ ID NO: 228407 - DNA, 570 bp, Artificial Sequence
  derived and/or modified sequence
atgactgagtacaagctggtcgtggttggagccggaggagtaggaaagtctgccctgacaatccagttaatccagaatcacttcgtcgatgaatacgatcctacaattgaggactcttataggaagcaggtcgttattgacggagaaacctgcttactggatattttggatacagcaggccaggaagaatatagtgcgatgcgtgaccaatacatgcgcacaggagaaggattcctctgtgtgttcgcgattaacaataccaagagtttcgaagatattcatcactaccgggaacagattaagagagtcaaggactccgaggacgtgcccatggtactcgttggcaacaagtgcgacctcccgagccgtacagtagacacaaagcaggcccaggacctggccaggtcttatggaataccttttatagagactagtgcaaagactcgtcagcgcgtagaagacgcgttttacacactggtgcgggaaatcagacagtaccggctaaaaaaaatttctaaggaagaaaagacacctggatgtgtgaagattaaaaaatgtatcataatgtag

SEQ ID NO: 228408 - DNA, 1119 bp, Artificial Sequence
  derived and/or modified sequence
ctgaaggcggcggcggggccagaggctcagcggctcccaggtgcgggagagaggcctgctgaaaatgactgaatataaacttgtggtagttggagctggtggcgtaggcaagagtgccttgacgatacagctaattcagaatcattttgtggacgaatatgatccaacaatagaggattcctacaggaagcaagtagtaattgatggagaaacctgtctcttggatattctcgacacagcaggtcaagaggagtacagtgcaatgagggaccagtacatgaggactggggagggctttctttgtgtatttgccataaataatactaaatcatttgaagatattcaccattatagagaacaaattaaaagagttaaggactctgaagatgtacctatggtcctagtaggaaataaatgtgatttgccttctagaacagtagacacaaaacaggctcaggacttagcaagaagttatggaattccttttattgaaacatcagcaaagacaagacagagagtggaggatgctttttatacattggtgagggagatccgacaatacagattgaaaaaaatcagcaaagaagaaaagactcctggctgtgtgaaaattaaaaaatgcattataatgtaatctgggtgttgatgatgccttctatacattagttcgagaaattcgaaaacataaagaaaagatgagcaaagatggtaaaaagaagaaaaagaagtcaaagacaaagtgtgtaattatgtaaatacaatttgtacttttttcttaaggcatactagtacaagtggtaatttttgtacattacactaaattattagcatttgttttagcattacctaatttttttcctgctccatgcagactgttagcttttaccttaaatgcttattttaaaatgacagtggaagtttttttttcctctaagtgccagtattcccagagttttggtttttgaactagcaatgcctgtgaaaaagaaactgaatacctaagatttctgtcttggggcttttggtgcatgcagttgattacttcttatttttcttaccaattgtgaatgttggtgtgaaacaaattaatgaagcttttgaatcatccctattctgtgt

SEQ ID NO: 228409 - protein, 138 aa, Artificial Sequence
  derived and/or modified sequence
MSWSGLLHGLNTSLTCGPALVPRLWATCSMATLNQMHRLGPPKRPPRKLGPTEGRPQLKGVVLCTFTRKPKKPNSANRKCCRVRLSTGREAVCFIPGEGHTLQEHQIVLVEGGRTQDLPGVKLTVVRGKYDCGHVQKK

SEQ ID NO: 228410 - DNA, 417 bp, Artificial Sequence
  derived and/or modified sequence
atgtcttggagtgggctcctgcacggacttaacaccagccttacttgcggacctgcactggtcccacgcctgtgggcaacctgttcaatggccactttaaaccaaatgcatcgccttggacctcctaagagacctcccagaaagctaggacctacagaaggccgacctcagctaaagggggtagtgctctgcaccttcaccaggaagcccaagaaaccaaactccgcaaaccgtaagtgctgtagggtgcgtcttagcactggccgcgaagctgtgtgctttatccccggggaaggccacactctgcaggaacaccaaatcgtgctggtggagggagggcgcacccaggacctgccgggagtgaaacttaccgtggtgaggggcaagtatgattgcggtcatgtacagaagaaatag

SEQ ID NO: 228411 - DNA, 417 bp, Artificial Sequence
  derived and/or modified sequence
atgagttggtcagggttgctccatggcttgaatactagtttaacttgtgggccagctctagtgccccggctctgggcaacatgtagtatggctacgttaaaccagatgcaccgcctgggacctccaaagcgacctccgcggaagttagggcctacggaaggcaggcctcagctgaaaggggttgtgctgtgtacattcactcggaaacctaagaagccaaatagcgccaacagaaagtgttgccgagtgcgcttatctaccggcagggaggcagtctgcttcattcctggtgagggacacacacttcaagaacatcagatagtgttggttgagggtgggcgtacccaggatctgccaggggtgaaactcacagtcgtgcgaggcaaatacgactgtggtcacgtgcagaagaagtag

SEQ ID NO: 228412 - DNA, 417 bp, Artificial Sequence
  derived and/or modified sequence
atgtcatggagtggtttgcttcacgggttgaacacctcactcacatgtggccccgctctcgtacctcgcctttgggcaacctgttcgatggccaccctgaatcagatgcatagactcggaccccctaaacgacccccccgtaaattaggcccaaccgagggccgtcctcagctgaagggagtcgtgctgtgcacttttactaggaagccaaagaagcctaactctgccaatcggaaatgttgccgggtcaggcttagcacaggccgcgaagctgtttgtttcatcccaggcgagggccacaccttgcaggagcaccagatagtccttgttgaaggcggacgtacacaggacctccccggggtgaaattgacagtggtgcgggggaaatatgattgcgggcacgtgcaaaaaaagtag

SEQ ID NO: 228413 - DNA, 417 bp, Artificial Sequence
  derived and/or modified sequence
atgtcctggagcggcctgctgcacggcctgaacaccagcctgacctgtggccctgccctggtgccccggctgtgggccacctgcagcatggccaccctgaaccagatgcaccggctgggcccccccaagaggcctcccaggaagctgggccccacagagggccggccccagctgaagggcgtggtgctgtgcaccttcaccaggaagcccaagaagcccaacagcgccaacaggaagtgctgccgggtgcggctgagcacaggccgggaggccgtgtgcttcatccctggagagggccacaccctgcaggagcaccagatcgtgctggtggagggcggccgcacccaggacctgcccggggtgaagctgactgtggtgcggggcaagtatgactgtggccacgtgcagaagaagtag

SEQ ID NO: 228414 - DNA, 1044 bp, Artificial Sequence
  derived and/or modified sequence
cacaagcgccgcgccatggacgcagccatcttggaccgggaacaaggcggcacttcgtcccgcccactccgcgtttagaccaattgcaaggcagcgaacctgaccgtgacgagccaatcagatcctgaggaaagttgaccgcgatagagtccttcgtcgcccaatcgtcgtctgtgtcccgcctcttcagtgacgcgaggcagaaccagccaatccctgcacggatagcgcccggaagaggctagaagctggattcagcgtgtccgcgacctcacctttaggtcctgtgagggacggcccaggtggcaggatgtcctggtctggccttctccatggcctcaacacgtccctaacttgtggcccagctctggttccccggctctgggctacctgctccatggctaccctgaaccagatgcaccgcctggggccccccaagcggccgcctcggaagctgggccccacggaaggccggccgcagctgaagggtgtggtcctgtgcacgtttacccgcaagccgaagaagcccaactcagccaatcgcaagtgctgtcgagtgcggctcagcactggccgcgaggccgtctgcttcatccctggggagggccacaccctgcaggagcaccagattgtccttgtggagggcggccgcacccaggacctgccaggcgtcaagctcaccgttgtgcgtggcaagtacgactgtggccacgtgcagaagaagtgacggctgggggcacagtgggctgggcgcccctgcagaacatgaaccttccgctcctggctgccacagggtcctccgatgctggcctttgcgcctctagaggcagccactcatggattcaagtcctggctccgcctcttccatcaggaccactattaagccataggagtcctgggggtgcaaagggtgcccctctgtcaacacccttggctcctgtgtttagaggggtggcctgaaggaccttttctgctgggacaagacactgtactgccctctgctgggaaggggttttaataaacagaccctggcgcttgtgatgt

SEQ ID NO: 228415 - DNA, 926 bp, Artificial Sequence
  derived and/or modified sequence
gtcggtggaatcctggggtcctccaaatctaccaggccatctccccagtttcccagttcttcctgcgtgcgggcgagagtggttgggccctcgggaacccactcagagcgaggctaaatttacggagggactttctgttagcagcatgagggcctgtggttagacctatagagggacggcccaggtggcaggatgtcctggtctggccttctccatggcctcaacacgtccctaacttgtggcccagctctggttccccggctctgggctacctgctccatggctaccctgaaccagatgcaccgcctggggccccccaagcggccgcctcggaagctgggccccacggaaggccggccgcagctgaagggtgtggtcctgtgcacgtttacccgcaagccgaagaagcccaactcagccaatcgcaagtgctgtcgagtgcggctcagcactggccgcgaggccgtctgcttcatccctggggagggccacaccctgcaggagcaccagattgtccttgtggagggcggccgcacccaggacctgccaggcgtcaagctcaccgttgtgcgtggcaagtacgactgtggccacgtgcagaagaagtgacggctgggggcacagtgggctgggcgcccctgcagaacatgaaccttccgctcctggctgccacagggtcctccgatgctggcctttgcgcctctagaggcagccactcatggattcaagtcctggctccgcctcttccatcaggaccactattaagccataggagtcctgggggtgcaaagggtgcccctctgtcaacacccttggctcctgtgtttagaggggtggcctgaaggaccttttctgctgggacaagacactgtactgccctctgctgggaaggggttttaataaacagaccctggcgcttgtgatgt

SEQ ID NO: 228416 - DNA, 1075 bp, Artificial Sequence
  derived and/or modified sequence
agctggattcagcgtgtccgcgacctcacctttaggtcctgtgaggtcggtggaatcctggggtcctccaaatctaccaggccatctccccagtttcccagttcttcctgcgtgcgggcgagagtggttgggccctcgggaacccactcagagcgaggctaaatttacggagggactttctgttagcagcatgagggcctgtggttagacctatagaggtatttcctttgatttaagccagaaagtcctgagagcggatcggggagcatttgcggatcggtcactttttcctcctttctgagtctcttatcccctaccacagggacggcccaggtggcaggatgtcctggtctggccttctccatggcctcaacacgtccctaacttgtggcccagctctggttccccggctctgggctacctgctccatggctaccctgaaccagatgcaccgcctggggccccccaagcggccgcctcggaagctgggccccacggaaggccggccgcagctgaagggtgtggtcctgtgcacgtttacccgcaagccgaagaagcccaactcagccaatcgcaagtgctgtcgagtgcggctcagcactggccgcgaggccgtctgcttcatccctggggagggccacaccctgcaggagcaccagattgtccttgtggagggcggccgcacccaggacctgccaggcgtcaagctcaccgttgtgcgtggcaagtacgactgtggccacgtgcagaagaagtgacggctgggggcacagtgggctgggcgcccctgcagaacatgaaccttccgctcctggctgccacagggtcctccgatgctggcctttgcgcctctagaggcagccactcatggattcaagtcctggctccgcctcttccatcaggaccactattaagccataggagtcctgggggtgcaaagggtgcccctctgtcaacacccttggctcctgtgtttagaggggtggcctgaaggaccttttctgctgggacaagacactgtactgccctctgctgggaaggggttttaataaacagaccctggcgcttgtgatgt

SEQ ID NO: 228417 - DNA, 417 bp, Artificial Sequence
  derived and/or modified sequence
atgagctggagcggcctgctgcacggcctgaacaccagcctgacctgtgggcccgcccttgtaccgcggctgtgggccacttgctccatggcaactctcaatcagatgcataggctggggcctcctaagcgaccacctagaaaactgggcccaaccgaaggcaggccccaactaaaaggcgtggtactatgtaccttcacccgaaagccaaaaaagcctaatagtgctaatcgaaagtgctgtcgcgtgaggttgagcaccggacgggaagctgtctgttttattcctggggaaggacacaccctgcaagaacaccaaatcgtgctggtcgagggaggccgcacgcaggacctcccaggcgtcaagttgacagtggtccgaggcaaatatgattgcgggcacgttcaaaagaaatag

SEQ ID NO: 228418 - DNA, 417 bp, Artificial Sequence
  derived and/or modified sequence
atgagctggagcggcctgctgcacggcctgaacaccagcctgacctgcgggcccgccctggttcctagactgtgggccacctgctcaatggcaacccttaatcagatgcacaggctcggcccgcccaagagaccacctcgcaaattaggtcccaccgagggacgtccgcagcttaagggagttgtcttgtgcacctttacaaggaaacctaaaaaaccaaattcagccaatagaaagtgttgccgcgtgagactctctactgggagggaagccgtgtgctttatccccggggagggccatacacttcaggagcatcagatcgtgctggtcgagggaggccgaacgcaagacctcccaggcgtgaagttgacagtggtgcgcggaaagtatgactgtggacatgttcagaagaagtag

SEQ ID NO: 228419 - DNA, 417 bp, Artificial Sequence
  derived and/or modified sequence
atgagctggagcggcctgctgcacggcctgaacaccagcctgacctgtggtccagcactggtgcccagactgtgggccacatgctctatggctaccctgaaccagatgcatcgcctgggaccgcccaaaagaccgccgcgcaagcttgggccaacagagggaagaccacagcttaagggtgtcgtcctctgcactttcactagaaaaccaaaaaagcctaacagcgcaaataggaagtgttgccgggttagacttagtactggccgggaggctgtttgtttcatacctggcgagggtcacacactgcaagaacatcagatcgtactcgtcgagggcggaaggacccaggaccttcccggcgtcaagctgaccgtggtccgcgggaagtacgattgcggtcacgtgcaaaagaagtag

SEQ ID NO: 228420 - DNA, 417 bp, Artificial Sequence
  derived and/or modified sequence
atgagctggagcggcctgttgcatggacttaacacatcattaacatgcgggcctgctctcgtgccacgactgtgggcgacctgctcaatggccactcttaatcagatgcatagactgggaccccctaaacggccaccacggaaactgggacccaccgagggcagaccacagctaaaaggagtcgtgctgtgtacgttcacccggaaacccaaaaagcccaacagcgccaaccggaaatgctgcagagtgcgactgtctacgggcagagaggcagtgtgttttattccaggggaaggtcacacgctgcaggaacatcagatcgtgttagtagaggggggacgaacacaagacctgccgggtgtgaaactgacggtggtgagaggcaagtacgactgtggtcatgtgcaaaaaaaatag

SEQ ID NO: 228421 - DNA, 417 bp, Artificial Sequence
  derived and/or modified sequence
atgtcctggtccggactactgcacggtctaaatacgtccttgacctgtggcccagccctcgtgccaaggctgtgggcaacatgtagcatggccaccctgaaccaaatgcatcggctcggtccacctaagagacctccccgtaagctaggacctactgaggggagaccgcaacttaaaggagtggttctctgcacttttactcgcaaacctaaaaaacctaacagtgctaatcggaaatgttgcagagtccggctgagcacggggagagaggccgtttgctttatcccaggagagggccacactctccaagagcaccagatagtgctcgtcgaaggaggtcgtacacaggacctacccggagttaagctgaccgtcgtgcgcggaaagtatgattgcggccacgtacagaagaagtag

SEQ ID NO: 228422 - DNA, 417 bp, Artificial Sequence
  derived and/or modified sequence
atgtcttggagcggacttcttcacggcctgaatacctccttaacatgcggccctgccctggtccctcgcctctgggcaacttgtagcatggccactctcaaccaaatgcaccggttggggccacctaagcgtcccccacgcaaacttgggccaacagagggccgacctcaactaaagggcgtcgtgctctgtacatttactcgcaaaccgaagaagccaaacagcgccaaccggaagtgttgtagagtgcggctcagtacaggccgtgaagctgtctgttttattcccggtgaaggccacacccttcaagaacatcagatcgtcttggtcgaggggggacgcacgcaggatctgccaggtgtgaaactgactgtggtgaggggtaagtacgattgtggacacgtacagaagaagtag

SEQ ID NO: 228423 - DNA, 417 bp, Artificial Sequence
  derived and/or modified sequence
atgagctggagcggcctgctgcacggcctgaacaccagcctgacctgcggccccgccctggtgcccagactgtgggccacctgcagcatggccaccctgaaccagatgcacagactgggcccccccaagagaccccccagaaagctgggccccaccgagggcagaccccagctgaagggcgtggtgctgtgcaccttcaccagaaagcccaagaagcccaacagcgccaacagaaagtgctgcagagtgagactgagcaccggcagagaggccgtgtgcttcatccccggcgagggccacaccctgcaggagcaccagatcgtgctggtggagggcggcagaacccaggacctgcccggcgtgaagctgaccgtggtgagaggcaagtacgactgcggccacgtgcagaagaagtag

SEQ ID NO: 228424 - protein, 767 aa, Artificial Sequence
  derived and/or modified sequence
MSHAVTIEEPQAQPQVSQTRYRERSRAGSHISSNRAYDFLYDPLFIVSSEKDHTQANIQATLIRSRLRKVPRFKTMFSNLIHYPRYSLYWSKSDPVPPFISREWKGHKEKHREALRQLTTTDASFQMPKEVYEDPEVTGKNRYKYFERPFLPFFQQMPFNVVYAVSKAEPYTFPPTSTKHLSIPSKSTVGTQTDYRDADVQTDPYSAEYVVCQDSIPELLTLATLTWGRGLPAGQAEVEMIERAREKRAWEASLPALSDTSQFEKRRKMMNEMERKEWAFREQEIEKLQEIRLEVLKELLRKREENQNEVNMKHLNARWSKLQEGKEAKMAKIQRTHVSTIRKLVGKRKNIEGKLERRNIIKDYSDYASQVYGPLSRLGCFPDNNSEDFVVKNYYLNTYEGLVELESCLPDFVTQPQIRAPKPKVITTKAGFLKRAARLDYELAEVHKALLDKKNKVLEVKKPPRFLQRNPIPQPRLPTPTLEMTSNEEEEMEMAVIYLQKLLRGRVVQNMMFEGKEKRLELIQELRTCHALQEDEKLVKKAEKQVTLALQRQRNLHEHKVSLVENHLAGLEGRALADMFDFLSKELVRLQEERRIHAFVMLAERQRRVREAEESGRRQVEKQRLREEDEIFKEVVKVHHSTISSYLEDIILNTEANTAEEQARAEIEKMAEKINDIAYEMESRRTYLQSEEIVAELVYSFLIPEVQKYFVKEKVRNAQRKHILAAHQIIHSYTESMVQKKLTEGEQDEASNAAMLLEKETQNENNS

SEQ ID NO: 228425 - protein, 187 aa, Artificial Sequence
  derived and/or modified sequence
MSHAVTIEEPQAQPQVSQTRYRERSRAGSHISSNRAYDFLYDPLFIVSSEKDHTQANIQATLIRSRLRKVPRFKTMFSNLIHYPRYSLYWSKSDPVPPFISREWKGHKEKHREALRQLTTTDASFQMPKEVYEDPEVTGKNRYKGQNHTLFLLLLLSTYPSLQSLLWALRLIIGMLTFKQIHTLQNM

SEQ ID NO: 228426 - protein, 238 aa, Artificial Sequence
  derived and/or modified sequence
MSHAVTIEEPQAQPQVSQTRYRERSRAGSHISSNRAYDFLYDPLFIVSSEKDHTQANIQATLIRSRLRKVPRFKTMFSNLIHYPRYSLYWSKSDPVPPFISREWKGHKEKHREALRQLTTTDASFQMPKEVYEDPEVTGKNRYKYFERPFLPFFQQMPFNVVYAVSKAEPYTFPPTSTKHLSIPSKSTVGTQTDYRDADVQTDPYSAEYVVCQDSIPELLTLATLTWGELVNLLTIGR

SEQ ID NO: 228427 - DNA, 2304 bp, Artificial Sequence
  derived and/or modified sequence
atgagtcacgccgttaccatcgaggagccacaggcacagccccaggtgtctcagactagatatagggaaagatcccgtgcagggtcccacataagctctaaccgagcttacgatttcctttacgatccactgtttatcgtgagttcagaaaaagaccatacccaagcgaacattcaggcaacattgattagatcacgtctccgaaaggttccgagatttaagacaatgttctctaatctcattcattacccacgctacagtctctattggtcaaagagtgatccggtgcccccttttatctcccgggagtggaaaggacacaaagaaaaacaccgtgaagccctgcgacaactgacaaccacagatgcgtctttccaaatgccaaaagaagtgtacgaagatccagaagttacgggaaaaaaccgctacaagtatttcgaaagacctttcctgcctttttttcagcagatgccattcaatgttgtgtatgctgtgtccaaagccgaaccctacactttcccccctacctccacaaagcatctgagcatcccaagtaaatccacagtcggtacacagacggactacagagatgcagacgtgcagaccgatccttactcagccgaatacgtggtgtgccaggattctatacctgaactgctgaccctcgctacccttacctgggggcgggggctacccgccgggcaggccgaggtggaaatgatcgaaagggctagagaaaaacgcgcgtgggaggcaagtctacctgctctgagcgacacctcacaattcgagaagcggagaaagatgatgaatgagatggagcgcaaagagtgggcgtttagagagcaggagatcgaaaagctccaagaaatccgcctggaagtgctgaaggagcttttgcgaaaacgcgaggagaaccaaaatgaggtgaacatgaaacacttgaatgccagatggagcaagctccaggaaggcaaggaagccaaaatggcaaaaattcagagaactcacgtttccacgattaggaagcttgttggtaaaagaaagaacattgagggtaaactggaaaggaggaacattattaaggattattccgactacgcaagccaggtctacggccctttatcccgcctggggtgtttccccgataacaactccgaggacttcgttgtgaagaattattatctcaacacatatgaggggctcgtggaactggaatcgtgcctgcccgactttgtcacacagccacaaattcgagcccccaagcccaaggtgattactaccaaagcgggattccttaagcgggcagcccggctggactacgagttagctgaagtgcacaaggcccttttggataaaaagaataaggtgcttgaagttaaaaagccacctagattcttacagaggaatccaattccacagccacgcttgcctactccgactctcgaaatgacgagcaacgaggaagaggagatggagatggcagtgatctatctgcagaagcttctgcgaggacgtgtagtgcagaatatgatgtttgagggcaaagagaagaggttagagcttatccaggaactgagaacctgccatgcccttcaggaggatgagaagctggttaagaaagccgagaaacaggtgacgctggcactgcaaagacaacgtaacctgcacgagcacaaggtctcactagtcgaaaatcatttggccgggctggagggccgagcccttgccgatatgtttgactttctgtcgaaggaattagtgcggcttcaagaggagcgccgcatccatgcctttgttatgttggctgagagacagaggagggtgagggaagctgaggaatctggacgcagacaggtcgagaagcagaggcttcgcgaagaggatgagatctttaaagaagttgttaaggttcatcattcgaccattagttcatatctggaagacattattttaaacaccgaggcgaataccgcagaagagcaagccagggccgagatcgagaaaatggcggaaaagatcaacgacatcgcttatgagatggaatctcgcagaacctatctgcagtctgaagagatagtagccgagttggtgtactcattccttatccccgaagtccagaaatattttgtgaaagaaaaagtacgcaatgctcagagaaagcacattctcgctgcacaccaaataattcactcctacactgagtctatggtgcagaagaagctcacagaaggagagcaggacgaggcgtctaacgccgccatgcttctcgagaaagaaacccagaatgagaataattcatag

SEQ ID NO: 228428 - DNA, 2304 bp, Artificial Sequence
  derived and/or modified sequence
atgagccatgctgtgaccatcgaggagccccaggcccagccccaggtgtcccagacccgctaccgggagaggagcagagctggcagccacatcagcagcaacagagcctatgacttcctgtatgaccccctcttcatcgtgtcctctgagaaggaccacacccaggccaacatccaggccaccctcatccgcagccggctgaggaaggtgccccgcttcaagaccatgttcagcaacctgatccactacccccgctacagcctgtactggagcaagagtgaccctgtgccccccttcatcagccgggagtggaagggccacaaggagaagcaccgggaggccctgcggcagctgaccaccacagatgccagcttccagatgcccaaggaggtgtatgaagatcctgaggtgacaggcaagaaccgctacaagtactttgagcggcccttcctgcccttcttccagcagatgcccttcaacgtggtgtatgctgtgtccaaggccgagccctacaccttcccccccaccagcaccaagcacctgagcatccccagcaagagcacagtgggcacccagacagactacagagatgctgatgtgcagacagacccctacagcgcagaatatgtggtgtgccaggacagcatccctgagctgctgaccctggccaccctgacctggggccggggcctgcctgctggccaggccgaggtggagatgattgagcgggcccgggagaagagggcctgggaggccagcctgcctgccctgagtgacaccagccagtttgagaagaggaggaagatgatgaatgagatggagaggaaggagtgggccttccgggagcaggagattgagaagctgcaggagatccggctggaggtgctgaaggagctgctgaggaagcgggaggagaaccagaatgaggtgaacatgaagcacctgaatgcccgctggagcaagctgcaggagggcaaggaggccaagatggccaagatccagaggacccacgtgtccaccatcaggaagctggtgggcaagaggaagaacatcgagggcaagctggagaggaggaacatcatcaaggactacagcgactatgccagccaggtgtatggccccctgagccggctgggctgcttcccagacaacaacagtgaagattttgtggtgaagaactactacctgaacacctatgagggcctggtggagctggagagctgcctgcctgactttgtgacccagccccagatccgggcccccaagcccaaggtgatcaccaccaaggccggcttcctgaagagagctgcccggctggactatgagctggccgaggtgcacaaggccctgctggacaagaagaacaaggtgctggaggtgaagaagcccccacgcttcctgcagaggaaccccatcccccagccccggctgcccacccccaccctggagatgaccagcaatgaggaggaggagatggagatggctgtgatctacctgcagaagctgctgcggggccgggtggtgcagaacatgatgtttgagggcaaggagaagaggctggagctgatccaggagctgcggacctgccacgccctgcaggaggatgagaagctggtgaagaaggccgagaagcaggtgaccctggccctgcagaggcagaggaacctgcacgagcacaaggtgtccctggtggagaaccacctggccggcctggagggccgggccctggccgacatgtttgacttcctgagcaaggagctggtgcggctgcaggaggagcggcgcatccacgcctttgtgatgctggccgagcggcagaggagagtgcgggaggccgaggagagcggccggcggcaggtggagaagcagaggctgcgggaggaggatgagatcttcaaggaggtggtgaaggtgcaccacagcaccatcagcagctacctggaggacatcatcctgaacacagaggccaacacagctgaggagcaggcccgggcagaaattgagaagatggccgagaagatcaatgacatcgcctatgagatggagagcaggaggacctacctgcagagcgaggagatcgtggccgagctggtgtacagcttcctgatccctgaggtgcagaagtactttgtgaaggagaaggtgagaaatgcccagaggaagcacatcctggccgcccaccagatcatccacagctacacagagagcatggtgcagaagaagctgacagaaggagagcaggatgaggccagcaatgctgccatgctgctggagaaggagacccagaatgaaaacaacagctag

SEQ ID NO: 228429 - DNA, 2304 bp, Artificial Sequence
  derived and/or modified sequence
atgagccacgccgtgaccatcgaggagccccaggcccagccccaggtcagtcagactcgctatcgggaacggtccagagccggatctcatatctcatccaaccgcgcctacgattttctctatgaccctctcttcattgtgagcagcgaaaaggaccacacgcaagccaatatccaggcgaccctgatcagatccaggcttaggaaggtcccgcgcttcaaaactatgttttccaatttgattcattacccgaggtactcactgtattggtccaagagcgatcccgtgcccccctttatctcgagagaatggaagggccataaagaaaagcaccgggaagccctgcggcagcttacaacaaccgacgccagttttcagatgcccaaagaggtgtacgaggacccagaagttacaggtaaaaatcgatacaagtatttcgagcggccgtttctgccattctttcagcagatgccatttaacgttgtgtacgccgttagcaaagccgagccgtacactttcccacctacatcgacgaaacacctctcaattccctccaagtccacagttggaacacagacagactacagggacgccgacgtgcagacagacccatatagtgcagagtatgtggtgtgtcaggatagcatcccggaacttttgactctggccaccctgacctgggggcgaggtctgccagccggtcaagctgaggtagagatgatcgagcgggcccgtgaaaagcgcgcatgggaagcatctcttcccgctctctctgacacaagccagtttgagaaacgacgaaaaatgatgaacgaaatggaaagaaaagaatgggcgtttcgtgagcaggaaatcgagaaactccaggagatcaggcttgaagtgctgaaggagttgctccgtaagcgggaagaaaaccagaatgaggttaatatgaaacatctgaatgcacgctggtccaagctccaggagggcaaggaggccaaaatggcgaagatccaacggacgcacgttagcaccataaggaaactggtcggaaagagaaaaaatatcgaaggcaaattagaacgccgaaatattataaaagactacagtgattacgctagtcaagtatacggccctctgtccaggctgggctgcttccctgacaacaacagcgaggatttcgtagttaaaaattactatcttaatacttacgagggtttggtggagctcgagagctgtctaccagacttcgtcacccagccccagataagggccccaaaaccaaaggtcatcacaactaaggccggcttcttgaaaagggcggctcgacttgactacgaactagcagaggttcacaaggcacttctcgataagaagaacaaggtactggaagtcaagaagcctccaaggtttctccagcggaatcccatcccccagcctagactgcccactccaactctggagatgaccagtaatgaggaagaggaaatggagatggctgtgatctatctccagaagctgcttagaggccgcgtcgttcagaacatgatgttcgaaggcaaagagaaacggctcgagctcattcaggagcttagaacctgccatgcactgcaagaagacgagaagctcgtaaaaaaggcggagaaacaggtgaccctggccctgcagcgacaacgaaacctccatgaacacaaagtaagcttagtggagaatcacctggcagggctcgagggcagggccttggcagacatgtttgattttcttagcaaggagctggtcagactccaggaagagcggagaatccacgcttttgttatgctggcagagagacagaggagagtccgggaagccgaggaatccggaaggaggcaagtggagaaacaacgccttcgcgaagaggacgagatatttaaagaggtagtgaaagtccaccatagcactatttcatcttatctggaagatatcattctgaacactgaggctaacaccgctgaggagcaagcgagggccgagatcgaaaagatggccgaaaagataaacgatatcgcatatgagatggaatcacggagaacatatttgcagtctgaggaaatcgtggccgaactcgtgtattcctttttaattcccgaagttcaaaagtatttcgtcaaagagaaggtaaggaatgcgcagaggaaacatatcttagctgctcatcagatcatccactcctacactgaaagtatggttcagaagaagcttaccgagggggagcaagacgaggccagcaatgccgccatgctcctggagaaggaaactcagaacgagaacaatagctag

SEQ ID NO: 228430 - DNA, 2304 bp, Artificial Sequence
  derived and/or modified sequence
atgagccatgccgtgacaatcgaagagccacaagcccaacctcaggtcagccagacgagatacagagagagaagccgagccggatcccatatatcttctaatagagcgtacgacttcctctacgaccccttgtttatcgtatcctccgagaaagatcatacgcaggccaacatccaagcaaccctgattagatcacgcttaaggaaggtgccacgattcaaaaccatgttctcgaatttaatccattatcccagatatagcctatattggtccaagtccgatcccgtcccccctttcatctcccgagagtggaaggggcacaaggagaagcatagggaagcgctgcgccagttgacaaccactgatgccagcttccagatgcctaaagaagtatatgaagatcccgaggttacagggaagaaccgctataagtacttcgaacggccattcctcccttttttccagcagatgccctttaacgtagtttacgcagtgtcaaaagcagagccttacactttccccccaacatcaacaaagcacctgtcaattcccagcaagtccactgtgggcacccaaactgattaccgagatgccgacgttcagacggacccatattccgccgagtatgtggtctgccaggattctatcccagaactcttgacgctagccacactcacctggggtagagggttacctgcaggccaggccgaggtggaaatgatcgaacgtgccagggagaaacgagcctgggaagcttccctgccggcactctccgacacgtctcagttcgagaagcgccgaaaaatgatgaatgagatggaacggaaggagtgggccttccgcgagcaggagatcgagaaactacaagagatcaggctggaagtgctcaaggaactgcttaggaaacgtgaggaaaaccagaatgaggtgaatatgaaacatttaaacgcaagatggagtaaactgcaagagggcaaagaagctaagatggccaaaattcagaggacacacgtcagcacaattcgaaagctggtgggcaaacgcaagaacatcgaaggaaaactggagaggcggaacataatcaaagattactccgattatgcaagccaggtatatgggcctctaagccggttaggatgctttcctgataacaactctgaagatttcgtggtgaagaattactatctaaacacttacgagggcctggtcgagctggagagctgtctacccgacttcgtgacccagccccaaatacgggcacctaagccaaaagttattactaccaaggcaggattcctgaaacgagccgcacgtctcgactatgaactggccgaggtacataaagctttgctggataaaaaaaataaggtcctggaagtgaagaagcctccaaggttcttgcagcggaatccgataccacagccgcgactgccgacgcctaccctagagatgacgtccaacgaagaagaagagatggagatggctgtgatatatctgcagaagctcctacggggtagggtggtacagaatatgatgtttgagggcaaggagaagcgtctcgagctgatccaggagttacgcacttgccacgctctccaggaagacgaaaagctggtcaagaaagcagaaaagcaggtgaccctcgcactgcagcgtcagagaaatctgcatgaacacaaagtaagtctcgttgagaatcacttagccggactggagggtagagcgctcgcagatatgttcgactttctgtccaaggaactcgtgagactgcaggaggagagacgcatccacgcttttgtcatgttagctgaaaggcagagaagagtgagagaggccgaggagagcggcaggaggcaggtggaaaagcagaggctgcgggaggaagatgaaatcttcaaggaagtggtgaaggtacaccattctacaatatcctcatatttagaagacattattttaaatacagaggcaaacactgccgaggagcaggcccgagcagagattgaaaagatggctgagaagattaacgacattgcctacgaaatggagagtaggcgaacctacttgcagagcgaagaaatagtggctgagctggtctacagcttcctaatcccagaggtacagaagtacttcgtgaaagaaaaagttcgaaacgctcagaggaaacatatcctcgcggctcaccagattatacatagttacacagagagtatggtacaaaaaaaattgacggaaggcgaacaagatgaggccagcaatgccgctatgttactcgagaaggagacacagaatgagaataattcttag

SEQ ID NO: 228431 - DNA, 4433 bp, Artificial Sequence
  derived and/or modified sequence
gttaccatagcgacgtgcacgcagtagccaggcctgacccgctggtcccttgctggcgggaggaaagaggcggcaccatgagccacgcagtaaccatcgaggagccccaggcccagccgcaggtgtctcaaactcggtaccgggagaggtcgcgggctgggagccacatctcctccaatcgagcgtatgattttctgtacgatccattgtttattgtgtcaagtgagaaagaccatacacaggcaaatatccaagctaccctgattcgcagcagactgagaaaagttcccaggtttaaaaccatgttcagtaacctgatccattatccaagatattctctatattggagcaagtcagatcctgtcccaccatttatcagtcgggaatggaagggacataaggagaaacacagagaagccctccggcagctcaccacaactgacgcttcttttcagatgcctaaagaagtttatgaagatcctgaagttactggaaagaatcgctataaatactttgaaaggccttttctcccattttttcagcagatgccattcaatgttgtttatgccgtatccaaggcagaaccatacacttttcctcctacttctactaagcacctatccatcccttcaaagtctactgtgggcactcagactgattatcgggatgctgacgttcaaacagatccatactctgcagaatatgtagtatgtcaggactcaatccctgagctcttgaccctggctacgcttacttggggtcggggtctcccagcaggacaagctgaggtggagatgatagaaagagcccgcgagaagcgtgcttgggaagcctctctccccgctctgagtgacacctcccagtttgagaagaggaggaaaatgatgaatgaaatggagaggaaggagtgggccttcagagagcaggagattgaaaaactgcaggagattcgcctggaagttctaaaagagctgttgaggaagcgtgaagagaatcagaatgaagtgaatatgaagcacttgaatgcccggtggtctaaactgcaggagggaaaagaggcaaaaatggcaaaaattcagcgcacgcatgtatcaacaatcagaaaacttgtaggaaagagaaagaatatagaagggaagttggagagaagaaatatcatcaaggattattctgattatgcatcacaggtctatggacctctgtctcgtcttgggtgtttcccagacaacaactcagaggactttgtagtaaaaaactactatctcaacacctatgaaggattagtggaacttgagtcatgtctcccagattttgtgacacaaccccaaatcagagctccaaaacctaaagtcattaccaccaaagctggttttctgaagagggcagcaaggttggactatgagttggcagaggttcataaggcactgttggataagaagaataaagttcttgaagtaaagaaaccccctcgcttccttcaaagaaacccaatacctcaacctcggcttccaactccaaccttggaaatgacgtccaatgaagaagaagaaatggaaatggctgtgatctaccttcaaaagttactccggggcagagtcgttcagaacatgatgtttgaagggaaagaaaagcgactggagttgatccaggagttgcgcacctgccacgcactacaagaagatgaaaagctggtgaaaaaagccgagaagcaagtgaccctggccttacagcggcagaggaacttgcatgagcacaaggtgtcactggttgaaaaccatttggccggactggaaggaagggcactagcagacatgtttgacttcctgtccaaagagctggtgagactgcaggaggagaggaggatccatgcctttgtcatgctggctgagcgccagcggcgggtacgagaggctgaagagagtggtcggcgccaggtggaaaaacagcgcctgcgggaggaggacgagatatttaaggaggtggttaaagttcaccatagtactataagctcctacctagaagacataatactgaataccgaagcgaatactgcagaagaacaagccagggcagaaatagagaagatggctgagaaaatcaatgacattgcttatgaaatggaaagccgccgaacctatcttcagtcagaggagattgttgctgagttggtttatagttttctgatcccagaggtgcaaaaatactttgtcaaagaaaaagtgaggaacgcacagcggaaacatattcttgcagcccatcagatcatccacagttacacggaaagcatggttcaaaagaaattaactgagggagagcaagatgaggcctcaaatgctgccatgttacttgagaaagaaactcaaaatgagaacaacagctaagattgtgatttttttgtaaaagaagctgtacgaatcatcataaataattccaatagtctgcacttctcccaaggtgtgcactgctcataaacttgccagtgtgtgattcatgagaaaggagatttattttccttaaacatccaataatttaaaatgattttcaataataataatcaaatgaaaaagcttcattctcttcagtgtcttctagatgccctacttaaagagaacattttcttatgtctcatttcaatattttgttaactatgaggatgtgctggtttgttgaatcaaacaaaaggaaatgttgtggaatatttttccaagtagttttggttcactattcacaggacattggcattatctactaaggctgaaaatgtgcatattccatgactcaggattttatctcctagatatatattcaacagaaatgcatgagtatgtgcaccaacaggcatgacaaaaatatttatagtagtggtgttcacaatagtcccaaactggaaacccaagtgtccatctccatcggaacagaaaactatactttggtctgcttctacagtggcacatcaacccacctttgagctttagatctaagaagtgtgttcatgcaacagccatagagatggtgctattgaaaggcaatctgcccatcctgtgtattgacaagcatcaggattccaggaggattcttcctgattcaaagactgtcaaataggaaaaaagaaaacagtaaatgaacaaaaacatcaacatggagtccaagtaatgaatttatagaggaaaatgtatgctactctgaaaacaaagcttatgttagagaatatcttactgtaagaaacaaggaaaattgcagaaacatttgctgagtgtttttaataggagtcaaaaagaaagggtcttttcagaaactgaagtaggaaataataacagacaaggtcaaaaaatagatgcaggctgaaaagaaaaggaagtgggctaagatgggaaaaatataaaaagatttaaaatccagcaacaaaatttacacattcatttggatgcagtgaaaagggcagaaataccacagcagagaataaaattgataatgttggcaacacatttattaagtgatccaacatgggatgggaaggaatgggcaaagagattaaaatgacagaagttagctgtagatgacctatcccacagcaatcggagttcttgaagaagaaaccagaacaaataaaatagaaacaataatcagagtttaataattaattttctgagtttttttttaaaaaaactaattatacaaacttgaaagggttcaccttgccctagcaaaactaggattgggacacctttttttccccctgaggatcactgacaaaaaacactgcaccagtaaggaagcaactaaattttgttttgttctttgaaaaaggctaacctgagctaggtaaaggttatatcattcacttttgaaataaaccatcgagaacacaaaatgacaagtgagttaggttgggctgatgggatagaaggtgggaggggaatgctatacagctgggaacagcagactttctctgaagggccagatggtaactacattagggtttgcgggtctgatggtcgccatcataactgcatactcaactctgccgttgtagggtaagagcagcactcgatgacacagaaatgaatgcacatgactgtgttccagtaaaattttattttaattaaaatcaattcatgtttgaaaaaggatttaaagtagcttctaataaaggacatgtgtaatgaaacttaaaatatgatattttctttaaaaatctttatccttatgtagacttctaaaactatgttttgcatttagacagtcaaggaaaatacaagttgttatacaattctcattgactaattgaagtttactaggagaggaaaactttttcttgataccggcaatcttttacttataatggcttgagttaaaatgctccaacttttctaatttttgcttttgaaaataaaacacctatagtgacaataaaaacacacatttaaagccaa

SEQ ID NO: 228432 - DNA, 2304 bp, Artificial Sequence
  derived and/or modified sequence
atgagccacgccgtgaccatcgaggagccccaggcccagccccaggtgagccagaccagatacagagagagaagcagagccggcagccacatcagcagcaacagagcctacgacttcctgtacgaccccctgttcatcgtgagcagcgagaaggaccacacccaggccaacatccaggccaccctgatcagaagcagactgagaaaggtgcccagattcaagaccatgttcagcaacctgatccactaccccagatacagcctgtactggagcaagagcgaccccgtgccccccttcatcagcagagagtggaagggccacaaggagaagcacagagaggccctgagacagctgaccaccaccgacgccagcttccagatgcccaaggaggtgtacgaggaccccgaggtgaccggcaagaacagatacaagtacttcgagagacccttcctgcccttcttccagcagatgcccttcaacgtggtgtacgccgtgagcaaggccgagccctacaccttcccccccaccagcaccaagcacctgagcatccccagcaagagcaccgtgggcacccagaccgactacagagacgccgacgtgcagaccgacccctacagcgccgagtacgtggtgtgccaggacagcatccccgagctgctgaccctggccaccctgacctggggcagaggcctgcccgccggccaggccgaggtggagatgatcgagagagccagagagaagagagcctgggaggccagcctgcccgccctgagcgacaccagccagttcgagaagagaagaaagatgatgaacgagatggagagaaaggagtgggccttcagagagcaggagatcgagaagctgcaggagatcagactggaggtgctgaaggagctgctgagaaagagagaggagaaccagaacgaggtgaacatgaagcacctgaacgccagatggagcaagctgcaggagggcaaggaggccaagatggccaagatccagagaacccacgtgagcaccatcagaaagctggtgggcaagagaaagaacatcgagggcaagctggagagaagaaacatcatcaaggactacagcgactacgccagccaggtgtacggccccctgagcagactgggctgcttccccgacaacaacagcgaggacttcgtggtgaagaactactacctgaacacctacgagggcctggtggagctggagagctgcctgcccgacttcgtgacccagccccagatcagagcccccaagcccaaggtgatcaccaccaaggccggcttcctgaagagagccgccagactggactacgagctggccgaggtgcacaaggccctgctggacaagaagaacaaggtgctggaggtgaagaagccccccagattcctgcagagaaaccccatcccccagcccagactgcccacccccaccctggagatgaccagcaacgaggaggaggagatggagatggccgtgatctacctgcagaagctgctgagaggcagagtggtgcagaacatgatgttcgagggcaaggagaagagactggagctgatccaggagctgagaacctgccacgccctgcaggaggacgagaagctggtgaagaaggccgagaagcaggtgaccctggccctgcagagacagagaaacctgcacgagcacaaggtgagcctggtggagaaccacctggccggcctggagggcagagccctggccgacatgttcgacttcctgagcaaggagctggtgagactgcaggaggagagaagaatccacgccttcgtgatgctggccgagagacagagaagagtgagagaggccgaggagagcggcagaagacaggtggagaagcagagactgagagaggaggacgagatcttcaaggaggtggtgaaggtgcaccacagcaccatcagcagctacctggaggacatcatcctgaacaccgaggccaacaccgccgaggagcaggccagagccgagatcgagaagatggccgagaagatcaacgacatcgcctacgagatggagagcagaagaacctacctgcagagcgaggagatcgtggccgagctggtgtacagcttcctgatccccgaggtgcagaagtacttcgtgaaggagaaggtgagaaacgcccagagaaagcacatcctggccgcccaccagatcatccacagctacaccgagagcatggtgcagaagaagctgaccgagggcgagcaggacgaggccagcaacgccgccatgctgctggagaaggagacccagaacgagaacaacagctag

SEQ ID NO: 228433 - protein, 155 aa, Artificial Sequence
  derived and/or modified sequence
MSKRLLLLLLLSMGGTWASKEPLRPRCRPINATLAVEKEGCPVCITVNTTICAGYCPTMTRVLQGVLPALPQVVCNYRDVRFESIRLPGCPRGVNPVVSYAVALSCQCALCRRSTTDCGGPKDHPLTCDDPRFQDSSSSKAPPPSLPSPSRLPGP

SEQ ID NO: 228434 - DNA, 468 bp, Artificial Sequence
  derived and/or modified sequence
atgtcaaagcgcctgctgctgctgttgttactgtccatgggaggcacgtgggctagcaaagaaccactacgccctcgctgccggccaattaatgcgaccctggcagtggagaaggagggatgccccgtgtgcatcactgtgaatactacaatctgtgcaggttactgtccaaccatgacccgcgtcttgcagggcgttctgccagcgcttccccaagtggtctgtaattatagagacgtgcgattcgagagtatccgtcttccgggttgccctcgcggagtcaatccagttgtcagctacgctgtggctctcagctgccagtgtgccctctgccgtcggtccaccaccgactgcgggggtcccaaggaccatcctcttacatgcgatgaccccagatttcaggactctagcagtagcaaagctccacctccctccctgccaagtccaagtcggctcccaggcccatag

SEQ ID NO: 228435 - DNA, 468 bp, Artificial Sequence
  derived and/or modified sequence
atgtctaaacgattactgctgctgctgctgctgtccatgggagggacatgggccagcaaagaaccactccgccctcgctgtcgtccaatcaacgcaaccctcgctgtagaaaaggagggatgccccgtgtgtattaccgtgaacacaacaatttgtgccggttactgtcctacaatgacaagagttcttcagggggtactccccgccctgccccaggttgtctgtaattatagggacgtgcggtttgaatctatacgtctcccaggatgtcctagaggggtgaatcccgttgtgagttatgctgttgctttaagctgtcagtgcgcattatgtcgcagatccacaaccgattgcggcgggccaaaagatcacccactgacatgcgacgatccaaggttccaagattcaagttcatccaaagcaccaccgccctcacttccaagcccttcgcgcctccctggaccatag

SEQ ID NO: 228436 - DNA, 468 bp, Artificial Sequence
  derived and/or modified sequence
atgtctaaacgattactgctgctgctgctgctgtccatgggagggacatgggccagcaaagaaccactccgccctcgctgtcgtccaatcaacgcaaccctcgctgtagaaaaggagggatgccccgtgtgtattaccgtgaacacaacaatttgtgccggttactgtcctacaatgacaagagttcttcagggggtactccccgccctgccccaggttgtctgtaattatagggacgtgcggtttgaatctatacgtctcccaggatgtcctagaggggtgaatcccgttgtgagttatgccgttgccctcagctgccaatgtgccctctgccgccgttctaccactgactgtggcggaccaaaagatcatcctctgacatgcgacgatcccagattccaagactcctcctcttcaaaggccccgccaccatctctgccttcaccctcacgccttccaggtccttag

SEQ ID NO: 228437 - DNA, 468 bp, Artificial Sequence
  derived and/or modified sequence
atgagcaagagactgctgctgctgctgctgctgagcatgggcggcacctgggccagcaaggagcccctgagacccagatgcagacccatcaacgccaccctggccgtggagaaggagggctgccccgtgtgcatcaccgtgaacaccaccatctgcgccggctactgccccaccatgaccagagtgctgcagggcgtgctgcccgccctgccccaggtggtgtgcaactacagagacgtgagattcgagagcatcagactgcccggctgccccagaggcgtgaaccccgtggtgagctacgccgtggccctgagctgccagtgcgccctgtgcagaagaagcaccaccgactgcggcggccccaaggaccaccccctgacctgcgacgaccccagattccaggacagcagcagcagcaaggcccccccccccagcctgcccagccccagcagactgcccggcccctag

SEQ ID NO: 228438 - DNA, 468 bp, Artificial Sequence
  derived and/or modified sequence
atgagtaaacggctcctcctcctgctcctcctcagcatggggggcacatgggcctccaaagagccactgaggccacgctgccgccctatcaacgcaacactcgctgttgaaaaggaaggctgcccagtgtgcatcacagtcaataccaccatatgcgcaggctactgtccaactatgacacgagtgctgcaaggcgtgctccctgccctgccacaagttgtatgtaattacagagacgtcagatttgagagcatcaggttaccaggctgcccccggggcgttaatcccgtcgtgtcctatgcagttgccctttcttgccagtgtgctctgtgtaggcgttcaacaaccgattgcggtggtcccaaagaccatcccctcacttgcgatgaccctcggttccaggattcgtcatcctccaaggccccaccaccaagtttgcccagtcccagccgcctcccgggaccctag

SEQ ID NO: 228439 - DNA, 468 bp, Artificial Sequence
  derived and/or modified sequence
atgagcaagaggctgctgctgctgctgctgctgtccatgggcggcacctgggccagcaaggagcccctgcggccccgctgccggcccatcaatgccaccctggccgtggagaaggagggctgccctgtgtgcatcaccgtgaacaccaccatctgtgccggctactgccccaccatgaccagggtgctgcagggcgtgctgcctgccctgccccaggtggtgtgcaactacagagatgtgcgctttgagagcatccggctgcccggctgcccccggggcgtgaaccctgtggtgtcctatgctgtggccctgagctgccagtgtgccctgtgccgccgcagcaccacagactgtggcggccccaaggaccaccccctgacctgtgatgacccccgcttccaggacagcagcagcagcaaggcccccccacccagcctgcccagccccagccggctgcccggcccctag

SEQ ID NO: 228440 - DNA, 468 bp, Artificial Sequence
  derived and/or modified sequence
atgagcaagcggctgctgctgctgctgctgctgagcatgggcggcacttgggcctccaaggagcccctgcgaccccgctgccgaccgattaacgccaccttggccgtggaaaaagagggctgtcccgtgtgcattaccgtgaataccactatttgcgccggctattgtcctacaatgaccagagtactccagggtgtactaccggccctgcctcaggttgtctgcaattatcgagatgtgcggttcgagagtattcgacttcccgggtgtccacggggcgtcaaccccgttgtgagttacgcggtggccctctcttgccagtgcgccctctgcaggcggagcacaacagactgcgggggccctaaggaccacccattaacatgcgatgacccccggttccaggatagcagctcctccaaggccccgccacccagcctgccgagcccttcgagactcccaggcccatag

SEQ ID NO: 228441 - RNA, 468 nt, Artificial Sequence
  derived and/or modified sequence
augucuaaacgauuacugcugcugcugcugcuguccaugggagggacaugggccagcaaagaaccacuccgcccucgcugucguccaaucaacgcaacccucgcuguagaaaaggagggaugccccguguguauuaccgugaacacaacaauuugugccgguuacuguccuacaaugacaagaguucuucaggggguacuccccgcccugccccagguugucuguaauuauagggacgugcgguuugaaucuauacgucucccaggauguccuagaggggugaaucccguugugaguuaugcuguugcuuuaagcugucagugcgcauuaugucgcagauccacaaccgauugcggcgggccaaaagaucacccacugacaugcgacgauccaagguuccaagauucaaguucauccaaagcaccaccgcccucacuuccaagcccuucgcgccucccuggaccauag

SEQ ID NO: 228442 - RNA, 468 nt, Artificial Sequence
  derived and/or modified sequence
augucuaaacgauuacugcugcugcugcugcuguccaugggagggacaugggccagcaaagaaccacuccgcccucgcugucguccaaucaacgcaacccucgcuguagaaaaggagggaugccccguguguauuaccgugaacacaacaauuugugccgguuacuguccuacaaugacaagaguucuucaggggguacuccccgcccugccccagguugucuguaauuauagggacgugcgguuugaaucuauacgucucccaggauguccuagaggggugaaucccguugugaguuaugccguugcccucagcugccaaugugcccucugccgccguucuaccacugacuguggcggaccaaaagaucauccucugacaugcgacgaucccagauuccaagacuccuccucuucaaaggccccgccaccaucucugccuucacccucacgccuuccagguccuuag

SEQ ID NO: 228443 - protein, 163 aa, Artificial Sequence
  derived and/or modified sequence
MSKGLLLLLLLSMGGTWASKEPLRPRCRPINATLAVEKEGCPVCITVNTTICAGYCPTMTRVLQGVLPALPQVVCNYRDVRFESIRLPGCPRGVNPVVSYAVALSCQCALCRRSTTDCGGPKDHPLTCDDPRFQASSSSKAPPPSLPSPSRLPGPSDTPILPQ

SEQ ID NO: 228444 - protein, 138 aa, Artificial Sequence
  derived and/or modified sequence
MSKGLLLLLLLSMGGTWASKEPLRPRCRPINATLAVEKEGCPVCITVNTTICAGYCPTMTRVLQGVLPALPQVVCNYRDVRFESIRLPGCPRGVNPVVSYAVALSCQCALCRRSTTDCGGPKDHPLTCDPPLPGLLFL

SEQ ID NO: 228445 - DNA, 492 bp, Artificial Sequence
  derived and/or modified sequence
atgagcaagggcctgctgctgctgctgctgctgagcatgggcggcacctgggccagcaaggagcccctgagacccagatgcagacccatcaacgccaccctggccgtggagaaggagggctgccccgtgtgcatcaccgtgaacaccaccatctgcgccggctactgccccaccatgaccagagtgctgcagggcgtgctgcccgccctgccccaggtggtgtgcaactacagagacgtgagattcgagagcatcagactgcccggctgccccagaggcgtgaaccccgtggtgagctacgccgtggccctgagctgccagtgcgccctgtgcagaagaagcaccaccgactgcggcggccccaaggaccaccccctgacctgcgacgaccccagattccaggccagcagcagcagcaaggcccccccccccagcctgcccagccccagcagactgcccggccccagcgacacccccatcctgccccagtag

SEQ ID NO: 228446 - DNA, 417 bp, Artificial Sequence
  derived and/or modified sequence
atgagcaagggcctgctgctgctgctgctgctgagcatgggcggcacctgggccagcaaggagcccctgagacccagatgcagacccatcaacgccaccctggccgtggagaaggagggctgccccgtgtgcatcaccgtgaacaccaccatctgcgccggctactgccccaccatgaccagagtgctgcagggcgtgctgcccgccctgccccaggtggtgtgcaactacagagacgtgagattcgagagcatcagactgcccggctgccccagaggcgtgaaccccgtggtgagctacgccgtggccctgagctgccagtgcgccctgtgcagaagaagcaccaccgactgcggcggccccaaggaccaccccctgacctgcgacccccccctgcccggcctgctgttcctgtag

SEQ ID NO: 228447 - DNA, 492 bp, Artificial Sequence
  derived and/or modified sequence
atgagcaagggcctgctccttttgctgcttctgtctatgggaggcacctgggcatccaaggaaccgctgagacccagatgcaggccaattaatgcgaccttggcagtcgaaaaagaaggctgccccgtgtgcattaccgtcaacacaacaatctgcgcaggttattgcccaacaatgacaagagttttgcagggagtgcttcctgctttgccacaagtagtgtgtaattatagggacgtccggtttgagagtataagactgcctggatgcccccggggggtcaaccctgttgtatcatacgccgtggctctcagttgtcaatgcgccctctgcagacggtccaccaccgattgtggcggacccaaggaccatcctttgacctgtgacgatccgcgcttccaggctagttcttctagcaaagcaccccccccgtcactgccttccccatcgaggctgcctggtcctagtgacacgcctatcctgccccagtag

SEQ ID NO: 228448 - DNA, 417 bp, Artificial Sequence
  derived and/or modified sequence
atgagtaagggcctactgctgctgctgctgttatccatggggggaacgtgggcctctaaggagcccttaagaccacgctgcagaccaatcaacgcaacgttagctgtcgaaaaggagggctgtccagtgtgcatcaccgttaacacaaccatctgcgctggttactgtcccactatgacgcgggttctccaaggagtgctccctgctctgccccaggtcgtgtgtaattatcgcgacgtccggtttgagagcatacgactgccaggatgcccacgaggcgtgaatcccgtggtttcctatgcggtggccttgagctgtcagtgcgcactgtgccggcgtagcaccactgattgcggcggaccaaaggatcatcctctaacatgtgaccctccactgcccggactgttgttcctttag

SEQ ID NO: 228449 - DNA, 492 bp, Artificial Sequence
  derived and/or modified sequence
atgagcaagggcctgctgctgctgctgctgctgtccatgggcggcacctgggccagcaaggagcccctgcggccccgctgccggcccatcaatgccaccctggccgtggagaaggagggctgccctgtgtgcatcaccgtgaacaccaccatctgtgccggctactgccccaccatgaccagggtgctgcagggcgtgctgcctgccctgccccaggtggtgtgcaactacagagatgtgcgctttgagagcatccggctgcccggctgcccccggggcgtgaaccctgtggtgtcctatgctgtggccctgagctgccagtgtgccctgtgccgccgcagcaccacagactgtggcggccccaaggaccaccccctgacctgtgatgacccccgcttccaggccagcagcagcagcaaggcccccccacccagcctgcccagccccagccggctgcccggccccagcgacacccccatcctgccccagtag

SEQ ID NO: 228450 - DNA, 417 bp, Artificial Sequence
  derived and/or modified sequence
atgagcaagggcctgctgctgctgctgctgctgtccatgggcggcacctgggccagcaaggagcccctgcggccccgctgccggcccatcaatgccaccctggccgtggagaaggagggctgccctgtgtgcatcaccgtgaacaccaccatctgtgccggctactgccccaccatgaccagggtgctgcagggcgtgctgcctgccctgccccaggtggtgtgcaactacagagatgtgcgctttgagagcatccggctgcccggctgcccccggggcgtgaaccctgtggtgtcctatgctgtggccctgagctgccagtgtgccctgtgccgccgcagcaccacagactgtggcggccccaaggaccaccccctgacctgtgacccccccctgcccggcctgctcttcctgtag

SEQ ID NO: 228451 - DNA, 492 bp, Artificial Sequence
  derived and/or modified sequence
atgagcaagggcctgctgctgctgctgctgctgagcatgggcggcacatgggcaagcaaagagcctttaaggcccaggtgcagaccaattaacgcaacactcgccgttgaaaaggaaggctgccctgtgtgcattacagtcaacacaacaatttgcgcgggatactgccctactatgactcgcgtgttgcaaggcgtcctgccagcactgccacaggtggtttgtaactatagagacgtccgctttgagagcatccggctgcctgggtgtccgcggggagtgaaccccgtcgtcagttatgcagtcgccctgtcctgtcaatgcgcactgtgcagacggtcaacaactgactgtgggggcccaaaggaccacccactcacatgtgatgatccacgttttcaggcttcatcttcttctaaggcaccccctccctctctcccttccccctctcgactgcctggcccaagcgatacaccgattttaccgcagtag

SEQ ID NO: 228452 - DNA, 417 bp, Artificial Sequence
  derived and/or modified sequence
atgagcaagggcctgctgctgctgctgctgctgagcatgggcggcacctgggctagtaaagagcctctcaggccacgatgcaggcctatcaacgcaaccctggcagtggaaaaagaggggtgtcctgtttgcataaccgtgaatacaactatttgcgcaggatattgtccaacaatgactagagtacttcaaggggtgctgcctgccctccctcaggttgtgtgcaactacagggacgtgagatttgagtcaatccgattgcccgggtgtcctcgcggtgtgaatcctgtcgtcagctacgccgtggccctgagctgtcagtgtgctctgtgccggaggagtaccacagactgtggtgggcccaaggaccacccactaacatgcgaccctcctctgccaggccttctatttttgtag

SEQ ID NO: 228453 - DNA, 492 bp, Artificial Sequence
  derived and/or modified sequence
atgagtaagggactgctgttgctactgctcctgtctatgggcggtacctgggcatcaaaagaaccactgcgtccccgatgtaggcccataaatgcaaccctagccgtcgagaaagaaggctgcccagtttgcataacagtaaacaccaccatttgcgccggatactgcccaacaatgactcgagtactccagggcgtgctccccgctttaccgcaggtggtctgcaattatagagatgtgaggttcgaatccatacgcctgcccggttgtcccaggggggtcaacccagtggtctcttacgctgtcgctctaagttgtcaatgtgcactgtgtcgcagaagtactactgactgtgggggtcctaaggatcatcctctgacctgcgacgaccctagattccaggcctccagcagttcaaaagctcccccaccctccctgccatctcccagtaggctccctggcccatcagacacacccatcttgccccagtag

SEQ ID NO: 228454 - DNA, 417 bp, Artificial Sequence
  derived and/or modified sequence
atgagcaagggtctccttttgttgctgctgctgtcgatgggtgggacatgggccagcaaggagcctctgcgacctcgctgcagacctataaatgctacacttgcagttgagaaagaaggctgccccgtctgcattacggttaacacaactatatgtgctgggtattgtccgaccatgacacgggtactccagggggttctgcctgccttgccccaggtcgtctgtaactatagggatgtcaggttcgaaagtatccgtctccccggatgcccaagaggagtcaatcctgtggttagctatgctgtggctttgtcctgccagtgtgcactgtgtcggagatctacaacagactgtgggggaccaaaagatcaccctctgacatgcgatccccctctgcctgggcttctgttcctgtag

SEQ ID NO: 228455 - DNA, 627 bp, Artificial Sequence
  derived and/or modified sequence
gttcccgtgccgcgtccaacacccctcactccctgtctcactcccccacggagactcaatttactttccatgtccacatccccagtgcttgcggaagatatcccgctaagagagagacatgtcaaaggggctgctgctgttgctgctgctgagcatgggcgggacatgggcatccaaggagccgcttcggccacggtgccgccccatcaatgccaccctggctgtggagaaggagggctgccccgtgtgcatcaccgtcaacaccaccatctgtgccggctactgccccaccatgacccgcgtgctgcagggggtcctgccggccctgcctcaggtggtgtgcaactaccgcgatgtgcgcttcgagtccatccggctccctggctgcccgcgcggcgtgaaccccgtggtctcctacgccgtggctctcagctgtcaatgtgcactctgccgccgcagcaccactgactgcgggggtcccaaggaccaccccttgacctgtgatgacccccgcttccaggcctcctcttcctcaaaggcccctccccccagccttccaagcccatcccgactcccggggccctcagacaccccgatcctcccacaataaaggcttctcaatccgca

SEQ ID NO: 228456 - DNA, 730 bp, Artificial Sequence
  derived and/or modified sequence
ccccagggccagtgagggccctgcgttccgtggcgccccctggagggaggaaggggaactgtatctgagagagagcagccaattgggtccgctgactccggccgggttcccgtgccgcgtccaacacccctcactccctgtctcactcccccacggagactcaatttactttccatgtccacatccccagtgcttgcggaagatatcccgctaagagagagacatgtcaaaggggctgctgctgttgctgctgctgagcatgggcgggacatgggcatccaaggagccgcttcggccacggtgccgccccatcaatgccaccctggctgtggagaaggagggctgccccgtgtgcatcaccgtcaacaccaccatctgtgccggctactgccccaccatgacccgcgtgctgcagggggtcctgccggccctgcctcaggtggtgtgcaactaccgcgatgtgcgcttcgagtccatccggctccctggctgcccgcgcggcgtgaaccccgtggtctcctacgccgtggctctcagctgtcaatgtgcactctgccgccgcagcaccactgactgcgggggtcccaaggaccaccccttgacctgtgatcccccgcttccaggcctcctcttcctcaaaggcccctccccccagccttccaagcccatcccgactcccggggccctcagacaccccgatcctcccacaataaaggcttctcaatccgca

SEQ ID NO: 228457 - protein, 240 aa, Artificial Sequence
  derived and/or modified sequence
MEDYTKIEKIGEGTYGVVYKGRHKTTGQVVAMKKIRLESEEEGVPSTAIREISLLKELRHPNIVSLQDVLMQDSRLYLIFEFLSMDLKKYLDSIPPGQYMDSSLVKVVTLWYRSPEVLLGSARYSTPVDIWSIGTIFAELATKKPLFHGDSEIDQLFRIFRALGTPNNEVWPEVESLQDYKNTFPKWKPGSLASHVKNLDENGLDLLSKMLIYDPAKRISGKMALNHPYFNDLDNQIKKM

SEQ ID NO: 228458 - DNA, 723 bp, Artificial Sequence
  derived and/or modified sequence
atggaggactacaccaagatcgagaagatcggcgagggcacctacggcgtggtgtacaagggcagacacaagaccaccggccaggtggtggccatgaagaagatcagactggagagcgaggaggagggcgtgcccagcaccgccatcagagagatcagcctgctgaaggagctgagacaccccaacatcgtgagcctgcaggacgtgctgatgcaggacagcagactgtacctgatcttcgagttcctgagcatggacctgaagaagtacctggacagcatcccccccggccagtacatggacagcagcctggtgaaggtggtgaccctgtggtacagaagccccgaggtgctgctgggcagcgccagatacagcacccccgtggacatctggagcatcggcaccatcttcgccgagctggccaccaagaagcccctgttccacggcgacagcgagatcgaccagctgttcagaatcttcagagccctgggcacccccaacaacgaggtgtggcccgaggtggagagcctgcaggactacaagaacaccttccccaagtggaagcccggcagcctggccagccacgtgaagaacctggacgagaacggcctggacctgctgagcaagatgctgatctacgaccccgccaagagaatcagcggcaagatggccctgaaccacccctacttcaacgacctggacaaccagatcaagaagatgtag

SEQ ID NO: 228459 - DNA, 1733 bp, Artificial Sequence
  derived and/or modified sequence
agcgcggtgagtttgaaactgctcgcacttggcttcaaagctggctcttggaaattgagcggagagcgacgcggttgttgtagctgccgctgcggccgccgcggaataataagccgggatctaccatacccattgactaactatggaagattataccaaaatagagaaaattggagaaggtacctatggagttgtgtataagggtagacacaaaactacaggtcaagtggtagccatgaaaaaaatcagactagaaagtgaagaggaaggggttcctagtactgcaattcgggaaatttctctattaaaggaacttcgtcatccaaatatagtcagtcttcaggatgtgcttatgcaggattccaggttatatctcatctttgagtttctttccatggatctgaagaaatacttggattctatccctcctggtcagtacatggattcttcacttgttaaggtagtaacactctggtacagatctccagaagtattgctggggtcagctcgttactcaactccagttgacatttggagtataggcaccatatttgctgaactagcaactaagaaaccacttttccatggggattcagaaattgatcaactcttcaggattttcagagctttgggcactcccaataatgaagtgtggccagaagtggaatctttacaggactataagaatacatttcccaaatggaaaccaggaagcctagcatcccatgtcaaaaacttggatgaaaatggcttggatttgctctcgaaaatgttaatctatgatccagccaaacgaatttctggcaaaatggcactgaatcatccatattttaatgatttggacaatcagattaagaagatgtagctttctgacaaaaagtttccatatgttatatcaacagatagttgtgtttttattgttaactcttgtctatttttgtcttatatatatttctttgttatcaaacttcagctgtacttcgtcttctaatttcaaaaatataacttaaaaatgtaaatattctatatgaatttaaatataattctgtaaatgtgtgtaggtctcactgtaacaactatttgttactataataaaactataatattgatgtcaggaatcaggaaaaaatttgagttggcttaaatcatctcagtccttatggcagttttattttcctgtagttggaactactaaaatttaggaaaatgctaagttcaagtttcgtaatgctttgaagtatttttatgctctgaatgtttaaatgttctcatcagtttcttgccatgttgttaactatacaacctggctaaagatgaatatttttctactggtattttaatttttgacctaaatgtttaagcattcggaatgagaaaactatacagatttgagaaatgatgctaaatttataggagttttcagtaacttaaaaagctaacatgagagcatgccaaaatttgctaagtcttacaaagatcaagggctgtccgcaacagggaagaacagttttgaaaatttatgaactatcttatttttaggtaggttttgaaagctttttgtctaagtgaattcttatgccttggtcagagtaataactgaaggagttgcttatcttggctttcgagtctgagtttaaaactacacattttgacatagtgtttattagcagccatctaaaaaggctctaatgtatatttaactaaaattactagctttgggaattaaactgttt

SEQ ID NO: 228460 - DNA, 1613 bp, Artificial Sequence
  derived and/or modified sequence
ccattgactaactatggaagattataccaaaatagagaaaattggagaaggtacctatggagttgtgtataagggtagacacaaaactacaggtcaagtggtagccatgaaaaaaatcagactagaaagtgaagaggaaggggttcctagtactgcaattcgggaaatttctctattaaaggaacttcgtcatccaaatatagtcagtcttcaggatgtgcttatgcaggattccaggttatatctcatctttgagtttctttccatggatctgaagaaatacttggattctatccctcctggtcagtacatggattcttcacttgttaaggtagtaacactctggtacagatctccagaagtattgctggggtcagctcgttactcaactccagttgacatttggagtataggcaccatatttgctgaactagcaactaagaaaccacttttccatggggattcagaaattgatcaactcttcaggattttcagagctttgggcactcccaataatgaagtgtggccagaagtggaatctttacaggactataagaatacatttcccaaatggaaaccaggaagcctagcatcccatgtcaaaaacttggatgaaaatggcttggatttgctctcgaaaatgttaatctatgatccagccaaacgaatttctggcaaaatggcactgaatcatccatattttaatgatttggacaatcagattaagaagatgtagctttctgacaaaaagtttccatatgttatatcaacagatagttgtgtttttattgttaactcttgtctatttttgtcttatatatatttctttgttatcaaacttcagctgtacttcgtcttctaatttcaaaaatataacttaaaaatgtaaatattctatatgaatttaaatataattctgtaaatgtgtgtaggtctcactgtaacaactatttgttactataataaaactataatattgatgtcaggaatcaggaaaaaatttgagttggcttaaatcatctcagtccttatggcagttttattttcctgtagttggaactactaaaatttaggaaaatgctaagttcaagtttcgtaatgctttgaagtatttttatgctctgaatgtttaaatgttctcatcagtttcttgccatgttgttaactatacaacctggctaaagatgaatatttttctactggtattttaatttttgacctaaatgtttaagcattcggaatgagaaaactatacagatttgagaaatgatgctaaatttataggagttttcagtaacttaaaaagctaacatgagagcatgccaaaatttgctaagtcttacaaagatcaagggctgtccgcaacagggaagaacagttttgaaaatttatgaactatcttatttttaggtaggttttgaaagctttttgtctaagtgaattcttatgccttggtcagagtaataactgaaggagttgcttatcttggctttcgagtctgagtttaaaactacacattttgacatagtgtttattagcagccatctaaaaaggctctaatgtatatttaactaaaattactagctttgggaattaaactgtttaacaaataa

SEQ ID NO: 228461 - DNA, 723 bp, Artificial Sequence
  derived and/or modified sequence
atggaggattacactaaaatcgagaaaatcggcgagggaacatacggagtggtgtataaaggccggcataaaacaaccgggcaggtcgtcgccatgaagaaaatccggctggagtccgaggaggaaggtgtgcctagcactgctatcagggagataagcctcctgaaggagctccggcatcccaatatcgtgtcactgcaagacgtgctcatgcaggattctcgcctctatctgatttttgagtttctctccatggatctgaaaaagtatcttgacagcatacccccaggccaatacatggatagctccctggtgaaagtggtgaccctttggtaccgctccccagaagtcctgctgggcagtgctagatacagcactcccgtggatatctggtccatcggcacaatcttcgcggagctcgccacgaagaaacccctgtttcatggcgactccgagattgaccagttatttaggatcttccgggcactgggcacccctaacaatgaagtgtggcctgaggtagagtccctgcaggattacaagaatacatttcccaaatggaagccaggttccttggcatcgcatgtgaagaacctggacgaaaacgggctcgatcttcttagtaaaatgcttatttacgatcccgcgaagaggatatctggtaagatggcccttaaccacccctactttaacgatctcgacaatcagatcaaaaagatgtag

SEQ ID NO: 228462 - DNA, 723 bp, Artificial Sequence
  derived and/or modified sequence
atggaagactacactaagattgagaagatcggagagggcacttacggcgtagtttataaagggagacataagacgaccggacaggtggtagcgatgaaaaaaattaggctggagtctgaggaggagggagttccttctactgctatacgggagatcagccttttaaaggagctgcgtcatcctaacatcgtgtctctgcaggacgtgctcatgcaggatagccgtctctacctaatctttgagtttctgtctatggatctgaagaaataccttgatagtatccctccaggccaatatatggattcatccctggtgaaggtggtgaccttgtggtaccgctccccggaggtgcttctgggtagtgccagatacagcactcctgtcgacatctggagtattggaacaatttttgccgagctcgccaccaagaagccactatttcatggggattccgagatagatcagctattccgtatatttcgggccctcggaactcctaacaacgaggtctggcccgaggtggaatcactgcaggactacaagaacacatttcccaagtggaaacctggcagtctggcatcacatgtgaagaacctggatgagaatggactggatcttctgagtaagatgctgatatatgatcctgctaaacgcatctccggaaagatggccctgaatcacccatattttaacgatctagataaccagatcaagaagatgtag

SEQ ID NO: 228463 - DNA, 723 bp, Artificial Sequence
  derived and/or modified sequence
atggaggactacaccaagattgagaagatcggggagggcacctatggagtggtgtacaagggccgccacaagaccaccggccaggtggtggccatgaagaagatccggctggagagcgaggaggagggcgtgcccagcacagccatccgggagatcagcctgctgaaggagctgcggcaccccaacatcgtgtccctgcaggatgtgctgatgcaggacagccggctgtacctgatctttgagttcctgtccatggacctgaagaagtacctggacagcatccccccaggccagtacatggacagcagcctggtgaaggtggtgaccctgtggtaccgcagccctgaggtgctgctgggcagcgcccgctacagcacccctgtggacatctggagcatcggcaccatctttgctgagctggccaccaagaagcccctcttccacggggacagcgagattgaccagctgttccgcatcttccgggccctgggcacccccaacaatgaggtgtggccagaggtggagagcctgcaggactacaagaacaccttccccaagtggaagccaggcagcctggccagccacgtgaagaacctggatgaaaatggcctggacctgctgagcaagatgctgatctatgaccctgccaagaggatcagcggcaagatggccctgaaccacccctacttcaatgacctggacaaccagatcaagaagatgtag

SEQ ID NO: 228464 - DNA, 723 bp, Artificial Sequence
  derived and/or modified sequence
atggaggactacaccaagatcgagaagatcggcgagggcacctacggcgtggtgtataaggggcgtcataagactaccggccaggtagtggcgatgaagaagattcgcctagagtccgaagaagagggcgttccctctacagccattagagaaatcagcctccttaaggagctgaggcaccctaacattgtgtccctgcaggacgtattaatgcaggattctcggttgtatctaattttcgagttcctatcaatggacctgaagaagtatcttgattccattcctccaggccagtacatggacagctcactggtgaaggtggtcacgctctggtaccggagcccagaggtgcttttaggatccgccaggtactcaaccccggtggatatttggtctatcggcactatctttgcagagctcgctacaaaaaagcccctcttccatggcgattcagagatcgaccagcttttccggatttttcgcgcactcggcacccccaacaatgaggtctggccagaggtggagagcttgcaggactataagaatacattcccaaagtggaaaccagggtccctcgccagccacgtgaaaaacctagatgagaacgggctggatctgctgagcaagatgctcatttatgatccagccaaacgcatttcgggaaagatggccctcaatcatccatattttaatgatttggataatcagatcaagaaaatgtag

SEQ ID NO: 228465 - DNA, 723 bp, Artificial Sequence
  derived and/or modified sequence
atggaggactacaccaagatcgagaagatcggcgagggcacctacggcgtagtatataaaggccggcacaagacaactgggcaggtcgtggctatgaagaaaataagactggagtccgaagaggagggggtcccatccacagctatcagggagatctcactgctcaaagaactaagacacccaaatatcgtcagtctgcaggatgtgctgatgcaggattcacgactgtacctcatatttgagtttctcagcatggacctcaaaaaatacctggattcgatccctccaggacagtacatggactcttctctggtgaaagtcgtcaccctctggtacaggagccctgaggtcctgctcggctcagccagatattcgactcctgttgacatttggtctatcggtacaatttttgcagaactggccaccaaaaaaccgttgttccatggagacagcgagattgatcagctttttcggatctttagagcactggggacacccaataatgaagtgtggccagaggtcgaatcccttcaggactataagaacacctttccgaaatggaagcctgggtctctcgctagccacgtgaaaaatctggatgagaacggactggacttgctgtccaagatgctgatttacgaccctgctaagaggatcagtggaaagatggcccttaatcacccatatttcaacgacctcgacaaccagataaaaaaaatgtag

SEQ ID NO: 228466 - DNA, 723 bp, Artificial Sequence
  derived and/or modified sequence
atggaggactatactaagatagagaaaatcggcgaggggacatacggagtggtttacaagggcaggcataagacaacgggccaggtggttgccatgaagaaaattcgcctggagtccgaggaggaaggagttccatcgaccgctataagggagatttccctgctaaaggagctcaggcaccctaacatcgtgtctctccaagacgttctgatgcaggatagtcgcctgtatcttatctttgaattcttaagtatggacctgaagaaatatctggattctatcccacctggccagtacatggacagtagcctggttaaagtcgtcacactttggtaccggtctcccgaggttttactcggatccgccagatactccacaccggttgatatttggtctattggaaccatattcgctgaactggccactaagaaacctctgttccacggcgactccgagatcgaccagctattccgcattttccgcgctctgggcacaccaaacaatgaggtgtggccagaggtggaaagcctccaggattacaagaatacatttcctaagtggaagcccggtagcctggccagtcacgtgaagaacctcgatgagaacggcctggatctgctgtccaagatgttgatttatgaccccgctaaaagaataagtggcaaaatggccttgaatcatccctacttcaatgatctggacaaccaaatcaaaaaaatgtag

SEQ ID NO: 228467 - DNA, 723 bp, Artificial Sequence
  derived and/or modified sequence
atggaagactatacaaagatcgaaaaaattggagaaggcacatacggtgttgtctataagggcaggcataagaccaccggccaggttgtagcgatgaagaagatacgactcgaatcagaagaggagggagttccctccacagctattcgggagataagcctcctcaaagagctgcggcaccccaacatcgtgtccctacaggatgtcttgatgcaagactcccgcttgtacctcatctttgaattcttaagtatggatctgaagaaatatctcgacagcatcccccctggccagtatatggattcctctctggtgaaggtcgtcactctgtggtacagatcacctgaagtcctgctcggcagtgccagatatagcacgccagtggatatttggtccatcggcaccatattcgcagagttggccactaagaagcccctgttccatggtgacagtgaaatcgaccaactgttccgaatctttcgcgcactgggcacccccaataatgaggtctggccagaagtcgagagtcttcaggattacaagaacactttccctaagtggaaacctgggtccttagctagtcacgtgaagaacttggatgagaacggactggacttgctctccaagatgttgatctatgatcctgcaaagcgaatcagcgggaaaatggcccttaatcacccatatttcaatgacctggacaaccagataaagaaaatgtag

SEQ ID NO: 228468 - protein, 392 aa, Artificial Sequence
  derived and/or modified sequence
MSGRVGDLSPRQKEALAKFRENVQDVLPALPNPDDYFLLRWLRARSFDLQKSEAMLRKHVEFRKQKDIDNIISWQPPEVIQQYLSGGMCGYDLDGCPVWYDIIGPLDAKGLLFSASKQDLLRTKMRECELLLQECAHQTTKLGRKVETITIIYDCEGLGLKHLWKPAVEAYGEFLCMFEENYPETLKRLFVVKAPKLFPVAYNLIKPFLSEDTRKKIMVLGANWKEVLLKHISPDQVPVEYGGTMTDPDGNPKCKSKINYGGDIPRKYYVRDQVKQQYEHSVQISRGSSHQVEYEILFPGCVLRWQFMSDGADVGFGIFLKTKMGERQRAGEMTEVLPNQRYNSHLVPEDGTLTCSDPGICKYLCLGNALKPHVQLSACEVPLPPWIFGSEC

SEQ ID NO: 228469 - DNA, 1179 bp, Artificial Sequence
  derived and/or modified sequence
atgtcaggtcgcgtgggagatctctcccctcggcagaaagaggcgctggcaaaattcagagaaaatgtgcaggacgtccttcctgcattgccgaatcccgacgattactttctgctgcggtggctgagagctagatccttcgatctgcagaagagcgaggcaatgttgcgtaaacatgtggaatttcggaagcagaaagacatcgataacattatttcctggcaacctcctgaggtgattcagcagtacctcagcggaggtatgtgcgggtacgatctcgacggttgtccagtctggtatgatatcattggaccattggatgctaaaggcctcctatttagtgcctccaagcaagatcttttacggaccaagatgcgagagtgcgagttgctgcttcaggagtgtgctcaccagacgactaaattgggacgcaaggtggagactattactataatttacgactgcgagggcctcggactcaaacatctttggaaacctgccgtcgaggcctacggggaatttctttgcatgtttgaagagaactaccctgagaccctgaagaggttgtttgtcgtgaaagctccaaaattgttcccagtggcatacaatttaataaagccctttttaagtgaggacacccgtaagaagattatggtcttgggtgcaaattggaaagaggtgctcctgaagcatattagccccgatcaggtgccagtagagtacggaggcaccatgacggacccagatggtaatcccaagtgtaaaagcaaaatcaactacggcggagatatcccaaggaaatattatgtcagggatcaagtgaaacaacagtacgaacactctgtgcagatatctcgcggatctagccaccaggtggaatatgaaatcttgttccccggatgtgtgctgcgctggcaattcatgagtgacggggctgatgtggggttcggtatcttcctgaaaaccaagatgggggaacgccagcgtgctggggaaatgactgaggtgttgcccaatcaacggtacaattctcatctggttccggaagacggcactctcacatgttcagatcctggaatttgcaagtatctgtgtttaggaaacgcgctgaagccccacgttcagctcagcgcctgtgaagttccactacccccatggatcttcgggagtgagtgttag

SEQ ID NO: 228470 - DNA, 1179 bp, Artificial Sequence
  derived and/or modified sequence
atgagcggccgggtgggggacctgagcccccggcagaaggaggccctggccaagttcagagaaaatgtgcaggatgtgctgcctgccctgcccaacccagatgactacttcctgctgcgctggctgcgggcccggagctttgacctgcagaagtctgaggccatgctgaggaagcacgtggagttcaggaagcagaaggacatcgacaacatcatctcctggcagcccccagaggtgatccagcagtacctgagcggcggcatgtgtggctatgacctggatggctgccctgtgtggtatgacatcatcggccccctggatgccaagggcctgctcttcagcgccagcaagcaggacctgctgcggaccaagatgagagaatgtgagctgctgctgcaggagtgtgcccaccagaccaccaagctgggcaggaaggtggagaccatcaccatcatctatgactgtgagggcctgggcctgaagcacctgtggaagccagctgtggaggcctatggagagttcctgtgcatgtttgaggagaactacccagagaccctgaagaggctgtttgtggtgaaggcccccaagctgtttcctgtggcctacaacctgatcaagcccttcctgtctgaggacaccaggaagaagatcatggtgctgggcgccaactggaaggaggtgctgctgaagcacatcagcccagaccaggtgcctgtggagtatggaggcaccatgacagatcctgatggcaaccccaagtgcaagagcaagatcaactacggcggggacatccccaggaagtactacgtgcgggaccaggtgaagcagcagtatgagcacagcgtgcagatcagccggggcagcagccaccaggtggagtatgagatcctcttccctggctgtgtgctgcgctggcagttcatgtctgatggagcagatgtgggcttcggcatcttcctgaagaccaagatgggagagcggcagagagctggggagatgacagaggtgctgcccaaccagcgctacaacagccacctggtgcctgaagatggcaccctgacctgcagcgaccccggcatctgcaagtacctgtgcctgggcaatgccctgaagccccacgtgcagctgagcgcctgtgaggtgcccctgcccccctggatcttcggctctgaatgttag

SEQ ID NO: 228471 - DNA, 1179 bp, Artificial Sequence
  derived and/or modified sequence
atgagcggccgggtgggcgacctgagcccccggcagaaggaggccttagctaagttccgtgagaacgtgcaggacgtcctcccagcactacccaaccccgacgactatttcctgctgaggtggctgcgtgctcgcagttttgatcttcagaagagcgaagcgatgcttagaaagcacgtggagtttaggaaacaaaaggatatcgacaacataataagctggcaaccaccggaggtgattcaacagtaccttagcggtggaatgtgtgggtacgacctggatgggtgtcccgtatggtacgatatcatcggtcccctggacgccaaaggactgttatttagcgctagcaagcaggatctgctgcgtacaaagatgagagagtgtgagctcctgttgcaggaatgtgcgcatcagactacgaagttgggccgtaaggttgaaactattaccattatctatgactgcgagggcctgggccttaagcacctgtggaagccggccgtagaagcatacggagaattcctgtgtatgttcgaggagaactatcccgagactttgaaaagactatttgttgtaaaggcacccaagctcttcccagtggcctacaatcttattaaacctttcctcagcgaggataccagaaagaagatcatggtactgggggctaactggaaagaagtcctgttgaagcacatttcaccagaccaggtcccagtggagtacggcggtactatgactgatccagacggaaatcccaagtgtaagtctaagataaattacggcggcgacattcctaggaagtactacgttcgcgaccaggtaaagcaacagtacgaacatagcgtgcaaatttctcgtggcagttctcatcaggtagaatacgagattttattccccgggtgtgtccttagatggcaatttatgtctgatggagccgacgtaggattcggcatcttcctgaagacaaagatgggcgagaggcagagggccggagagatgactgaggtgctgccgaaccagcgctacaactctcacctcgtcccagaggatggaaccctgacctgcagcgatccaggcatttgcaaatacttgtgcctcggcaacgccctcaagccccacgtacagctttctgcttgtgaggttcctcttccaccatggattttcggcagtgagtgctag

SEQ ID NO: 228472 - DNA, 1179 bp, Artificial Sequence
  derived and/or modified sequence
atgtcaggccgagtgggcgacttatcgccaaggcaaaaagaggccctggctaaattccgagaaaatgtacaggacgttttgcccgctctgccaaacccagacgattactttctgttgcgctggcttagggctagatcctttgacttacaaaagtctgaggccatgttgcggaagcatgtggagttcagaaagcaaaaagacatcgacaacatcattagttggcagccccctgaggtgattcagcagtatctgtctggagggatgtgcggatatgatctagacggatgcccagtgtggtatgacattattggaccgctcgacgctaaagggttgctatttagcgcgtccaagcaggatctgctccgaacgaaaatgcgcgagtgcgagctattattgcaggagtgtgctcaccagactactaaactgggcagaaaagtcgagactataaccattatctatgattgcgagggcctgggactgaaacacctgtggaagcctgcagttgaggcctacggcgaatttctttgcatgtttgaagagaattacccagaaacactgaagcggttgtttgtggtaaaagcccctaaactctttcctgtggcttataacttgatcaagccctttctgtcagaggataccagaaagaaaatcatggtgttaggggctaattggaaggaagtcctgttgaaacacatcagccctgaccaagtgcccgttgagtatgggggtactatgaccgacccagatggtaatcctaagtgcaagtccaaaatcaattacggcggagacattcccagaaaatattatgtacgcgaccaagttaagcagcagtatgagcattcggtgcagatatccaggggaagttcgcatcaggtggaatacgaaattctttttccgggatgcgttctgcgctggcagttcatgtccgacggcgcagacgtcgggtttggaatcttcttgaaaacaaaaatgggcgaacgtcagcgcgctggggaaatgaccgaggtgctacccaaccagcgctataattcgcacctggtcccagaagacggtacacttacatgttcagacccagggatctgtaaatacctatgcctgggtaatgctctgaagccccacgtgcagctgagcgcctgtgaggtcccactccccccatggatcttcgggtccgagtgttag

SEQ ID NO: 228473 - DNA, 1733 bp, Artificial Sequence
  derived and/or modified sequence
gcgaggacgagtctgtgctccatcagctgccgcacccgccgcctcccgcccccaaaccccatccccgcggttgagccacgatgagcggcagagtcggcgatctgagccccaggcagaaggaggcattggccaagtttcgggagaatgtccaggatgtgctgccggccctgccgaatccagatgactattttctcctgcgttggctccgagccagaagcttcgacctgcagaagtcggaggccatgctccggaagcatgtggagttccgaaagcaaaaggacattgacaacatcattagctggcagcctccagaggtgatccaacagtatctgtcagggggtatgtgtggctatgacctggatggctgcccagtctggtacgacataattggacctctggatgccaagggtctgctgttctcagcctccaaacaggacctgctgaggaccaagatgcgggagtgtgagctgcttctgcaagagtgtgcccaccagaccacaaagttggggaggaaggtggagaccatcaccataatttatgactgcgaggggcttggcctcaagcatctctggaagcctgctgtggaggcctatggagagtttctctgcatgtttgaggaaaattatcccgaaacactgaagcgtctttttgttgttaaagcccccaaactgtttcctgtggcctataacctcatcaaacccttcctgagtgaggacactcgtaagaagatcatggtcctgggagcaaattggaaggaggttttactgaaacatatcagccctgaccaggtgcctgtggagtatgggggcaccatgactgaccctgatggaaaccccaagtgcaaatccaagatcaactacgggggtgacatccccaggaagtattatgtgcgagaccaggtgaaacagcagtatgaacacagcgtgcagatttcccgtggctcctcccaccaagtggagtatgagatcctcttccctggctgtgtcctcaggtggcagtttatgtcagatggagcggatgttggttttgggattttcctgaagaccaagatgggagagaggcagcgggcaggggagatgacagaggtgctgcccaaccagaggtacaactcccacctggtccctgaagatgggaccctcacctgcagtgatcctggcatctgtaagtatctctgccttggcaatgccttgaagccccatgtccagctttctgcctgtgaggttcctcttcctccatggatttttggctctgagtgttagaactagaagtggaatgccatcagttcaatcctctccttgtatagatgaagaaatctagccttggagacttgtttatggtgacccaactggttaacagcagggtgggactttgatctcatactcctaggtatgggtgagtcacagtcctaggcgatcacaggggttcaacacgtctgctttctggtccaggtctaactgggtctgtgactggacagatatttcttggggatgctccttcccagaggtcacagagacagaactggctgggtgggcatgggatcacaaggtaagcagatgctcaaaagtgcagccttcacccctgagtttcactcatctcccagctgaccaaagaatggacacagactatgagcaggcagtttacacaagaatataagaatgggaaacagacatttgaaaaggtgcttaatctctcttaactttgtaataccattaaaattccccttgactcagcaa

SEQ ID NO: 228474 - DNA, 1179 bp, Artificial Sequence
  derived and/or modified sequence
atgagcggcagagtgggcgacctgagccccagacagaaggaggccctggccaagttcagagagaacgtgcaggacgtgctgcccgccctgcccaaccccgacgactacttcctgctgagatggctgagagccagaagcttcgacctgcagaagagcgaggccatgctgagaaagcacgtggagttcagaaagcagaaggacatcgacaacatcatcagctggcagccccccgaggtgatccagcagtacctgagcggcggcatgtgcggctacgacctggacggctgccccgtgtggtacgacatcatcggccccctggacgccaagggcctgctgttcagcgccagcaagcaggacctgctgagaaccaagatgagagagtgcgagctgctgctgcaggagtgcgcccaccagaccaccaagctgggcagaaaggtggagaccatcaccatcatctacgactgcgagggcctgggcctgaagcacctgtggaagcccgccgtggaggcctacggcgagttcctgtgcatgttcgaggagaactaccccgagaccctgaagagactgttcgtggtgaaggcccccaagctgttccccgtggcctacaacctgatcaagcccttcctgagcgaggacaccagaaagaagatcatggtgctgggcgccaactggaaggaggtgctgctgaagcacatcagccccgaccaggtgcccgtggagtacggcggcaccatgaccgaccccgacggcaaccccaagtgcaagagcaagatcaactacggcggcgacatccccagaaagtactacgtgagagaccaggtgaagcagcagtacgagcacagcgtgcagatcagcagaggcagcagccaccaggtggagtacgagatcctgttccccggctgcgtgctgagatggcagttcatgagcgacggcgccgacgtgggcttcggcatcttcctgaagaccaagatgggcgagagacagagagccggcgagatgaccgaggtgctgcccaaccagagatacaacagccacctggtgcccgaggacggcaccctgacctgcagcgaccccggcatctgcaagtacctgtgcctgggcaacgccctgaagccccacgtgcagctgagcgcctgcgaggtgcccctgcccccctggatcttcggcagcgagtgctag

SEQ ID NO: 228475 - protein, 1423 aa, Artificial Sequence
  derived and/or modified sequence
MALVTVQRSPTPSTTSSPCASEADSGEEECRSQPRSISESFLTVKGAALFLPRGNGSSTPRISHRRNKHAGDLQQHLQAMFILLRPEDNIRLAVRLESTYQNRTRYMVVVSTNGRQDTEESIVLGMDFSSNDSSTCTMGLVLPLWSDTLIHLDGDGGFSVSTDNRVHIFKPVSVQAMWSALQSLHKACEVARAHNYYPGSLFLTWVSYYESHINSDQSSVNEWNAMQDVQSHRPDSPALFTDIPTERERTERLIKTKLREIMMQKDLENITSKEIRTELEMQMVCNLREFKEFIDNEMIVILGQMDSPTQIFEHVFLGSEWNASNLEDLQNRGVRYILNVTREIDNFFPGVFEYHNIRVYDEEATDLLAYWNDTYKFISKAKKHGSKCLVHCKMGVSRSASTVIAYAMKEYGWNLDRAYDYVKERRTVTKPNPSFMRQLEEYQGILLASKQRHNKLWRSHSDSDLSDHHEPICKPGLELNKKDITTSADQIAEVKTMESHPPIPPVFVEHMVPQDANQKGLCTKERMICLEFTSREFHAGQIEDELNLNDINGCSSGCCLNESKFPLDNCHASKALIQPGHVPEMANKFPDLTVEDLETDALKADMNVHLLPMEELTSPLKDPPMSPDPESPSPQPSCQTEISDFSTDRIDFFSALEKFVELSQETRSRSFSHSRMEELGGGRNESCRLSVVEVAPSKVTADDQRSSSLSNTPHASEESSMDEEQSKAISELVSPDIFMQSHSENAISVKEIVTEIESISQGVGQIQLKGDILPNPCHTPKKNSIHELLLERAQTPENKPGHMEQDEDSCTAQPELAKDSGMCNPEGCLTTHSSIADLEEGEPAEGEQELQGSGMHPGAKWYPGSVRRATLEFEERLRQEQEHHGAAPTCTSLSTRKNSKNDSSVADLAPKGKSDEAPPEHSFVLKEPEMSKGKGKYSGSEAGSLSHSEQNATVPAPRVLEFDHLPDPQEGPGSDTGTQQEGVLKDLRTVIPYQESETQAVPLPLPKRVEIIEYTHIVTSPNHTGPGSEIATSEKSGEQGLRKVNMEKSVTVLCTLDENLNRTLDPNQVSLHPQVLPLPHSSSPEHNRPTDHPTSILSSPEDRGSSLSTALETAAPFVSHTTHLLSASLDYLHPQTMVHLEGFTEQSSTTDEPSAEQVSWEESQESPLSSGSEVPYKDSQLSSADLSLISKLGDNTGELQEKMDPLPVACRLPHSSSSENIKSLSHSPGVVKERAKEIESRVVFQAGLTKPSQMRRSASLAKLGYLDLCKDCLPEREPASCESPHLKLLQPFLRTDSGMHAMEDQESLENPGAPHNPEPTKSFVEQLTTTECIVQSKPVERPLVQYAKEFGSSQQYLLPRAGLELTSSEGGLPVLQTQGLQCACPAPGLAVAPRQQHGRTHPLRRLKKANDKKRTTNPFYNTM

SEQ ID NO: 228476 - protein, 449 aa, Artificial Sequence
  derived and/or modified sequence
MALVTVQRSPTPSTTSSPCASEADSGEEECRSQPRSISESFLTVKGAALFLPRGNGSSTPRISHRRNKHAGDLQQHLQAMFILLRPEDNIRLAVRLESTYQNRTRYMVVVSTNGRQDTEESIVLGMDFSSNDSSTCTMGLVLPLWSDTLIHLDGDGGFSVSTDNRVHIFKPVSVQAMWSALQSLHKACEVARAHNYYPGSLFLTWVSYYESHINSDQSSVNEWNAMQDVQSHRPDSPALFTDIPTERERTERLIKTKLREIMMQKDLENITSKEIRTELEMQMVCNLREFKEFIDNEMIVILGQMDSPTQIFEHVFLGSEWNASNLEDLQNRGVRYILNVTREIDNFFPGVFEYHNIRVYDEEATDLLAYWNDTYKFISKAKKHGSKCLVHCKMGVSRSASTVIAYAMKEYGWNLDRAYDYVKERRTVTKPNPSFMRQLEEYQGILLAR

SEQ ID NO: 228477 - DNA, 4272 bp, Artificial Sequence
  derived and/or modified sequence
atggctttagttaccgtacagagatcccccacaccttctactaccagttccccatgtgcgtctgaagccgactccggcgaggaagagtgcaggtcacagccacgaagcatttctgagtctttcctgacagtgaagggtgccgcactgttcctgcccaggggcaacggctctagtactcccagaataagtcaccgacgcaataagcacgccggtgacctgcagcaacatttacaagcaatgttcattttgctgagacctgaagataatattagactggccgtgcggcttgagagtacctaccaaaacagaaccagatacatggtcgtagtcagcaccaacggaagacaggataccgaggagagcattgtgctcgggatggacttttcttcaaatgatagtagtacatgcacgatggggctcgtactccccttatggtctgatactctcattcatctggatggagacggcggcttctctgtgtccacagataatcgcgtacatattttcaaacctgtctccgtgcaggctatgtggagtgccctgcagtcgctgcataaggcttgcgaggtggcacgagcccataattattatcctggctctctgttcctaacatgggtgagttattacgagagccacattaactctgaccagagctctgtgaacgagtggaacgcaatgcaagacgtgcagagtcaccgacccgatagccctgcccttttcactgatatccccacagagcgcgaacgaacggaaaggcttattaagacaaagcttagggaaatcatgatgcagaaagatcttgagaacataacttcaaaggagataaggaccgaactggaaatgcaaatggtttgcaatctgagggaatttaaggaatttattgacaatgagatgatagtaatactgggtcagatggacagcccgactcagatctttgaacacgtgttcttggggtcggagtggaacgcctcaaacctggaggacctccagaacagaggcgtgcgatacatccttaatgttactcgtgaaattgataattttttcccaggtgttttcgagtatcataacattcgcgtgtacgatgaggaagcaactgacctgttagcctattggaacgatacttataaatttatttcaaaggccaaaaaacacggctcaaagtgtctcgttcactgtaagatgggagtcagcaggtcagctagtacagtgatcgcttacgccatgaaagagtacggctggaatcttgatcgggcttacgactatgttaaagaacgtcggacggtaaccaagccaaatccatccttcatgcggcagcttgaagagtaccagggcattctgttggcctctaaacaaagacacaacaagctctggagatctcattctgatagtgacttgagcgaccaccacgagcccatctgtaaaccgggattggagctaaacaaaaaagacattactacttctgctgatcaaattgcggaggtcaagactatggagtctcatccacctatccccccggttttcgtggaacacatggttccacaagatgccaatcagaaaggcctgtgtactaaggagcggatgatctgcctggaatttacgtctcgcgagtttcacgcaggacagatagaggatgaactgaacctgaatgatatcaacggatgcagcagcggctgctgcctgaacgagagtaaattccctctagataactgtcacgcctcaaaagccctgattcagccaggtcacgtgccggagatggctaataagtttcccgacttgacagtcgaggatttggaaacagacgccttaaaggcagatatgaacgtgcatctgctgccgatggaagagctcaccagtccattgaaggacccacccatgagccccgacccagagtcgccctccccgcaaccatcctgccaaactgagatttccgacttctctacagaccgcatcgactttttttctgcgttggagaagttcgttgagctatcccaggagacccgctctcggtcctttagccacagccgcatggaagaacttggtggaggccgcaacgagagctgtcggctctcagtggtggaagtggcaccaagtaaggtcactgctgacgatcaacggtcatcctctttgagcaataccccacacgctagcgaagagtctagcatggacgaagagcaatccaaagccatctcagagctggtctcccctgatatttttatgcagtcccatagcgagaacgcaatctccgtcaaagaaatcgtgacagagatcgaaagtatcagccaaggagttgggcaaatacagctgaagggcgacattctacccaatccctgccacaccccaaagaagaactcaattcacgagcttctgctagaacgggcccagacccccgaaaacaagcctgggcacatggagcaagacgaggattcttgtaccgctcagcccgagctggcaaaggattctggcatgtgtaatcctgaagggtgtcttaccacccatagctctatcgccgacctcgaggagggagaacctgctgagggagagcaagaactccagggctcaggaatgcatccaggagcgaagtggtaccccgggagtgtgcgccgggccactctggagttcgaagaaagactacgtcaagagcaggaacaccacggagctgcaccgacctgcacaagtctgtcaactcgcaaaaactcaaagaatgattcaagtgtagcagatctggcccccaagggtaaatctgacgaagcacctccagaacacagttttgtgctaaaagaacccgagatgtctaaaggtaaaggcaaatatagcggcagcgaagctggttctctcagtcacagcgagcaaaacgcaaccgtgcctgcaccccgcgtactggagtttgatcacctccccgatccacaggagggtccggggtctgataccgggacacaacaggaaggagtgctcaaggacctcagaacagtgattccataccaggagtcggagacccaggccgtgccgctccccctgcccaaaagggttgagataattgagtatacccatatcgtaacatcacccaaccacacgggtcctggcagtgagatcgcgaccagtgagaagagtggagagcaagggttacgaaaagttaatatggaaaaaagtgtgactgtgttatgcactttagacgagaacctgaaccggaccctggatcccaaccaggttagtttacatccacaggttctcccactcccacatagtagttcccccgagcataacaggcctacagatcatcctacctccatcctatccagcccagaagaccggggctcctctctgtccactgcactcgagacggccgctcccttcgtgtcacatactactcatttattgtcagcctctctggactatctgcaccctcagacgatggttcacctggaaggcttcacagaacagtcaagtacaacagacgagccctccgcggaacaggtgagttgggaagaatcccaggaatcacctctcagctcaggctcagaggtgccttataaagatagccagctgagcagcgctgatctcagccttatttccaagctgggggataacactggagagttacaggagaaaatggatcctctccctgttgcttgtagacttcctcactcctcttcatccgaaaacatcaagtctctgtcacatagccctggggtggtcaaggaacgcgccaaggagatcgagtctcgcgtggtctttcaggccggtctgaccaaaccctcacagatgagacgctcagcgtcccttgcaaagctgggataccttgacctgtgtaaggactgccttcctgagagggagccagcatcctgcgaaagccctcacctaaaactcctgcagccattcctccggactgactctggtatgcacgccatggaagatcaagagtccctggagaatccgggggccccccacaaccccgagccaaccaagagctttgtggaacagctaacgaccacagagtgcatcgttcagtcgaagcccgttgagcggcctctcgtgcaatatgccaaagaatttggatcctcacagcagtatttactcccaagggcgggattggaactcacaagctccgaagggggattacctgtactgcagacacagggcttacagtgcgcttgtcctgctcccggactcgccgtggcaccaagacaacagcacggtaggactcacccgctgcggagacttaagaaggcgaatgataagaaacggaccacaaatccattttacaacactatgtag

SEQ ID NO: 228478 - DNA, 1350 bp, Artificial Sequence
  derived and/or modified sequence
atggccctggtcacagtgcagcgatctccgaccccaagcaccacgtcatctccttgcgcctccgaggccgattcaggcgaagaggaatgtcggtcacagcctcggagcataagcgaatctttcttgacagtaaagggcgcagctttgttcctgcctagagggaacggctcttccacacccaggattagtcatcgaaggaacaagcacgcgggcgaccttcagcaacatttgcaggccatgttcatccttcttaggccggaggacaatattcgtttggctgtgaggcttgagagcacctaccagaaccgcactaggtatatggtggttgtgtctacaaatgggcggcaggacaccgaagagtcaatcgtgctcggtatggactttagttcaaatgattcctcgacctgcactatgggcttggttctgcccttatggtccgataccctgatccaccttgatggggacggggggttcagcgtgagcaccgataaccgggtgcatatcttcaagccagtgagcgttcaagcaatgtggtccgctctgcagtcactgcacaaggcttgtgaggtcgcccgggcccacaattattaccccgggagtctgtttcttacatgggtgtcctattacgagtcccacattaactcggaccaatcttcagttaacgagtggaatgcaatgcaggatgtgcagagccatcgacctgattctccagcgctgttcaccgatattcccaccgaaagagaacgaacggaaaggctcatcaaaacaaagttgcgtgaaattatgatgcagaaggacctggaaaatatcacgagcaaagaaattaggaccgagctggaaatgcagatggtttgtaatcttcgggaattcaaggagttcattgataacgaaatgatagttatcttaggtcagatggactctcctacacagattttcgagcacgtgtttcttggttccgagtggaacgcttccaatctggaggatctccagaacaggggagtgagatacatcctgaacgtgacacgtgaaatcgacaatttctttcctggagtttttgagtatcacaacatcagggtctacgacgaggaagccaccgatttgttggcctactggaacgatacatataaattcatttccaaagcgaaaaaacacggatccaaatgcctggtacactgcaaaatgggcgtgagccggagcgcgtcaacagtcatcgcttatgctatgaaggagtacgggtggaatctagaccgcgcctacgactacgtgaaggagcggagaaccgtgaccaagccaaatccaagctttatgagacagctggaagagtatcaggggatcctgctggcccgttag

SEQ ID NO: 228479 - DNA, 4272 bp, Artificial Sequence
  derived and/or modified sequence
atggccctggtgacagtgcagaggagccccacccccagcaccaccagcagcccctgtgccagcgaggccgacagcggggaggaggagtgccgcagccagcccaggagcatcagcgagagcttcctgactgtgaagggagctgccctcttcctgcccagaggaaatggcagcagcaccccccgcatcagccacagaagaaacaagcacgccggggacctgcagcagcacctgcaggccatgttcatcctgctgcggcctgaggacaacatccggctggccgtgcggctggagagcacctaccagaacagaacccgctacatggtggtggtgtccaccaacggccggcaggacacagaggagagcatcgtgctgggcatggacttcagcagcaatgacagcagcacctgcaccatgggcctggtgctgcccctgtggagcgacaccctcatccacctggatggagatggcggcttctctgtgtccacagacaacagagtgcacatcttcaagcctgtgtctgtgcaggccatgtggagcgccctgcagagcctgcacaaggcctgtgaggtggcccgggcccacaactactacccaggcagcctcttcctgacctgggtgtcctactatgagagccacatcaacagcgaccagagctctgtgaatgagtggaatgccatgcaggatgtgcagagccacaggccagacagccctgccctcttcacagacatccccacagagcgggagaggacagagcggctcatcaagaccaagctgcgggagatcatgatgcagaaggacctggagaacatcaccagcaaggagatcagaacagagctggagatgcagatggtgtgcaacctgcgggagttcaaggagttcatcgacaatgagatgatcgtcatcctgggccagatggacagccccacccagatctttgagcacgtgttcctgggcagcgagtggaatgccagcaacctggaggacctgcagaacagaggagtgcgctacatcctgaatgtgacccgggagattgacaacttcttccctggggtgtttgagtaccacaacatccgggtgtatgatgaggaggccacagacctgctggcctactggaatgacacctacaagttcatcagcaaggccaagaagcacggcagcaagtgcctggtgcactgcaagatgggcgtgagccgcagcgccagcaccgtcatcgcctatgccatgaaggagtatggctggaacctggaccgggcctatgactatgtgaaggagaggagaacagtgaccaagcccaaccccagcttcatgaggcagctggaggagtaccagggcatcctgctggccagcaagcagaggcacaacaagctgtggaggagccacagcgacagcgacctgagtgaccaccacgagcccatctgcaagccaggcctggagctgaacaagaaggacatcaccaccagcgctgaccagattgctgaggtgaagaccatggagagccacccccccatcccccctgtgtttgtggagcacatggtgccccaggatgccaaccagaagggcctgtgcaccaaggagaggatgatctgcctggagttcaccagccgggagttccacgccggccagattgaagatgagctgaacctgaatgacatcaatggctgcagcagcggctgctgcctgaatgaaagcaagttccccctggacaactgccacgccagcaaggccctgatccagcccggccacgtgcctgagatggccaacaagttcccagacctgactgtggaggacctggagacagatgccctgaaggctgacatgaatgtgcacctgctgcccatggaggagctgaccagccccctgaaggacccccccatgagcccagaccctgagagccccagcccccagcccagctgccagacagagatcagtgacttcagcacagacagaattgacttcttcagcgccctggagaagtttgtggagctgagccaggagaccaggagccgctccttcagccacagcaggatggaggagctgggcggcggcagaaatgaaagctgccgcctgtctgtggtggaggtggcccccagcaaggtgacagcagatgaccagaggagcagcagcctgagcaacaccccccacgccagcgaggagagctccatggatgaggagcagagcaaggccatcagcgagctggtgtccccagacatcttcatgcagagccacagtgaaaatgccatctctgtgaaggagatcgtgacagaaattgagagcatcagccagggcgtgggccagatccagctgaagggggacatcctgcccaacccctgccacacccccaagaagaacagcatccacgagctgctgctggagcgggcccagaccccagagaacaagccaggccacatggagcaggatgaggacagctgcacagcccagcctgagctggccaaggacagcggcatgtgcaaccctgagggctgcctgaccacccacagcagcattgctgacctggaggagggggagcctgctgagggggagcaggagctgcagggcagcggcatgcaccctggggccaagtggtacccaggctctgtgagaagagccaccctggagtttgaggagcggctgcggcaggagcaggagcaccacggggccgcccccacctgcaccagcctgagcaccaggaagaacagcaagaatgacagctctgtggccgacctggcccccaagggcaagagtgatgaggcccctcctgagcacagctttgtgctgaaggagcctgagatgagcaagggcaagggcaagtacagcggcagcgaggccggcagcctgagccacagcgagcagaatgccaccgtgcctgccccccgggtgctggagtttgaccacctgcctgacccccaggagggccctggcagtgacaccggcacccagcaggagggcgtgctgaaggacctgaggacagtcatcccctaccaggagagcgagacccaggccgtgcccctgcccctgcccaagagggtggagatcatcgagtacacccacatcgtgaccagccccaaccacacaggccctggcagcgagatcgccaccagcgagaagagcggggagcagggcctgaggaaggtgaacatggagaagtctgtgacagtgctgtgcaccctggatgagaacctgaacagaaccctggaccccaaccaggtgtccctgcacccccaggtgctgcccctgccccacagcagcagccctgagcacaaccggcccacagaccaccccaccagcatcctgagcagcccagaagatcggggcagcagcctgagcacagccctggagacagctgccccctttgtgagccacaccacccacctgctgagcgccagcctggactacctgcacccccagaccatggtgcacctggagggcttcacagagcagagcagcaccacagatgagcccagcgctgagcaggtgtcctgggaggagagccaggagagccccctgagcagcggcagcgaggtgccctacaaggacagccagctgagcagcgctgacctgagcctcatcagcaagctgggggacaacacaggagagctgcaggagaagatggaccccctgcctgtggcctgccgcctgccccacagcagcagcagcgagaacatcaagagcctgagccacagccctggggtggtgaaggagcgggccaaggagattgagagccgggtggtgttccaggccggcctgaccaagcccagccagatgagaagaagtgccagcctggccaagctgggctacctggacctgtgcaaggactgcctgcctgagcgggagcccgccagctgtgagagcccccacctgaagctgctgcagcccttcctgaggacagattctggcatgcacgccatggaggaccaggagagcctggagaaccctggggccccccacaaccctgagcccaccaagagctttgtggagcagctgaccaccacagaatgtattgtgcagagcaagcctgtggagcggcccctggtgcagtatgccaaggagtttggcagcagccagcagtacctgctgcccagggctggcctggagctgaccagcagcgagggcggcctgcctgtgctgcagacccagggcctgcagtgtgcctgcccagcccctggcctggccgtggccccccggcagcagcacggccgcacccaccccctgcggcggctgaagaaggccaatgacaagaagaggaccaccaaccccttctacaacaccatgtag

SEQ ID NO: 228480 - DNA, 1350 bp, Artificial Sequence
  derived and/or modified sequence
atggccctggtgacagtgcagaggagccccacccccagcaccaccagcagcccctgtgccagcgaggccgacagcggggaggaggagtgccgcagccagcccaggagcatcagcgagagcttcctgactgtgaagggagctgccctcttcctgcccagaggaaatggcagcagcaccccccgcatcagccacagaagaaacaagcacgccggggacctgcagcagcacctgcaggccatgttcatcctgctgcggcctgaggacaacatccggctggccgtgcggctggagagcacctaccagaacagaacccgctacatggtggtggtgtccaccaacggccggcaggacacagaggagagcatcgtgctgggcatggacttcagcagcaatgacagcagcacctgcaccatgggcctggtgctgcccctgtggagcgacaccctcatccacctggatggagatggcggcttctctgtgtccacagacaacagagtgcacatcttcaagcctgtgtctgtgcaggccatgtggagcgccctgcagagcctgcacaaggcctgtgaggtggcccgggcccacaactactacccaggcagcctcttcctgacctgggtgtcctactatgagagccacatcaacagcgaccagagctctgtgaatgagtggaatgccatgcaggatgtgcagagccacaggccagacagccctgccctcttcacagacatccccacagagcgggagaggacagagcggctcatcaagaccaagctgcgggagatcatgatgcagaaggacctggagaacatcaccagcaaggagatcagaacagagctggagatgcagatggtgtgcaacctgcgggagttcaaggagttcatcgacaatgagatgatcgtcatcctgggccagatggacagccccacccagatctttgagcacgtgttcctgggcagcgagtggaatgccagcaacctggaggacctgcagaacagaggagtgcgctacatcctgaatgtgacccgggagattgacaacttcttccctggggtgtttgagtaccacaacatccgggtgtatgatgaggaggccacagacctgctggcctactggaatgacacctacaagttcatcagcaaggccaagaagcacggcagcaagtgcctggtgcactgcaagatgggcgtgagccgcagcgccagcaccgtcatcgcctatgccatgaaggagtatggctggaacctggaccgggcctatgactatgtgaaggagaggagaacagtgaccaagcccaaccccagcttcatgaggcagctggaggagtaccagggcatcctgctggccaggtag

SEQ ID NO: 228481 - DNA, 4272 bp, Artificial Sequence
  derived and/or modified sequence
atggccctggtgaccgtgcagcggagccccacccccagcaccaccagcagtccgtgcgcaagcgaagccgattctggggaggaagagtgccgtagccagccccgcagtatcagcgagagtttccttacggtgaagggagccgccctgttcctgcccaggggaaatggctcctccacaccccgtatttcacaccggagaaacaaacacgcaggggatttacagcagcacctgcaagcaatgttcatcctcctccgaccagaggataatattaggctggctgtgaggctcgagagtacctaccagaaccgtacaaggtatatggtcgtggtatcgacaaatgggagacaggataccgaagagtctatcgttctcgggatggatttctcctctaacgactcttctacctgcacgatggggctcgtgctaccactctggtccgatactctgatccatctcgatggcgacgggggtttctccgtgtccaccgataatagagtgcatatatttaagcctgtctcggtacaggctatgtggtccgctctgcaatctctgcacaaggcttgtgaggtggctagggcacacaattactaccctgggagcctgttcttgacatgggtcagctattacgaatctcacattaactccgatcagtcttccgtgaacgagtggaacgccatgcaggatgtacagtcccatcgtcccgactcccccgcactatttacagatattcccaccgaaagagagcggacagagcgtctcatcaagaccaaactacgcgagatcatgatgcagaaagatcttgagaatatcacctccaaagagatcagaacagagctggagatgcagatggtatgcaatcttagagaatttaaggagtttatcgataatgagatgatcgtgatcttgggccagatggacagccccactcagattttcgagcatgtcttcctgggctcagagtggaacgcatccaatctggaagatctgcagaatagaggggtcaggtatatcctcaacgtcacacgtgagattgataatttctttccaggagtgttcgagtaccataacatccgagtgtacgatgaagaggcgacagacctactggcctattggaacgacacctacaaatttattagtaaagccaagaaacacggctccaagtgcctcgtgcactgtaagatgggtgtatcaaggagtgcaagtaccgtgatcgcctacgccatgaaagaatacggctggaacctggaccgggcctacgattacgtgaaagaacgccgtaccgtcactaaacccaatcctagctttatgcggcagctcgaagaataccagggcatcttgttggcctctaagcaaaggcacaataaactatggaggtcccattctgactccgacctgagtgaccaccacgaaccaatctgtaagccaggcttggagttgaacaaaaaggacatcacgacgtccgcagatcagattgccgaggtgaagactatggagtcccaccccccaatcccccctgtttttgtggagcacatggtgccccaagacgccaatcagaaggggctgtgcaccaaagagcgaatgatctgtctagagttcactagtagagagttccacgcaggccagatcgaagacgagttgaatctcaatgacatcaacgggtgttcaagcggatgctgtctgaacgaatctaagtttcctctcgacaattgtcatgcatcaaaggctctcatccagcctggccacgtacctgagatggctaataagttcccagatttaacggttgaggacctcgagaccgacgctctgaaagcagacatgaacgttcatctgcttccgatggaagagctcaccagcccactgaaggatccgcctatgagccctgatcctgagagtccttctcctcaaccaagttgtcaaaccgagatttctgactttagtaccgaccggatcgattttttttccgccttggagaaattcgttgagttgagtcaggagacgcggtcccgcagttttagccattctcgcatggaagaactcgggggagggcgcaacgagagttgtcggctttcagtggtagaggtggctccctctaaagtgactgctgatgaccaacgaagcagttctttatccaatacaccacacgcgtcggaggagagttcaatggacgaagagcagagtaaagcaatttctgaactggtatcaccagacatcttcatgcagtcccacagtgagaacgcaatcagcgtcaaagaaatagttaccgagatagagtcaatatctcagggggtgggacagatccagcttaaaggagacattttacctaatccatgtcacacaccaaaaaagaattcaatccatgagctgctcctcgaacgggcccagacgcctgaaaataagcccggccatatggagcaggacgaggacagctgcacggcacagcctgagcttgcaaaagacagtggaatgtgtaatcctgagggatgtcttacaacacattcctctatcgccgacctagaagagggtgagccagccgagggcgaacaagagttgcagggaagcggtatgcaccctggcgccaagtggtacccaggaagcgtgcggcgggccaccttagagttcgaagagcggctcaggcaggagcaagagcaccacggggccgcacccacctgtacatctcttagtacccggaaaaacagcaaaaatgactctagcgtcgccgacctggctccaaaagggaagagcgatgaggccccaccagagcatagctttgtgttgaaggaaccagaaatgtcgaaaggcaagggcaaatactcaggctccgaggctggtagcctgagtcacagcgagcagaacgcaactgtcccagcccctcgcgtcttagaatttgatcacctgccggatcctcaggagggccccgggtcagacactgggactcaacaggaaggggttttaaaggatctgaggaccgtgattccatatcaggaaagcgagactcaggctgtgccgcttccactgccaaagagggtggaaattattgagtacacccacattgtgacgtcccccaaccacaccggcccaggctcagagatcgcaactagcgagaagagtggagaacaggggctacgcaaggtgaatatggaaaagagtgtgactgtcctctgcaccttggatgaaaacctgaacagaacactggatcctaatcaggtgagtctgcacccacaggttctgcccctcccccacagttctagccccgagcataataggccaactgatcaccccacgtccatcctgtcatctccggaagatcgggggtcaagtctcagcaccgctctggagacggccgcgcccttcgtgtcacatactacacatctcctgtctgcgagtcttgattacctgcatccacagactatggttcacctcgagggattcaccgaacagtcttccaccacagacgaaccctcggccgaacaagtgtcatgggaagagtcccaggagtctcctcttagcagcggtagtgaggttccttataaagactcacagctgagcagtgcagacctgagtttaatttcaaaactcggggacaatacaggagagttacaggagaagatggacccactgccagttgcctgtcggcttccacactccagttcttctgaaaacatcaaatccctgagccattccccaggggttgtgaaggagagggccaaagaaattgagagtcgcgtggtgtttcaagccgggctcactaaacccagccagatgagaagatcagcttcactcgccaaactgggatacctggacttatgcaaagactgccttcccgagcgcgagcctgcttcttgcgagtccccgcaccttaaactcctgcagccattcttgagaacagattcgggcatgcatgcaatggaggatcaggagtcactcgagaatcccggagctccacataatcctgagccaaccaaatccttcgtggaacagctgacaactacagagtgcattgtgcagagcaagcctgtcgaaaggcctttggtgcaatacgcgaaagagtttgggtcttcacaacaatatctccttccccgggctggcctggagttaacttcctctgaaggggggttgcccgttctacagacccagggcctgcaatgtgcctgcccggctcccggtctggcagttgcgccgcgccagcagcacggcaggacccaccccctgcgccgcctcaagaaagccaatgacaagaagaggactactaacccattctacaacacgatgtag

SEQ ID NO: 228482 - DNA, 1350 bp, Artificial Sequence
  derived and/or modified sequence
atggccctggtgaccgtgcagcggagccccacccccagcaccaccagtagcccatgtgccagcgaggccgacagtggtgaagaggaatgtcggagtcaaccccgtagcatcagtgaaagtttcctcaccgtgaagggcgctgcgctcttcttgcctcgaggaaacggatcctctaccccacggatctcgcaccgccgtaataaacacgcgggtgatctccaacaacacctccaggccatgttcatcctcctgaggcctgaagacaatatcagactggctgtcaggctcgagagtacctatcaaaataggacaaggtatatggtagtagtctctacaaacggccgccaggatacggaagagtccatcgtgttaggcatggatttttcgagcaatgattctagcacctgtaccatgggcctggttttgcccttatggagtgacacactgattcatctagacggtgatgggggattctccgtatccacagataaccgcgtgcacattttcaagccggtgtccgtacaagcgatgtggagcgccttacagagcctccacaaggcttgtgaggtggctagagcacacaattactatcccgggtccctttttctcacctgggtgagttattatgagtcacacatcaactctgatcagtcgagcgtcaacgaatggaacgcaatgcaggacgtgcagagccataggcccgattccccagccctcttcacagacatccccaccgaacgggagcgcactgagaggctgattaaaacaaagctgcgggaaattatgatgcagaaagaccttgaaaacattacatccaaggaaattcgcaccgagctcgaaatgcagatggtatgcaacctgcgggagtttaaggagttcattgacaacgagatgatcgtgattctggggcaaatggatagtcccacgcagatctttgagcacgttttcctgggttctgagtggaatgcatcaaacctggaggacctgcaaaacagaggtgtgcgatacatcctaaacgtcactcgcgaaatagacaacttttttcctggtgtcttcgagtatcataacatccgcgtgtatgatgaagaggcgacagatctcctggcatactggaatgatacctacaaatttatttccaaagccaaaaaacatggctctaaatgcctcgtccactgtaagatgggtgttagcaggtcagcaagtaccgttatcgcctatgccatgaaggagtatgggtggaatctggatcgggcttatgactatgtaaaagagaggcggacggtgaccaagcccaacccgagttttatgcggcagctggaggagtatcagggaatcctacttgcccgctag

SEQ ID NO: 228483 - DNA, 4272 bp, Artificial Sequence
  derived and/or modified sequence
atggcactggtgacggtccaaaggtccccaaccccaagtacgacgagttcaccttgcgcttccgaggccgattctggcgaagaagaatgcagaagccagcctagaagtatcagtgagtcttttctcaccgtgaaaggcgctgcactgttccttccacgaggcaatggctccagtacccctcgcatttcacacaggaggaacaaacacgccggagatttgcagcagcatctccaggccatgttcattctgttaaggccagaggacaatattcgtctggccgtgcgtctggaaagcacataccaaaacagaacaaggtacatggtggtggtgtcgaccaatggcaggcaggataccgaagagtcgatagtcttaggcatggattttagttccaacgatagcagcacctgcaccatgggccttgtgctgcccctctggtccgataccttgattcaccttgatggcgacgggggattctctgttagtacagacaacagggtgcacatatttaaaccagtgtccgtgcaagccatgtggtctgctctgcaaagtctacacaaagcctgcgaggtggctcgcgcacataattattatcccggaagtctctttcttacgtgggtctcgtattacgaatcgcatattaacagcgatcagtcgtcggtaaatgagtggaatgccatgcaggacgttcaatcacaccggcctgactctcccgcactgtttactgatatacccacggaacgcgaacggaccgaacgcctcatcaagactaaactccgagaaatcatgatgcaaaaggacttggaaaacatcacctcaaaggaaatcaggactgagcttgagatgcagatggtatgcaacttgcgggagttcaaagagttcattgataacgagatgatcgtaatcctgggtcagatggactctcccactcaaatcttcgaacatgtttttcttggttcagagtggaatgcaagcaatcttgaagatctgcagaaccgaggcgtgcgctacatcttgaacgttacccgcgaaattgacaacttcttccctggagtgttcgaatatcataatattagggtctacgacgaggaggctaccgatcttcttgcgtactggaacgacacctacaagttcatctccaaggctaaaaagcatgggtcaaagtgcttagtacactgtaaaatgggcgtctctcggtccgcttcgactgtgattgcctacgccatgaaggaatatggatggaatcttgaccgtgcctacgattatgttaaggaaaggaggaccgtgaccaagcctaatccatccttcatgcggcagctcgaagaataccagggcatactcctagcttccaagcagagacacaacaagctgtggcgatcccactccgattccgacttgtcagatcatcacgagcccatttgtaagcccggacttgagctgaacaaaaaggatatcaccacctccgctgaccaaattgctgaagtcaaaaccatggaatcacaccctcccatcccgccagtgtttgtggagcatatggtccctcaggacgccaatcaaaaaggtctttgtacaaaggagaggatgatttgcctggaattcacgagtcgcgaattccatgccggacagatcgaggatgagttgaatcttaatgatatcaacggttgttcaagcggctgctgtctgaatgaatctaaatttccactcgacaactgtcatgcatcaaaagcgctgatccagcctggacatgtcccggagatggcaaacaaatttcctgatcttaccgtggaagacctggagactgacgcactcaaagcggatatgaacgtgcacctgctgccaatggaggagctgacttcccctctgaaggatcccccaatgtccccggaccccgaatctccaagcccgcagccctcctgccagaccgagatctctgacttttctaccgataggatcgactttttcagtgccctggaaaaatttgtcgagctgagccaagaaaccaggagccgctcattcagccactctcgaatggaggagcttggcggtgggcgtaatgaaagctgcaggttgtccgttgttgaggtggcacccagtaaggtgaccgcagatgaccagcggagcagctccctaagcaacaccccccacgcgagcgaagagtcttctatggacgaagaacagtcaaaggctataagcgagttggtctcaccggacatcttcatgcagagccactcagaaaacgctattagtgtaaaggaaatcgtaacagagattgagagcattagccagggtgtggggcaaatccaactgaaaggcgacattctgcccaacccgtgccatacaccgaaaaagaactctatccatgagctcctactagaacgcgcacagacaccggaaaataagcccggtcatatggagcaagacgaggactcctgtaccgcacagccagaattggcaaaagactccggtatgtgtaaccctgaagggtgcctcacgactcacagctcaattgctgatcttgaagaaggagaaccggcagagggagagcaagagttacagggttcagggatgcaccctggcgcaaaatggtatccaggcagcgtaaggcgtgcaaccctggagtttgaggaacgtcttcgtcaggaacaggagcatcacggggcagcaccgacttgcacaagcctttcaacgcgaaaaaatagcaaaaacgattcatctgtcgctgacttagctccaaaaggcaagtccgatgaggcacccccagaacatagcttcgtgcttaaggagccggaaatgtctaaaggaaaaggcaaatatagtggatccgaggccggttccctgagccactctgagcagaacgccaccgtgccggctccacgtgtcctcgagtttgatcacctacccgacccacaagaagggccaggttcggatacggggacccagcaagaaggcgttctgaaggacctgaggaccgtgatcccctaccaggaatctgagacccaagctgtcccactgccactacccaagagggtggaaatcatcgagtatacacacatcgtaacctccccgaatcatacaggcccaggctccgaaatagccacaagcgaaaagtctggagaacagggattaaggaaggtgaatatggagaagagcgtcaccgtattatgcaccttggacgaaaatctcaacaggacattggaccctaaccaggtttctctccaccctcaggtcctccccttgcctcacagtagtagtcctgagcacaatcggcctactgaccaccctactagtatcctgagctccccagaagaccgcggatcttccctgtctacagctcttgagactgctgccccatttgttagccacactacccacttgctgtcggcaagcttggactaccttcaccctcagactatggttcatcttgagggcttcactgagcagtccagtaccactgacgagccctccgcagagcaagtgtcctgggaagaaagtcaggaatccccccttagttccgggtccgaggtcccctataaagattcacagctgagctccgccgatctgagtcttatctccaagctcggcgataatacaggagagctccaggagaaaatggatcctctgcccgtggcctgcaggcttccccatagttctagtagcgaaaatatcaagtctttgagtcacagcccaggagttgtgaaggaacgagcaaaagagatcgagtcacgcgttgtgtttcaggctgggctgacgaagccatctcaaatgaggagaagcgcctctctggccaagctaggatatctcgatctgtgtaaggactgtctccctgaaagagagccagccagttgtgagagcccgcacctcaagctccttcaaccgttcctgaggacggactcaggtatgcatgcaatggaggaccaggagtctctcgaaaatcctggcgctccacataatccagaacccacaaagtctttcgtggagcagttaacgaccacagaatgtatcgtgcagtcaaaacctgtggagcgcccacttgtgcaatatgctaaagaattcggcagctctcagcagtacctcctcccccgtgcgggactggaattgacatcgagtgaagggggactgcccgtgcttcagactcagggcctccagtgcgcctgtcctgccccaggcctcgcggtagctcctcgccagcagcatggcagaacccatccgctccgacggctgaagaaagctaacgacaaaaaacgcacgaccaaccccttttacaacaccatgtag

SEQ ID NO: 228484 - DNA, 1350 bp, Artificial Sequence
  derived and/or modified sequence
atggctttagtcaccgtgcagagatctcctaccccctcaacaacttccagcccatgtgccagcgaggccgactcaggtgaggaggaatgcaggtctcagccacggagcatcagtgagtctttcctaacagtgaaaggagcagcactgtttctgccacgcggaaatggcagttccacccctagaattagccaccggcgtaacaaacacgccggagaccttcagcagcatctccaggctatgtttatcttgttacggccagaggataacataagacttgccgtccgattggagtccacctaccagaaccggactcgctacatggttgtagttagtacaaatggtagacaggacacagaagagagcatcgtgttgggtatggatttcagctcaaacgactcctctacctgcacaatgggactggtcctgcctctctggtcggacactctcatccatctggatggagatggcggatttagcgtcagcaccgataaccgagtgcatatctttaagccagtttcagtccaggctatgtggtcagctttgcagagcctccacaaggcctgcgaggtggccagggcccacaactactatcctggatcccttttcttgacctgggtttcttattacgaaagccacataaatagcgaccagtcaagcgtcaacgaatggaacgcaatgcaggatgtacaatcacacagacccgactcgcccgcactgtttactgacattccaaccgaacgagaaaggacagagaggctaatcaaaactaagcttcgggaaattatgatgcagaaggacctggagaacatcaccagtaaagagattcggacagagcttgagatgcagatggtttgtaacctgagggaatttaaggaattcattgacaatgagatgatcgtgattctggggcagatggatagtccaacccagatcttcgagcacgtgtttttgggttcggagtggaacgcatctaatctagaagaccttcagaacagaggcgtgcgctacatactcaacgtgacgcgcgaaatcgataacttcttccctggcgtcttcgagtaccacaatatacgagtgtacgatgaggaagccacagatttactggcgtactggaatgatacatataaattcatcagcaaagctaagaaacacggtagcaaatgtctggtccattgtaagatgggtgtcagcaggagtgcaagcaccgtgattgcttacgccatgaaagaatacggctggaacctcgatagggcgtatgattatgtgaaggagcggagaactgtgacgaaaccaaatccatcgttcatgagacagctcgaggaataccagggcatcctgctggctagatag

SEQ ID NO: 228485 - DNA, 9327 bp, Artificial Sequence
  derived and/or modified sequence
gcggagtctgcggccgttcccgcggcctcctcctcctccccgttcccttcacccccaccccgcacccctttccccatcccggctccgtcaccctcccgtcccccacactcaggacaagaatgccctgcccggaacaacccagcagcgcctagatggctttggtcacggtccagcggtcacctacccccagcaccacctccagcccctgcgcctcggaggcagacagtggggaggaagaatgccggtcacagcccaggagcatcagcgagagctttctaactgtcaaaggtgctgccctttttctaccacggggaaatggctcatccacaccaagaatcagccacagacggaacaagcatgcaggcgatctccaacagcatctccaagcaatgttcattttactccgcccagaagacaacatcaggctggctgtaagactggaaagtacttaccagaatcgaacacgctatatggtagtggtttcaactaatggtagacaagacactgaagaaagcatcgtcctaggaatggatttctcctctaatgacagtagcacttgtaccatgggcttagttttgcctctctggagcgacacgctaattcatttggatggtgatggtgggttcagtgtatcgacggataacagagttcacatattcaaacctgtatctgtgcaggcaatgtggtctgcactacagagcttacacaaggcttgtgaagtcgccagagcgcataactactacccaggcagcctatttctcacttgggtgagttattatgagagccatatcaactcagatcaatcctcagtcaatgaatggaatgcaatgcaagatgtacagtcccaccggcccgactctccagctctcttcaccgacatacctactgaacgtgaacgaacagaaaggctaattaaaaccaaattaagggagatcatgatgcagaaggatttggagaatattacatccaaagagataagaacagagttggaaatgcaaatggtgtgcaacttgcgggaattcaaggaatttatagacaatgaaatgatagtgatccttggtcaaatggatagccctacacagatatttgagcatgtgttcctgggctcagaatggaatgcctccaacttagaggacttacagaaccgaggggtacggtatatcttgaatgtcactcgagagatagataacttcttcccaggagtctttgagtatcataacattcgggtatatgatgaagaggcaacggatctcctggcgtactggaatgacacttacaaattcatctctaaagcaaagaaacatggatctaaatgccttgtgcactgcaaaatgggggtgagtcgctcagcctccaccgtgattgcctatgcaatgaaggaatatggctggaatctggaccgagcctatgactatgtgaaagaaagacgaacggtaaccaagcccaacccaagcttcatgagacaactggaagagtatcaggggatcttgctggcaagcaaacagcggcataacaaactatggagatctcattcagatagtgacctctcagaccaccacgaacccatctgcaaacctgggctagaactcaacaagaaggatatcaccacctcagcagaccagattgctgaggtgaagaccatggagagtcacccacccatacctcctgtctttgtggaacatatggtcccacaagatgcaaatcagaaaggcctgtgtaccaaagaaagaatgatctgcttggagtttacttctagggaatttcatgctggacagattgaggatgaattaaacttaaatgacatcaatggatgctcatcagggtgttgtctgaatgaatcaaaatttcctcttgacaattgccatgcatccaaagccttaattcagcctggacatgtcccagaaatggccaacaagtttccagacttaacagtggaagatttggagacagatgcactgaaagcagacatgaatgtccacctactgcctatggaagaattgacatctccactgaaagacccccccatgtcccctgatcctgagtcaccaagcccccaacccagttgccagactgaaatctcagatttcagtacagatcgcattgacttttttagtgccctagagaagtttgtggagctctcccaagaaacccggtcacgatctttttcccattcaaggatggaggaactgggtggaggaaggaatgagagctgtcgactgtcagtggtagaagtagccccttccaaagtgacagctgatgaccagagaagcagctctttgagtaatactccccatgcatcagaagaatcttcaatggatgaggaacagtcaaaggcaatttcagaactggtcagcccagacatcttcatgcagtctcactcggaaaatgcaatttcagtcaaagaaattgtcactgaaattgagtccatcagtcaaggagttgggcagattcaactgaaaggagacatcttacccaacccatgccatacaccaaagaagaacagcatccatgagctgctccttgagagggcccagactccagagaacaaacctggacatatggagcaagatgaggactcctgcacagcccagcctgaactagccaaagactcagggatgtgcaacccagaaggctgcctaaccacacactcatctatagcagacttggaagaaggggaaccagctgagggggaacaagagctccagggctcagggatgcacccaggtgccaagtggtaccctgggtctgtgaggcgagccaccttggagttcgaagagcgcttacggcaggagcaagagcatcatggtgctgccccaacatgtacctcattgtccactcgtaagaattcaaagaatgattcttctgtggcagacctagcaccaaaagggaaaagtgatgaagcccccccagaacattcatttgtcctcaaggaaccagaaatgagcaaaggcaaagggaaatacagtgggtctgaggctggctcactgtcccattctgagcagaatgccactgttccagctcccagggtgctggagtttgaccacttgccagatcctcaggagggcccagggtcagatactggaacacagcaggaaggagtcctgaaggatctgaggactgtgattccataccaggagtctgaaacacaagcagtccctcttccccttcccaagagggtagaaatcattgaatatacccacatagttacatcacccaatcacactgggccagggagtgaaatagccaccagtgagaagagcggagagcaagggctgaggaaagtgaacatggaaaaatctgtcactgtgctctgcacactggatgaaaatctaaacaggactctggaccccaaccaggtttctctgcacccccaagtgctacctctgcctcattcttcctcccctgagcacaacagacccactgaccatccaacctccatcctgagtagccctgaagacagaggcagcagcctgtccacagccctggagacagcagcaccttttgtcagtcatacaacccatttactgtctgccagtttggattacctgcatccccagactatggttcacctggagggcttcacagagcagagcagcactacagatgagccctctgcagaacaggttagctgggaagaaagtcaggagagccctctctccagtggcagtgaggtgccatataaggactcccagctaagtagcgcagacctaagtttaattagcaaacttggtgacaacactggggagttacaggagaaaatggacccattgcctgtagcctgtcgactcccacatagctctagtagtgaaaacataaagagtctcagccacagccccggtgtggtgaaggagcgtgctaaagaaatcgagtctcgagtggttttccaggcagggctcaccaaaccatcccaaatgaggcgctcagcttctctcgccaaattaggttacttggacctctgtaaagactgcttaccagagagggagcctgcctcctgtgaatcccctcatctcaaactgcttcagcctttcctcagaacagactcaggcatgcacgcgatggaggaccaagagtccctagaaaacccaggtgccccccacaacccagagcccaccaagtcttttgtagaacaactcacaacaacagagtgtattgtgcagagcaagccagtggagaggccccttgtgcagtatgccaaagaatttggttctagtcagcagtatttgctccccagggcaggacttgaattgactagttctgaaggaggccttcccgtgctacagacccagggactgcagtgtgcatgcccagctccagggctggccgtggcaccccgtcagcaacacggcagaactcacccccttaggagactgaaaaaggcaaatgacaaaaaacggacaaccaaccccttctataataccatgtgattctgagcctacacatgtgactttctagaagaaatgtttgtaaaaggggcaggtgtaatatgtaaggaacatgcactttattggttaattttataatattttggtcattttactgtttctggtgcatgcagggtttgggtgtttttcagtgtgtatgtgtgtgtatatgtaaggggaaagagagattgatctggatggcaagaccgtttatcattttttatttaaaaaaatcaaacctcaaaaaagtcattttcagagaacacctttatcaaaggcaaattgctgtttttcagtcagctgccacctgcttctcattttgccctctgagaaaaggcatggtttcttaattgagggaaggaagcagattcggaggggtggagataaagctggggattggagatgttcccctgcctttgtgatgatggtttggtttccagacctgaggcatcgaatgggctaaaggtcagccagaagtcagagggctctcagccttcatccagccgcagccctttagagttcctgaaggaggcaggttccgctttgctttaaaagagggtcttccggtgttccagagtgtatcgttacagtaagacatgataatggccggctctgcaaatttatcatatagtttttttcccaagaaaattatttttgaaattaaaacaggaccccaaatgaaatccaagtggtcttctgtagaggaaagcatgataagaggaggaagacataaagttgggggtggagaggctgctgcccagaaactgctgggttggtgggatccacacagatgggcatcttggctctccctgccagaaaaatgtgctctgcagtgtcctcccaactgaaaacaacagtgacatgtttgaaaagcagcaatcgaaagtcagtgtgttcttgtaaaatgaatatgtatgtagggttttaacccttccattacttgaataattctttgggccttctgagtttaatggccatattttcttccagtttattttccttccccatgctgttgtccccatgctgcctatttttttaaatttcatagattatatttgaattgttacatatgtttaacatccattgaatgcaacgttttatttttggtattatcactgttaacacttttttttccttttcctggaaggtttgtcatttctctaaagtttgtacacagtatttatgtacataatattgtcactgtcttagtgtcttgttcatgttgtagggtaattttgatttattctttttaagaaggagtagagttgcaactggaaaacacagacaccagaaatgaaagtgttgggtgttgataggaatctgtacaatatgttgatggtggctgtagttgtttaaatggagacttccaatcaccagctcctgccaaattatgcattagtaactttttcctcagagacacccctaaaggctcccattaggtcacagcgtgactgaaagctgatttctctgtgagactgaaatcccagaacattgtttgccagtatctcaaccacagccaggaagtatatgtgagttgcccagagtggaagctcctagtagaggctgaaggccacaggggaggcctcagccaggggcaagtgcccacagtgactccatttaggatgctgtcgttttgctactgttgtggagatccttaacgcagcagcgcctgtcataaacaagcctcttgtagcttcttacagaaaacagatttagtctagcatgaaacacctctgcatctcattgaaactgaagaggcttgcagatttgctttcgttgatgtccacgttactgaggattgactgagtatagactggagacaggtttttggcttatcacagcactgaggaaaatacaaatgcacagactgtcagcatgatgtcagaggccagagtttggtgggggcagatggcagggcgacccaaaagatgcagaaaaggtagactggggccactgggtcttaagaggagctgtgaagttgtgtggaagccaaggctgggtctgacatccctgccaggaagcaggttggacagaaaccacttgctaaaagcgtctctatggtgcagtgattatgtgtaccctgtgctgttgctcagtagtctccttgaatgttcaagtatctcatccactcagttttgtgattcctggatatttgtgtgttgtaaagtgttttgttaggtggtatgaaccaatgtgaggaggcttgagacagggttatggatttccagagctcttccatgtagaataccctgccttcttgaagcagttccaccaccaatatgatggggaagggcaggaacttatggcagggtggggagagggtttgcctggaagttaagagagtggcatccacttgtggtaaccccttacgatgatgacatcccacacactaagaggtacaagcaggaccaaagttttggactgttccctcttctcccctccactgtgtttaatgttcactcactgcattaaataacaacaaagatgggacaaaacccactaatactgtggggaaaaaaaattttcaagagcagaggaaagtctttctgcctttttataattactttttttatcatttaatttacctgcctaaataaacatcttctacagaatatctgtcattcaaccatgccaaggagtttgtgccagccttttcagactcccagaattgggtgttcctgggttatttacatagctgagcagtgtccaggggaggtgcgcagtgaactgtcaaggactttccagactgtcttctcttcagacttttataatctccagtggcatctttcccttttcttttgttcatgacctgacctgaagcagcagatttgatagactggcaaagatgaataggaaaaactttgactcttgcccagtgcctgcctgcctctctctctctcctctctctctctctctttttaaaccaccatagactctcacttattttggaggagtgtatgtgcatgtgtacacatatgtacatatataaaaacagttgatgttttggtgtatggggtaaaagccccaggagcatacagaacttgagctgaacctggtcagtagaaagggaaaccccaaccctttcttgatttttggagacacccaggactaatggatactgtagtagacatgtagtactatagtaccgtaatattcatctctcctcattttagttgcctttcagattctaaatgtttgggatcattcctatcatcttagtctcttcaggatctttagtattttcctggttctgaggaggcttgagacagggttatggatttccttgttctgtgtctttatccctactgatagttcctctttctcattttgcaaactacccagagctccaaggacagcctgaagatctcagtgcctcaggctctgaggtactctgctcacaggccccagacagatgctgttgggtaaactcaaagcttcctatgagaagcttctgagatgtagcaggtcacagaagtgttcacctgtttcatctgaggatttcagttctgaagtgatctaggcatgtttggtaaaaatgtttttgtgagagttctttttttaagaaagcattatgcaaaaagtcacttttaagggcatttaaaaatttttaagtaaagccattctttggcttttttggactatttgtggatactttgtttacattttgaatattaaaatgtgcatcatcttgtcggccatgcagtcctgcaggcatcagtgccctggctgtcctgtgagtcctcatgcagagcagggccatcatggtcagcccttgtgagtaagtgggtatacgctgaagctgacttccgtctgtgtcctgccctcccatccagcactctctatggaaatagttgtcatttcctcagtgatggtgtgtcttatagtgatggttgtaatggtgaatggctagtgtcattttgtttaattttgttttgctttttgatggtggataagatgaaattttagctgtttcagcatcaatccaacttaaaagcatcttggactttgttttcccttccaaactaaaagatcaaggcatgtattagacacaagcatatttgctgcctcaactcctctgacacccatattaggaaaaggcctgccaccaaagcaggaagctgcacactcctaacccttctcccagggtgtggggtcccttgacgtcatgaagagctattgcaaggtgcttctgtacttttccagcctggaaatggagggtgactggccctggctcctgctatgagaagataaccagcctcattttctcagtgccccagaggtctaggataggatttctaaactggaatcatccttaatcaccttgaagatcccttaagaggcatttgactggtgctgccgtctgtgtcctcaaagcaatgctggtggcagcgtcctgtgtacacatgcagagctaatacccaaactaaaaactgggtaactggccctgaagtgcttcccaatcagtaagcccacagggaaatgtttgatttttatgttctgttggattttggtttgcttggcatatctaaaggtgcctttacttttctttttttttttttttctttctgctttgttttgtaggacttgttctaacatggaaaacaagtccagaagactctcctctgactgttacctttgccccaagccaccccaaacttttatgctcatgttttattaaagcaggtgctccctggaatctctgggacatttttgaggcatttgaagcagaatatagagtggtctcatctccttccttaatcttcctggtggttgggatgttccacttgtatcatagatttttttattacagatatgctccactgtttttaaatgtgaacttgtgcgcaaatgtgcagattcaatgttcttgttacagattgaataaatttttattttgaagatgaaa

SEQ ID NO: 228486 - DNA, 1796 bp, Artificial Sequence
  derived and/or modified sequence
atggctttggtcacggtccagcggtcacctacccccagcaccacctccagcccctgcgcctcggaggcagacagtggggaggaagaatgccggtcacagcccaggagcatcagcgagagctttctaactgtcaaaggtgctgccctttttctaccacggggaaatggctcatccacaccaagaatcagccacagacggaacaagcatgcaggcgatctccaacagcatctccaagcaatgttcattttactccgcccagaagacaacatcaggctggctgtaagactggaaagtacttaccagaatcgaacacgctatatggtagtggtttcaactaatggtagacaagacactgaagaaagcatcgtcctaggaatggatttctcctctaatgacagtagcacttgtaccatgggcttagttttgcctctctggagcgacacgctaattcatttggatggtgatggtgggttcagtgtatcgacggataacagagttcacatattcaaacctgtatctgtgcaggcaatgtggtctgcactacagagcttacacaaggcttgtgaagtcgccagagcgcataactactacccaggcagcctatttctcacttgggtgagttattatgagagccatatcaactcagatcaatcctcagtcaatgaatggaatgcaatgcaagatgtacagtcccaccggcccgactctccagctctcttcaccgacatacctactgaacgtgaacgaacagaaaggctaattaaaaccaaattaagggagatcatgatgcagaaggatttggagaatattacatccaaagagataagaacagagttggaaatgcaaatggtgtgcaacttgcgggaattcaaggaatttatagacaatgaaatgatagtgatccttggtcaaatggatagccctacacagatatttgagcatgtgttcctgggctcagaatggaatgcctccaacttagaggacttacagaaccgaggggtacggtatatcttgaatgtcactcgagagatagataacttcttcccaggagtctttgagtatcataacattcgggtatatgatgaagaggcaacggatctcctggcgtactggaatgacacttacaaattcatctctaaagcaaagaaacatggatctaaatgccttgtgcactgcaaaatgggggtgagtcgctcagcctccaccgtgattgcctatgcaatgaaggaatatggctggaatctggaccgagcctatgactatgtgaaagaaagacgaacggtaaccaagcccaacccaagcttcatgagacaactggaagagtatcaggggatcttgctggcaaggtgagtcagtgactttctccaattctccctccttttaagttccctaaagcaagatgaagtgtccttctctgtagctacttctcaagctgatttggatgtgatattttttcaaaaaagacttatttctctatcaatccagttttcaaaacataagtgtaagcatttaagatttgcatgggctggccgggcacagtggctcacgcctgtaatcccagcactttgggaggctgaggcaagcggatcatttgaggtcaggagttcgagaccagcctggccaacatggtgaaaccccgtctctacttaaaatacaaatattagctgggcatgatgatgggcccctgtaatcccagctacttgggaggctgaggcaggacaatcgcttgaacctgggaggcagaggttgcagtgagctgagattgtaccatgcactccagcctgggtaacagagcg

SEQ ID NO: 228487 - DNA, 4272 bp, Artificial Sequence
  derived and/or modified sequence
atggccctggtgaccgtgcagagaagccccacccccagcaccaccagcagcccctgcgccagcgaggccgacagcggcgaggaggagtgcagaagccagcccagaagcatcagcgagagcttcctgaccgtgaagggcgccgccctgttcctgcccagaggcaacggcagcagcacccccagaatcagccacagaagaaacaagcacgccggcgacctgcagcagcacctgcaggccatgttcatcctgctgagacccgaggacaacatcagactggccgtgagactggagagcacctaccagaacagaaccagatacatggtggtggtgagcaccaacggcagacaggacaccgaggagagcatcgtgctgggcatggacttcagcagcaacgacagcagcacctgcaccatgggcctggtgctgcccctgtggagcgacaccctgatccacctggacggcgacggcggcttcagcgtgagcaccgacaacagagtgcacatcttcaagcccgtgagcgtgcaggccatgtggagcgccctgcagagcctgcacaaggcctgcgaggtggccagagcccacaactactaccccggcagcctgttcctgacctgggtgagctactacgagagccacatcaacagcgaccagagcagcgtgaacgagtggaacgccatgcaggacgtgcagagccacagacccgacagccccgccctgttcaccgacatccccaccgagagagagagaaccgagagactgatcaagaccaagctgagagagatcatgatgcagaaggacctggagaacatcaccagcaaggagatcagaaccgagctggagatgcagatggtgtgcaacctgagagagttcaaggagttcatcgacaacgagatgatcgtgatcctgggccagatggacagccccacccagatcttcgagcacgtgttcctgggcagcgagtggaacgccagcaacctggaggacctgcagaacagaggcgtgagatacatcctgaacgtgaccagagagatcgacaacttcttccccggcgtgttcgagtaccacaacatcagagtgtacgacgaggaggccaccgacctgctggcctactggaacgacacctacaagttcatcagcaaggccaagaagcacggcagcaagtgcctggtgcactgcaagatgggcgtgagcagaagcgccagcaccgtgatcgcctacgccatgaaggagtacggctggaacctggacagagcctacgactacgtgaaggagagaagaaccgtgaccaagcccaaccccagcttcatgagacagctggaggagtaccagggcatcctgctggccagcaagcagagacacaacaagctgtggagaagccacagcgacagcgacctgagcgaccaccacgagcccatctgcaagcccggcctggagctgaacaagaaggacatcaccaccagcgccgaccagatcgccgaggtgaagaccatggagagccacccccccatcccccccgtgttcgtggagcacatggtgccccaggacgccaaccagaagggcctgtgcaccaaggagagaatgatctgcctggagttcaccagcagagagttccacgccggccagatcgaggacgagctgaacctgaacgacatcaacggctgcagcagcggctgctgcctgaacgagagcaagttccccctggacaactgccacgccagcaaggccctgatccagcccggccacgtgcccgagatggccaacaagttccccgacctgaccgtggaggacctggagaccgacgccctgaaggccgacatgaacgtgcacctgctgcccatggaggagctgaccagccccctgaaggacccccccatgagccccgaccccgagagccccagcccccagcccagctgccagaccgagatcagcgacttcagcaccgacagaatcgacttcttcagcgccctggagaagttcgtggagctgagccaggagaccagaagcagaagcttcagccacagcagaatggaggagctgggcggcggcagaaacgagagctgcagactgagcgtggtggaggtggcccccagcaaggtgaccgccgacgaccagagaagcagcagcctgagcaacaccccccacgccagcgaggagagcagcatggacgaggagcagagcaaggccatcagcgagctggtgagccccgacatcttcatgcagagccacagcgagaacgccatcagcgtgaaggagatcgtgaccgagatcgagagcatcagccagggcgtgggccagatccagctgaagggcgacatcctgcccaacccctgccacacccccaagaagaacagcatccacgagctgctgctggagagagcccagacccccgagaacaagcccggccacatggagcaggacgaggacagctgcaccgcccagcccgagctggccaaggacagcggcatgtgcaaccccgagggctgcctgaccacccacagcagcatcgccgacctggaggagggcgagcccgccgagggcgagcaggagctgcagggcagcggcatgcaccccggcgccaagtggtaccccggcagcgtgagaagagccaccctggagttcgaggagagactgagacaggagcaggagcaccacggcgccgcccccacctgcaccagcctgagcaccagaaagaacagcaagaacgacagcagcgtggccgacctggcccccaagggcaagagcgacgaggccccccccgagcacagcttcgtgctgaaggagcccgagatgagcaagggcaagggcaagtacagcggcagcgaggccggcagcctgagccacagcgagcagaacgccaccgtgcccgcccccagagtgctggagttcgaccacctgcccgacccccaggagggccccggcagcgacaccggcacccagcaggagggcgtgctgaaggacctgagaaccgtgatcccctaccaggagagcgagacccaggccgtgcccctgcccctgcccaagagagtggagatcatcgagtacacccacatcgtgaccagccccaaccacaccggccccggcagcgagatcgccaccagcgagaagagcggcgagcagggcctgagaaaggtgaacatggagaagagcgtgaccgtgctgtgcaccctggacgagaacctgaacagaaccctggaccccaaccaggtgagcctgcacccccaggtgctgcccctgccccacagcagcagccccgagcacaacagacccaccgaccaccccaccagcatcctgagcagccccgaggacagaggcagcagcctgagcaccgccctggagaccgccgcccccttcgtgagccacaccacccacctgctgagcgccagcctggactacctgcacccccagaccatggtgcacctggagggcttcaccgagcagagcagcaccaccgacgagcccagcgccgagcaggtgagctgggaggagagccaggagagccccctgagcagcggcagcgaggtgccctacaaggacagccagctgagcagcgccgacctgagcctgatcagcaagctgggcgacaacaccggcgagctgcaggagaagatggaccccctgcccgtggcctgcagactgccccacagcagcagcagcgagaacatcaagagcctgagccacagccccggcgtggtgaaggagagagccaaggagatcgagagcagagtggtgttccaggccggcctgaccaagcccagccagatgagaagaagcgccagcctggccaagctgggctacctggacctgtgcaaggactgcctgcccgagagagagcccgccagctgcgagagcccccacctgaagctgctgcagcccttcctgagaaccgacagcggcatgcacgccatggaggaccaggagagcctggagaaccccggcgccccccacaaccccgagcccaccaagagcttcgtggagcagctgaccaccaccgagtgcatcgtgcagagcaagcccgtggagagacccctggtgcagtacgccaaggagttcggcagcagccagcagtacctgctgcccagagccggcctggagctgaccagcagcgagggcggcctgcccgtgctgcagacccagggcctgcagtgcgcctgccccgcccccggcctggccgtggcccccagacagcagcacggcagaacccaccccctgagaagactgaagaaggccaacgacaagaagagaaccaccaaccccttctacaacaccatgtag

SEQ ID NO: 228488 - DNA, 1350 bp, Artificial Sequence
  derived and/or modified sequence
atggccctggtgaccgtgcagagaagccccacccccagcaccaccagcagcccctgcgccagcgaggccgacagcggcgaggaggagtgcagaagccagcccagaagcatcagcgagagcttcctgaccgtgaagggcgccgccctgttcctgcccagaggcaacggcagcagcacccccagaatcagccacagaagaaacaagcacgccggcgacctgcagcagcacctgcaggccatgttcatcctgctgagacccgaggacaacatcagactggccgtgagactggagagcacctaccagaacagaaccagatacatggtggtggtgagcaccaacggcagacaggacaccgaggagagcatcgtgctgggcatggacttcagcagcaacgacagcagcacctgcaccatgggcctggtgctgcccctgtggagcgacaccctgatccacctggacggcgacggcggcttcagcgtgagcaccgacaacagagtgcacatcttcaagcccgtgagcgtgcaggccatgtggagcgccctgcagagcctgcacaaggcctgcgaggtggccagagcccacaactactaccccggcagcctgttcctgacctgggtgagctactacgagagccacatcaacagcgaccagagcagcgtgaacgagtggaacgccatgcaggacgtgcagagccacagacccgacagccccgccctgttcaccgacatccccaccgagagagagagaaccgagagactgatcaagaccaagctgagagagatcatgatgcagaaggacctggagaacatcaccagcaaggagatcagaaccgagctggagatgcagatggtgtgcaacctgagagagttcaaggagttcatcgacaacgagatgatcgtgatcctgggccagatggacagccccacccagatcttcgagcacgtgttcctgggcagcgagtggaacgccagcaacctggaggacctgcagaacagaggcgtgagatacatcctgaacgtgaccagagagatcgacaacttcttccccggcgtgttcgagtaccacaacatcagagtgtacgacgaggaggccaccgacctgctggcctactggaacgacacctacaagttcatcagcaaggccaagaagcacggcagcaagtgcctggtgcactgcaagatgggcgtgagcagaagcgccagcaccgtgatcgcctacgccatgaaggagtacggctggaacctggacagagcctacgactacgtgaaggagagaagaaccgtgaccaagcccaaccccagcttcatgagacagctggaggagtaccagggcatcctgctggccagatag

SEQ ID NO: 228489 - protein, 883 aa, Artificial Sequence
  derived and/or modified sequence
MPGGGSQEYGVLCIQEYRKNSKVESSTRNNFMGLKDHLGHDLGHLYVESTDPQLSPAVPWSTVENPSMDTVNVGKDEKEASEENASSGDSEENTNSDHESEQLGSISVEPGLITKTHRQLCRSPCLEPHILKRNEILQDFKPEESQTTSKEAKKPPDVVREYQTKLEFALKLGYSEEQVQLVLNKLGTDALINDILGELVKLGNKSEADQTVSTINTITRETSSLESQRSESPMQEIVTDDGENLRPIVIDGSNVAMSHGNKEVFSCRGIKLAVDWFLERGHKDITVFVPAWRKEQSRPDALITDQEILRKLEKEKILVFTPSRRVQGRRVVCYDDRFIVKLAFESDGIIVSNDNYRDLANEKPEWKKFIDERLLMYSFVNDKFMPPDDPLGRHGPSLDNFLRKKPIVPEHKKQPCPYGKKCTYGHKCKYYHPERGSQPQRSVADELRAMSRNTAAKTANEGGLVKSNSVPCSTKADSTSDVKRGAPKRQSDPSIRTQVYQDLEEKLPTKNKLETRSVPSLVSIPATSTAKPQSTTSLSNGLPSGVHFPPQDQRPQGQYPSMMMATKNHGTPMPYEQYPKCDSPVDIGYYSMLNAYSNLSLSGPRSPERRFSLDTDYRISSVASDCSSEGSMSCGSSDSYVGYNDRSYVSSPDPQLEENLKCQHMHPHSRLNPQPFLQNFHDPLTRGQSYSHEEPKFHHKPPLPHLALHLPHSAVGARSSCPGDYPSPPSSAHSKAPHLGRSLVATRIDSISDSRLYDSSPSRQRKPYSRQEGLGSWERPGYGIDAYGYRQTYSLPDNSTQPCYEQFTFQSLPEQQEPAWRIPYCGMPQDPPRYQDNREKIYINLCNIFPPDLVRIVMKRNPHMTDAQQLAAAILVEKSQLGY

SEQ ID NO: 228490 - DNA, 2652 bp, Artificial Sequence
  derived and/or modified sequence
atgcccggcggcggcagccaggagtacggcgtgctgtgcatccaggagtacagaaagaacagcaaggtggagagcagcaccagaaacaacttcatgggcctgaaggaccacctgggccacgacctgggccacctgtacgtggagagcaccgacccccagctgagccccgccgtgccctggagcaccgtggagaaccccagcatggacaccgtgaacgtgggcaaggacgagaaggaggccagcgaggagaacgccagcagcggcgacagcgaggagaacaccaacagcgaccacgagagcgagcagctgggcagcatcagcgtggagcccggcctgatcaccaagacccacagacagctgtgcagaagcccctgcctggagccccacatcctgaagagaaacgagatcctgcaggacttcaagcccgaggagagccagaccaccagcaaggaggccaagaagccccccgacgtggtgagagagtaccagaccaagctggagttcgccctgaagctgggctacagcgaggagcaggtgcagctggtgctgaacaagctgggcaccgacgccctgatcaacgacatcctgggcgagctggtgaagctgggcaacaagagcgaggccgaccagaccgtgagcaccatcaacaccatcaccagagagaccagcagcctggagagccagagaagcgagagccccatgcaggagatcgtgaccgacgacggcgagaacctgagacccatcgtgatcgacggcagcaacgtggccatgagccacggcaacaaggaggtgttcagctgcagaggcatcaagctggccgtggactggttcctggagagaggccacaaggacatcaccgtgttcgtgcccgcctggagaaaggagcagagcagacccgacgccctgatcaccgaccaggagatcctgagaaagctggagaaggagaagatcctggtgttcacccccagcagaagagtgcagggcagaagagtggtgtgctacgacgacagattcatcgtgaagctggccttcgagagcgacggcatcatcgtgagcaacgacaactacagagacctggccaacgagaagcccgagtggaagaagttcatcgacgagagactgctgatgtacagcttcgtgaacgacaagttcatgccccccgacgaccccctgggcagacacggccccagcctggacaacttcctgagaaagaagcccatcgtgcccgagcacaagaagcagccctgcccctacggcaagaagtgcacctacggccacaagtgcaagtactaccaccccgagagaggcagccagccccagagaagcgtggccgacgagctgagagccatgagcagaaacaccgccgccaagaccgccaacgagggcggcctggtgaagagcaacagcgtgccctgcagcaccaaggccgacagcaccagcgacgtgaagagaggcgcccccaagagacagagcgaccccagcatcagaacccaggtgtaccaggacctggaggagaagctgcccaccaagaacaagctggagaccagaagcgtgcccagcctggtgagcatccccgccaccagcaccgccaagccccagagcaccaccagcctgagcaacggcctgcccagcggcgtgcacttccccccccaggaccagagaccccagggccagtaccccagcatgatgatggccaccaagaaccacggcacccccatgccctacgagcagtaccccaagtgcgacagccccgtggacatcggctactacagcatgctgaacgcctacagcaacctgagcctgagcggccccagaagccccgagagaagattcagcctggacaccgactacagaatcagcagcgtggccagcgactgcagcagcgagggcagcatgagctgcggcagcagcgacagctacgtgggctacaacgacagaagctacgtgagcagccccgacccccagctggaggagaacctgaagtgccagcacatgcacccccacagcagactgaacccccagcccttcctgcagaacttccacgaccccctgaccagaggccagagctacagccacgaggagcccaagttccaccacaagccccccctgccccacctggccctgcacctgccccacagcgccgtgggcgccagaagcagctgccccggcgactaccccagcccccccagcagcgcccacagcaaggccccccacctgggcagaagcctggtggccaccagaatcgacagcatcagcgacagcagactgtacgacagcagccccagcagacagagaaagccctacagcagacaggagggcctgggcagctgggagagacccggctacggcatcgacgcctacggctacagacagacctacagcctgcccgacaacagcacccagccctgctacgagcagttcaccttccagagcctgcccgagcagcaggagcccgcctggagaatcccctactgcggcatgccccaggacccccccagataccaggacaacagagagaagatctacatcaacctgtgcaacatcttcccccccgacctggtgagaatcgtgatgaagagaaacccccacatgaccgacgcccagcagctggccgccgccatcctggtggagaagagccagctgggctactag

SEQ ID NO: 228491 - DNA, 2652 bp, Artificial Sequence
  derived and/or modified sequence
atgcccggcggagggagccaggaatacggggtgctgtgtatccaggaatataggaagaatagcaaagtggagtcatcaacgcgcaacaatttcatgggtctcaaagaccaccttgggcacgacctcggacacctctacgttgaatcaactgatccacagttaagccctgccgtcccatggtctaccgtagaaaacccttctatggataccgtgaacgtaggcaaggacgaaaaggaggcatctgaggagaatgcttctagcggtgacagtgaagagaacaccaattcagatcacgagagtgaacaactaggaagcatttccgtggaaccgggactgattaccaagacccacaggcagttgtgtaggagtccctgcctggaacctcacattctgaaacgcaacgaaatccttcaggacttcaagccagaggagagccagaccacttcaaaagaggccaaaaaaccacctgacgtggtgagggaataccaaactaaactggaatttgccctcaaactaggttattcagaggagcaggtgcaactggtattgaataaactaggcactgacgctctgatcaacgatatcctcggggagctggtgaaactggggaataagtctgaagccgaccagactgtgtcaaccatcaatacgatcactcgagaaacttccagtttggaatcacagcggtccgaaagccctatgcaggaaatagtgacagacgatggagagaatctacggcctattgtcatcgacgggtcgaacgtcgcgatgagccatgggaacaaagaggtgttcagctgcaggggcatcaaactcgcagtagactggttcttagagcgaggacacaaagacatcactgtatttgtgccagcatggcgcaaagaacaatcccgaccagacgctttgattactgatcaagaaattctgcgcaaactggagaaggagaaaattctggtctttacaccctccagacgggtacagggcaggagagtcgtttgttacgatgatagattcatagttaagcttgccttcgagagcgacggaatcattgtgtctaatgataattatcgagacttggctaacgagaaacccgagtggaagaagtttatcgatgagcgcctacttatgtattcatttgtaaatgataagttcatgcccccggacgatcctctgggcagacacggtccttctctcgataatttcctcaggaaaaagcccatagttccggaacacaaaaagcagccatgtccatacggaaagaagtgcacgtatgggcacaagtgtaaatattatcaccccgaaagaggttcacagccccagagatctgtggcagacgagctcagagcaatgtctagaaatactgctgccaagacagcaaacgagggaggactagtaaaaagtaattcagtcccatgctcgactaaggccgattcaaccagtgacgtgaagagaggcgcaccaaaaaggcagagtgatcctagcattaggacacaggtctaccaggatctggaggagaaactgcccacaaaaaataagctcgagactcgtagcgtcccgtcactggtgagcatccctgccacctccacggctaagccgcagtctacaacctcccttagcaatggtttgccaagcggagtacactttccacctcaggaccagcgtcctcagggccaataccctagtatgatgatggccactaagaatcacggcacaccgatgccttatgagcagtacccaaagtgtgattcccccgtcgatattggctactatagcatgctcaatgcatactctaacctgtccctgtcaggccccaggtctcccgagcgcagattcagcctggacacagattaccgaatctcctcagtagctagcgattgctctagcgagggatcaatgtcctgcggtagcagtgatagctacgtaggctataatgacaggtcctatgtgtcgtcacccgacccccagttggaggaaaatctcaagtgccagcatatgcacccacacagtcgcctgaacccccagcctttcttgcagaacttccacgaccctctaactcgcggacagtcatacagtcatgaggagccaaagttccaccacaaacctcccctccctcacctcgcgcttcacctgcctcacagtgcagtgggcgcgagatcgagttgccctggcgattaccccagccctccgagctctgcccactcgaaagcaccccacctggggagatcactggtagctacccgtattgactcaatttctgatagcagactctacgactcgtccccatcacgacagcgaaaaccctactctcgccaagaaggactcgggtcatgggagagacccgggtacgggattgatgcctatggttaccggcaaacctattctctgcccgacaacagtacacagccctgctatgaacagtttactttccagagcttgccagaacaacaggagcctgcctggcgcatcccctactgtggtatgccccaggatccacctaggtaccaggataacagagaaaaaatctacatcaacttgtgcaatatttttcccccagacctggtgcggatcgtcatgaagcggaacccacacatgactgatgcacagcagctggccgccgccattttggttgagaagagccagctcggctactag

SEQ ID NO: 228492 - DNA, 2652 bp, Artificial Sequence
  derived and/or modified sequence
atgcctgggggcggcagccaggagtatggagtgctgtgcatccaggagtacaggaagaacagcaaggtggagagcagcaccaggaacaacttcatgggcctgaaggaccacctgggccatgacctgggccacctgtatgtggagagcacagacccccagctgagccctgctgtgccctggagcacagtggagaaccccagcatggacacagtgaatgtgggcaaggatgagaaggaggcctctgaagaaaatgccagcagcggggacagcgaggagaacaccaacagcgaccacgagagcgagcagctgggcagcatctctgtggagcccggcctcatcaccaagacccaccggcagctgtgccgcagcccctgcctggagccccacatcctgaagagaaatgagatcctgcaggacttcaagccagaggagagccagaccaccagcaaggaggccaagaagcccccagatgtggtgcgggagtaccagaccaagctggagtttgccctgaagctgggctacagcgaggagcaggtgcagctggtgctgaacaagctgggcacagatgccctgatcaatgacatcctgggggagctggtgaagctgggcaacaagtctgaggccgaccagacagtgtccaccatcaacaccatcacccgggagaccagcagcctggagagccagaggtctgagagccccatgcaggagatcgtgacagatgatggagagaacctgcggcccatcgtgattgatggcagcaatgtggccatgagccacggcaacaaggaggtgttcagctgccggggcatcaagctggccgtggactggttcctggagcggggccacaaggacatcaccgtgtttgtgcctgcctggaggaaggagcagagcaggccagatgccctgatcacagaccaggagatcctgaggaagctggagaaggagaagatcctggtgttcacccccagccggcgggtgcagggcagaagagtggtgtgctatgatgaccgcttcatcgtgaagctggcctttgaaagtgatggcatcatcgtgtccaatgacaactacagagacctggccaatgagaagccagagtggaagaagttcattgatgagcggctgctgatgtacagctttgtgaatgacaagttcatgcccccagatgaccccctgggccgccacggccccagcctggacaacttcctgaggaagaagcccatcgtgcctgagcacaagaagcagccctgcccctacggcaagaagtgcacctacggccacaagtgcaagtactaccaccctgagcggggcagccagccccagaggtctgtggctgatgagctgcgggccatgagcaggaacacagctgccaagacagccaatgaaggaggcctggtgaagagcaacagcgtgccctgcagcaccaaggctgacagcaccagtgatgtgaagagaggagcccccaagaggcagagcgaccccagcatccgcacccaggtgtaccaggacctggaggagaagctgcccaccaagaacaagctggagaccaggtctgtgcccagcctggtgtccatcccagccaccagcacagccaagccccagagcaccaccagcctgagcaatggcctgcccagcggcgtgcacttccccccccaggaccagaggccccagggccagtaccccagcatgatgatggccaccaagaaccacggcacccccatgccctatgagcagtaccccaagtgtgacagccctgtggacatcggctactacagcatgctgaatgcctacagcaacctgagcctgagcggccccaggagccctgagcggcgcttcagcctggacacagactaccgcatcagctctgtggccagtgactgcagcagcgagggctccatgagctgtggcagcagtgacagctatgtgggctacaatgacaggagctatgtgagcagcccagacccccagctggaggagaacctgaagtgccagcacatgcacccccacagccggctgaacccccagcccttcctgcagaacttccatgaccccctgacccggggccagagctacagccatgaggagcccaagttccaccacaagccacccctgccccacctggccctgcacctgccccacagcgctgtgggcgcccggagcagctgccctggggactaccccagcccccccagcagcgcccacagcaaggccccccacctgggccgcagcctggtggccaccagaattgacagcatcagtgacagccggctgtatgacagcagccccagccggcagaggaagccctacagccggcaggagggcctgggctcctgggagcggcccggctacggcattgatgcctacggctaccggcagacctacagcctgcctgacaacagcacccagccctgctatgagcagttcaccttccagagcctgcctgagcagcaggagcccgcctggaggatcccctactgcggcatgccccaggaccccccacgctaccaggacaaccgggagaagatctacatcaacctgtgcaacatcttccccccagacctggtgcgcatcgtgatgaagaggaacccccacatgacagatgcccagcagctggccgccgccatcctggtggagaagagccagctgggctactag

SEQ ID NO: 228493 - DNA, 2652 bp, Artificial Sequence
  derived and/or modified sequence
atgcccggcggcggcagccaggagtacggcgtgctgtgcatccaggagtatcgcaagaacagtaaggtcgaatcaagtacccgaaataactttatgggcttaaaagaccatctgggacacgacctcggacatctctacgtggaaagtacagaccctcagctcagccccgctgtcccatggagcactgtcgagaaccccagcatggatactgtaaatgtgggcaaagatgaaaaagaggcatccgaggaaaatgcgtccagcggcgactctgaggaaaacaccaactctgatcacgagagcgagcagctgggaagtatctctgtggaacctggacttatcaccaagactcatcgacaactgtgtcggtctccgtgcctcgagccacacattttgaaaaggaatgagattctgcaggatttcaagcccgaggaatcccagacgacctctaaggaggcaaagaagccaccagatgtggtgagagaatatcagacgaaactcgagttcgccctcaaacttggctacagtgaagaacaggtccaactggtgctcaacaaattgggaaccgacgctcttattaatgacattttaggagagctggtgaaactgggaaataaaagtgaggctgatcaaacggtgtctaccatcaacacaattactagggagacctcatccttggagagtcagcgctctgaatcccccatgcaagagattgtcactgacgacggagaaaacctgagaccaatcgtgatcgacggatcaaacgtagccatgtcccacggaaacaaagaagtgttcagttgccggggaataaaactggcagtggattggtttttggaacgcggacacaaagacattacggtattcgttcctgcctggcggaaggagcagagccggcctgatgctttgatcacagaccaggaaatccttcgcaaactggagaaggagaaaatattagtttttacgccttcccgtcgcgttcaagggagacgcgtggtttgttacgatgacagattcatcgtgaagttagctttcgagagcgatggaataatcgtttccaacgacaactacagagatctggccaacgaaaaacccgagtggaaaaaatttatcgacgagcgacttttgatgtattccttcgttaatgataagttcatgccccccgacgatcctctggggaggcacggccctagcctggataatttcctgcgtaaaaaacccatcgttccggagcacaagaagcaaccttgcccatacgggaagaaatgcacttacggacacaagtgtaagtactatcaccctgagcgggggtcacagccacagcgctcagtcgcggatgagctgcgcgccatgtcaagaaatacagcagctaagaccgccaatgagggaggcctggtgaaaagcaactccgtgccctgtagtacaaaggctgacagcacgtcagatgtgaaacggggagcccctaagaggcagagtgacccttccatccgaacccaggtctatcaggacttggaggagaagcttccaaccaaaaacaagctcgaaacgcgctctgtgccatccctcgtgtcgatccccgctaccagtacggcgaaaccacaatccactacctcactttctaatggacttccttcaggagtccacttccctccacaggaccagaggccacagggccagtacccgagtatgatgatggctactaaaaaccatggaaccccaatgccctatgagcagtacccgaaatgcgacagccccgtggacatcggctattatagcatgctgaatgcctatagcaacctgagtttgtctggtccaaggtcgccggagcggaggtttagcctggataccgactacagaataagtagcgtggccagcgattgcagtagcgaaggatcaatgtcatgtgggtcctctgacagttacgttggatacaacgacagatcttatgtgtcatctcctgatccgcaactggaggagaatttgaagtgtcagcatatgcacccacattcaaggttgaatccccagccttttctgcagaatttccacgaccccctcactagaggacagtcctacagtcatgaggaaccaaaattccaccacaaaccaccgctcccccatttggcattacatctgccgcacagcgcagtgggagcccgtagctcatgtccgggcgactatccgagccctccatcctccgcacattctaaggctccccatcttgggaggtccctggtcgccacccgcatcgacagcatcagcgacagtcgcctctatgatagttccccttccaggcagcgaaaaccttattcccgtcaggaaggcctaggttcatgggagcggccagggtacggtattgacgcctatggctaccgacagacttatagtctgccggacaacagtacccagccttgctacgagcaattcaccttccagtccctgcccgagcagcaagaaccagcatggagaatcccttactgtggcatgcctcaggatccccctagataccaggataacagagaaaagatatacatcaatctgtgcaatattttcccaccagaccttgtgaggattgtgatgaaacggaatccacatatgaccgatgcccagcagctggctgcggccatcctggtcgagaagagccagctaggctattag

SEQ ID NO: 228494 - DNA, 2652 bp, Artificial Sequence
  derived and/or modified sequence
atgccaggaggtgggagccaggagtacggcgtgttgtgtatccaagaatacaggaagaactccaaggtggaaagttctacacgaaacaacttcatggggctgaaagaccacctcggccatgacctgggacacttgtatgtcgagtcgactgacccacagctgagcccggcagttccttggtcaacagttgagaaccccagcatggatactgtgaacgtgggaaaggatgagaaggaggcatcagaggagaacgcctcctcaggcgattccgaggaaaataccaacagcgaccatgagagcgaacagctcgggagcatttctgtggaacctggtctcatcaccaagacccatcgccagctgtgccggtctccttgcctggagccacacatcctgaaacgaaatgaaatcctccaggacttcaagccagaggagagccagactacctcaaaggaggccaagaagcccccagacgtcgtccgcgagtatcagacaaagcttgaatttgcgctaaagctggggtattccgaggaacaagtgcaacttgtgctgaacaaactgggcactgatgcattgatcaacgatatcctcggtgagctcgttaagctcgggaataagagtgaagctgaccagaccgtgtctactatcaatacgatcacccgggaaaccagctcactagagtcccaaaggtcggaaagccctatgcaggagatcgtaaccgatgacggggaaaatttgaggcctatcgtcatagatggcagcaatgtggcgatgagccacgggaataaggaggtgttttcctgtcgcggaattaagctagccgttgactggtttctggaacggggacataaggacattaccgtgtttgtccccgcatggagaaaggagcagtcccgtcctgacgccctgatcaccgaccaggaaatcctgaggaagctggagaaagagaaaatcttggttttcaccccatccaggcgggtgcagggcaggcgtgtagtgtgctatgatgataggtttattgtcaaactggcattcgagagtgatggcattattgtttcgaacgataactacagagacctggccaatgaaaagcctgaatggaagaagttcatcgacgaacgccttctgatgtacagcttcgtgaacgataagttcatgcccccagatgaccctcttggtagacatggtccgtccctcgacaactttttgagaaagaaacctatcgtgcccgagcacaaaaaacagccatgtccctatggcaagaaatgcacatatgggcataagtgcaagtattaccaccctgaacgtggaagccaacctcaacgtagcgtcgcggatgaattacgggctatgtctaggaacacagcggctaagactgcaaatgaaggagggctggtgaaaagcaacagcgttccttgcagcactaaggccgattctacgagtgatgtgaagcgcggagctcccaaacgccagagtgacccttcaatacgcacccaggtctaccaggacctcgaagaaaaactgccaacaaagaacaagctcgagacccggagcgtcccttccctggtatccattccagccactagcacagctaagccccagagtaccaccagcttgagcaacgggctgccctccggggtgcactttccaccccaggaccagaggccgcagggtcagtacccctcaatgatgatggcaacaaagaaccacgggaccccaatgccttacgaacagtacccaaaatgtgatagtcccgtcgatattggctactattctatgctcaacgcctactctaacctgtccttatcaggccctaggtcccctgaacgtaggttctccctggatacagactaccgaataagctctgttgcatcagactgctcctccgaagggtccatgagttgtggctcctctgacagttatgtgggctacaatgataggagctatgtgagcagccccgatccccaattggaggagaatctgaagtgtcagcacatgcatccgcacagccggctcaacccgcagccatttctgcaaaacttccacgatcctctgacccggggtcagtcttactcccacgaagagcctaaatttcatcacaaaccccctctgccccatttagccctacacctgccgcacagcgctgtgggagccagatccagttgcccaggagattatccgagccctccctcatcagctcactcaaaggccccacatctgggcaggtccctggtagctaccaggattgacagcattagtgatagcagattatacgattcaagccccagcaggcaaagaaagccttactctcgacaggaagggctgggcagctgggaaaggccagggtacggcatcgacgcttatggatacaggcagacgtacagcctgccagacaactctacgcagccttgctatgaacagtttacatttcagagcctgcccgagcaacaggaaccagcatggcggatcccttattgcggaatgccacaggacccgcctagataccaagacaatagggagaagatctatattaacctgtgcaatatcttccctccagacctcgtccgtatcgtcatgaaaaggaaccctcacatgaccgatgcacagcagttagctgccgctatcttagtcgagaaaagtcaattaggttattag

SEQ ID NO: 228495 - DNA, 8807 bp, Artificial Sequence
  derived and/or modified sequence
gcttctccgcgggccccgccgcccgctcgccgctttctcgcggggctggctatgccgggtggcggctcccaggaatacggggtgctttgcattcaggaatacagaaaaaacagcaaagtggagtcaagtacacgtaacaacttcatgggcttgaaggatcacctagggcatgacctcggccacctttatgtggagagcactgacccacagttaagtccagctgtaccttggtcaacagtagaaaacccaagtatggataccgttaatgtggggaaggatgaaaaagaggcgtctgaagagaatgcaagctctggtgactctgaagaaaacacaaattctgatcatgagtcagaacaattgggtagcatttcagtagagccaggcttgataactaagactcacagacagctctgcaggtctccctgtttagagcctcacatactcaagcgcaatgaaattttgcaagactttaaacctgaagagtcccagactacatccaaggaagcaaagaaaccacctgatgtggtgcgagaataccaaacaaaactggagtttgcacttaagttaggttattctgaagaacaggttcagcttgtactaaacaaacttggtactgatgctttaatcaatgatattttgggagaacttgtcaaacttggaaataaaagtgaggctgatcaaacggttagtacaattaacactataacacgggaaacttcttccctggaatctcagaggtctgaatctccaatgcaagagattgtaacagatgatggtgaaaatctgagaccaatagttattgatggcagcaatgtggcaatgagccatggaaacaaagaagtattttcctgcagaggaataaaattggcagtggattggtttttggaaagaggccacaaagacattacagtttttgttcctgcttggaggaaagagcaatcccgacctgatgctctcattacagatcaggaaattttacgtaaattagagaaggagaaaatcctggtgttcacgccatcccggcgagtccaggggaggagagtggtgtgctatgacgacaggttcatcgtgaagctggcttttgagtcggacggtatcattgtgtccaatgataactacagggacttggctaatgagaagccagaatggaagaagttcatagatgaacgattattaatgtattcatttgtcaatgacaagttcatgccccctgatgaccctcttggcagacatggccccagtctggataattttctgaggaagaaacctattgttcctgaacacaaaaagcagccttgtccatatggaaagaagtgtacctatggacacaagtgcaaatattaccatcccgaaaggggcagtcagccacagcggtcagtggctgatgaactccgtgccatgtctagaaatacggcagccaaaactgcaaacgaaggaggactggtgaaaagcaacagtgttccttgtagcaccaaggctgatagcacttctgatgtcaaacgaggtgctccaaagaggcaatcagatccaagcataaggacacaagtctaccaagacctagaagaaaagcttcccaccaaaaacaaattggaaaccaggtctgtaccttccttagttagcatcccagctacttctactgcaaaaccccaaagcactacatctttaagcaatggccttccatctggagttcatttcccacctcaggatcaaagaccacagggacaatatccttcaatgatgatggcaaccaaaaatcatggaacgccaatgccttatgaacagtatccaaaatgtgactcacctgtcgacatcggatattattccatgttgaatgcatactcaaatctgagtctctcaggcccacgaagccctgaaaggcgtttctccttagacacagattatagaataagttccgtagcttctgactgcagcagtgaagggagcatgagctgtgggagcagtgactcctacgtgggttacaatgaccggtcctatgtcagctcccccgacccacagctagaggagaatttgaagtgtcaacacatgcaccctcacagccgccttaatcctcaaccgttcctgcagaatttccacgaccccttaaccagagggcaaagttacagtcacgaagaaccaaagttccatcacaagcctcctcttccgcacctggctctgcacctgccgcactccgctgtgggcgcccggtccagctgtcctggcgactacccctctcctccaagttcagcacactctaaggcaccacacctagggaggtccttggtggccacgagaatagacagcatctctgactctcgactttatgacagttctccttcacgacaaagaaagccttattcccgccaggaaggcctgggaagctgggagaggccaggctatgggatcgacgcctatgggtaccggcagacttattccttgcccgataactccacacagccgtgttatgagcagttcaccttccagagcctccctgagcaacaggagccagcctggcggatcccatactgtggaatgccgcaagatcccccgaggtatcaagacaaccgagaaaagatttatatcaatttgtgcaacatcttcccccctgaccttgtgagaattgtcatgaaaaggaatcctcacatgacagacgcccagcagctcgccgcagccattttagtggagaaatcccagctgggttattgaaagatgatgcatctttgtggtgtttagtagttttttgttcagctcaaatgctgagggaggtttgctacaatagcacatgtgatctccttctcagcaaggaggttatatagtatccatttatgtgaaatactgtatcatggaatctgtatgtatagccccacatggtggaagtatcacgggattgctttacatttaaactttttttttttaacatttcctttttaaagctatatccttggctggaaatttttccagtttgatttaatagatgtatctgtgatctttgatattaatctttggtgcatcaggggtttatatgcagcactttttatccttgttttgtgttttattaacttggtgtttgtctatcaattgcaagcaattacaataccttcagaatgtgggacatttgactagacctagcaaactgttttttcgagccaagcttagttagactcttttacagctttttaagttatttttatttggggaaagtgggcttctttgtgctataatcattatttatagaaacaaagttatactacagcactgactttatattttaaacagaatgtaagttaccagttttatgttgaaatgtgttacagtatatatatattagaatgatttacaatatggcacttttcgatgtgttatttttgtttggatttttttttctgttaagaaattagttaatttaatatggtcaatttaaaagaaagcagatgcaatcaatggaaaaatgtttccattttttaaaaatgaataaggcaaaagctgtaactgttacaggttagagctttgttatccagctatgatgtgcttcttgacagtagaagtggaattgaattcctagatttccattaacctgtatttttaatatgtctgtctttttgttttggggcacaacaatactggataaaataaccctttcacagcacttgcctgtttttaatgaatctaattattcacaatgcaacttttatatttaacatactctttagctttcctgctatttatcaaggctggcctgaggtgggtttatgtgttgaggttatgcaacatttcttgatactgcactatagagaaatggtgatggaggagttgtaaatggtaacttaaaatttttgtaagatattgtatattttccattttcctgaaggtagttttcttgggggggcctgttatattattaaggccagactcttgccacaaatagtgtagttttagatacagactaaggtctgttctagtattagtaagggatatttctggtttcaaagtcatgggttttgctagtggtgaatacatttctgcggagtagaagatagattttgcagtcagtggcagacagttgtgtgattgacatcacttgactgttgcgtccaggttttgaattgtacttcacgtaacagatgcattcagatctttttctgtagtctgcttagatgccctggctattctgattatcctacatgctacagtttgaagtgaagccctgaaaaaccagaaagtaccttttactgttgatacaaattgtatctttttaactataagaactattttgatttgtagatctagttaaaacacaagtatgtaactatgattagacttttgggcaacattttatcccttatttaaatacaaatttttaaagtaaaattgaggtctagaatagattagaaaataaaaataacaatttagataaatagaaatgtctgtcttagttttatataatatattaaaacacagtaaataaatttattggcattttctttctcctaaaacttacctagtgtgaacttaaaataaaggtaaaatgctgcctgaaaataatgtccaagcacctttgactaggataacattttcactacttgtgtgacactgtgtgttgcacgaagtaggatttgggtatacagtaaatgcttctaaaaggcattgtgcatattgacataaccaataatctgaaccgtgttcagcaaacttaattcaggaaagtggtattctacacaattattgctgttgtgtttgaaatgagtgtggcactcatctgtatccagaaataatatgggtgaggccacacaacccattctgagtggtgtctgtctgaaagcaaccctactcgcatgtgaaattgttctccttgatttggtcactataaagcaagtttaaatgtagaggctaactcagtgccaaaaacagggttacaaatgtgtagtatcttttattttagtcatattctaagacttctttttagtatgaaatcacttttaaattatacatgtaggttttgcttccattttcttcattttaccattttaattatttgaacattcgccaaattttacatttatttaaatgagatcttaggtgagatgtgtgtgacactttgaatttgaccttcttgtgttattagctgactatttgtcattgcctcatggattttaaattatgggaaaatagtgtagccagctgccacctctactgaagtgagtagctctgaactacccacactaaatccttcagtgtaattaattatgagtttaaaaatagcagttttcttatgtgaagaggacagtttgtcccctttttttgaagcaccgatgttgcgttcagagctgtagaatgagataattggcagactttaggtacagcaaattcttacttatctaaagcaataagtcaaaggagtccatcattaaattaaatccatagctgatcacaagccttcattttagccaaaactttctctctaaccaaatcttttaccagacttgctaataaataaccagagagatgtgttaataagtgaagttgccagaaatggtcaactgatcggaaaaaaaaggattcagactggagtattttgcccctgaataattgacagttgactgtgctttacacagtaactagccagtctgttgtctctgtgtcttagtccagagggaatagtacccaattggccaaatactggcccttagtatctcctcctttcttgcatgggatacagacgttttcagtcttgtttttatgatctctctctatatcctgataagagtttgtcattgacttacacatttggaagaaatgcacaccagtgtaatatatttgatactggtggaaacttgaactttgtgtttttatgaaaattcatttatgagaatatgtaatataactgaagagtattttatgtatatctatatacacaaatatgtatttgttatgaggtattaaaaacaggggttggggggagtgcttctgatggctaacttttctctaattaaactatgtttctttgagttgtgaacgaccgagtctggggtctggacggccaatgataagatttagaaccacttggatggaaagcagttcttcactggttttattcttggtattttcaaagaattattttgatatttttaatagaatgtgtaattttaaaatacacaaaaaacttaaagtagtattgattatacaaataattatttaacatgtcttatggatgtatctatatgtatatagacagtaatatatttataaaacaaatatactttgcttatgttatagctcttagtttgtgacaggtgggaggatggctctgggtgtgtgtgtgtgtgtgtgtgtgtgtgtgtgtgtgtgtgtgttttgaaaactctcaagctgttttccctctgatttacaatggtatttactttaaagtatgtttggttttcattattctttttgctctccaacttccttattcaagataaaataagacatacagttttctggccattctgttggtgtgtggtgcacccattttattgtcatctaactcctggagaattcccacgtgacctgaaatcaaacagattctggctggacatatgcttatgttccaaatatattaaagatgttaattcagctaacagttaagtttccaaggtatacaccaacaaataaaatgaggtattaaaaagagatggattacacacatgcattagaataagagaaaacagtagtgttaataaaagtaaagaaacatacactatcttagccccctagggcaggggttgactttttctgtaaaggatcagatagtaaataatacaggaatcatatggacttcaaatgccattgtaaaaactactcagctctgcctttagagcataagaacagccacagataacatgtaaattagtgtggctgtgttccaataaaactttatttacagaaacgggaagccggtcagattgggcctgtgggccataatttgctgatctcaagcagtaaatcctggtatatgttaatagaagaaatcataattgcatttcagttgacattaaaagaaaatctggtagtttttgatgtccttcaaaagaggattgttagacattgatgttaaagcatcttaattcatttgagttttcttacctgtttacacccattatttattagagatatttcttgtgtttaaccacaaaaaaaagcactctgttaaaatgttttaatatgtattgaatttctttcataaacttttcatttctgttgataaatgggaatcccttaccaaccttttgttttttaaaagtctcatagaccaaaaaaaatctgttgcagcatttaattagccacagatacattttggctgcatttaccagttacatttttccattggttttggcttctaataaataacatatctgccattctttaaaaatgattttaaagaagataaatatattgtaatttcacatgctatagctttattctgtaagattaaaaattgtgactagtataattgtagctataatgtgagtggcatgttacaatgtaactctttatgagaaataaaatgtatctctgctttgtctgtccagatctttaggatttttagatgccttgggactgtccttggtgaatgatattcttcatatgatcatatgtaattttgaattcgttggaagtacacgctgctgagcatgtttattcacagtgctttataccgggtgttgcatcagtaatcattttcataagaacatttaaacagcatgaacatcatcatccacttaaatagttaaactttcttttaaaattggaatgcaactgtaggttttaacaatgtttattgttttttaagtggttactttgtttttccttaatactttctgttaacttaattattactcctgttgcagtgttactgttatgtattagaagtggcttttccccctaagatccttagtcttttaaagacaatttaaggtattggccatttggcagtagaaaatgtgcatgttttaacttggttttataaaatctgtaatgtttcacttcttgaaccatgtaccaaatttgccaattttctgtccaagtgtttcagatgaataacaaaacgctgttcattgaagctttcgccacctttcttaaagcagcgtatgttccaagggaaaaaggcattgaaaagcaatcgtttgtttttatgaagaataggtgttcagattccttcagtttttttgaaattagaaatttcttaccttatgtgaaatattcacaaacgtgcacacttctgcagagacaaagcatttcactgcacgtgtaccaggttattgattttatcttttcctttcagggttttgtcctcccaaaccagagtcatatgctgctagtagaattttttatttgatcctgcgaacttttcttataggaaaagtaaggcaaaggatgtgtagtgcaaccatctgataaactagtgtgattgtatttatcctctgttctgtgtatttctgtaatggaatctttacaattcccaaaacggtattttagacctactggaaatctgtatcgaaacagctatgtgattctgccactgagaaaaaaaaaatttttaattcgtttttcttatgctggtttgtttttctttaatgaagaaattgatctcatatggcatcatagatgctaaataaataaaagcatcatacttctctagtttgcctgcattcagtggctaacattatgagcattgtgtaagataaacacatggtcagtatcaatgtaaatgttagagccatgattaattcctatgaaaattgaaattaaatgtcaaagacaactagacataa

SEQ ID NO: 228496 - protein, 1143 aa, Artificial Sequence
  derived and/or modified sequence
MHVMNCVSLVSDKENGNIATAPGFMIGQTPPPAPPPPPPPPPPSPPCSCSREECPSSPPPPPPPPLPGEPPIPPPPPGLPPTTHMNGYSHLGKKKRMRSFFWKTIPEEQVRGKTNIWTLAARQEHHYQIDTKTIEELFGQQEDTTKSSLPRRGRTLNSSFREAREEITILDAKRSMNIGIFLKQFKKSPRSIVEDIHQGKSEHYGSETLREFLKFLPESEEVKKLKAFSGDVSKLSLADSFLYGLIQVPNYSLRIEAMVLKKEFLPSCSSLYTDITVLRTAIKELMSCEELHSILHLVLQAGNIMNAGGYAGNAVGFKLSSLLKLADTKANKPGMNLLHFVAQEAQKKDTILLNFSEKLHHVQKTARLSLENTEAELHLLFVRTKSLKENIQRDGELCQQMEDFLQFAIEKLRELECWKQELQDEAYTLIDFFCEDKKTMKLDECFQIFRDFCTKFNKAVKDNHDREAQELRQLQRLKEQEQKQRSWATGELGAFGRSSSENDVELLTKKGAEGLLPFLHPRPISPSSPSYRPPNTRRSRLSLGPSADRELLTFLESSTGSPEEPNKFHSLPRSSPRQARPTIACLEPAEVRHQDSSFAHKPQASGGQEEAPNPPSAQAHQLAAAQPENHASAFPRARRQGVSVLRKRYSEPVSLGSAQSPPLSPLALGIKEHELVTGLAQFNLQGSQGMEETSQLTLSDFSPMELESVGHRGPQSLSASSSSLTPMGRDALGSLSPALEDGKAAPDEPGSAALGSVGSSDPENKDPRPLFCISDTTDCSLTLDCSEGTDSRPRGGDPEEGGEGDGSMSSGVGEMGDSQVSSNPTSSPPGEAPAPVSVDSEPSCKGGLPRDKPTKRKDVVAPKRGSLKEASPGASKPGSARRSQGAVAKSVRTLTASENESMRKVMPITKSSRGAGWRRPELSSRGPSQNPPSSTDTVWSRQNSVRRASTGAEEQRLPRGSSGSSSTRPGRDVPLQPRGSFKKPSAKPLRNLPRQKPEENKTCRAHSEGPESPKEEPKTPSVPSVPHELPRVPSFARNTVASSSRSMRTDLPPVAKAPGITRTVSQRQLRVKGDPEDAAPKDSSTLRRASSARAPKKRPESAEGPSANTEAPLKARGAGERASLRRKDSSRTTLGRILNPLRK

SEQ ID NO: 228497 - DNA, 3432 bp, Artificial Sequence
  derived and/or modified sequence
atgcacgtgatgaactgcgtgagcctggtgagcgacaaggagaacggcaacatcgccaccgcccccggcttcatgatcggccagacccccccccccgccccccccccccccccccccccccccccccccagccccccctgcagctgcagcagagaggagtgccccagcagcccccccccccccccccccccccccctgcccggcgagccccccatccccccccccccccccggcctgccccccaccacccacatgaacggctacagccacctgggcaagaagaagagaatgagaagcttcttctggaagaccatccccgaggagcaggtgagaggcaagaccaacatctggaccctggccgccagacaggagcaccactaccagatcgacaccaagaccatcgaggagctgttcggccagcaggaggacaccaccaagagcagcctgcccagaagaggcagaaccctgaacagcagcttcagagaggccagagaggagatcaccatcctggacgccaagagaagcatgaacatcggcatcttcctgaagcagttcaagaagagccccagaagcatcgtggaggacatccaccagggcaagagcgagcactacggcagcgagaccctgagagagttcctgaagttcctgcccgagagcgaggaggtgaagaagctgaaggccttcagcggcgacgtgagcaagctgagcctggccgacagcttcctgtacggcctgatccaggtgcccaactacagcctgagaatcgaggccatggtgctgaagaaggagttcctgcccagctgcagcagcctgtacaccgacatcaccgtgctgagaaccgccatcaaggagctgatgagctgcgaggagctgcacagcatcctgcacctggtgctgcaggccggcaacatcatgaacgccggcggctacgccggcaacgccgtgggcttcaagctgagcagcctgctgaagctggccgacaccaaggccaacaagcccggcatgaacctgctgcacttcgtggcccaggaggcccagaagaaggacaccatcctgctgaacttcagcgagaagctgcaccacgtgcagaagaccgccagactgagcctggagaacaccgaggccgagctgcacctgctgttcgtgagaaccaagagcctgaaggagaacatccagagagacggcgagctgtgccagcagatggaggacttcctgcagttcgccatcgagaagctgagagagctggagtgctggaagcaggagctgcaggacgaggcctacaccctgatcgacttcttctgcgaggacaagaagaccatgaagctggacgagtgcttccagatcttcagagacttctgcaccaagttcaacaaggccgtgaaggacaaccacgacagagaggcccaggagctgagacagctgcagagactgaaggagcaggagcagaagcagagaagctgggccaccggcgagctgggcgccttcggcagaagcagcagcgagaacgacgtggagctgctgaccaagaagggcgccgagggcctgctgcccttcctgcaccccagacccatcagccccagcagccccagctacagaccccccaacaccagaagaagcagactgagcctgggccccagcgccgacagagagctgctgaccttcctggagagcagcaccggcagccccgaggagcccaacaagttccacagcctgcccagaagcagccccagacaggccagacccaccatcgcctgcctggagcccgccgaggtgagacaccaggacagcagcttcgcccacaagccccaggccagcggcggccaggaggaggcccccaacccccccagcgcccaggcccaccagctggccgccgcccagcccgagaaccacgccagcgccttccccagagccagaagacagggcgtgagcgtgctgagaaagagatacagcgagcccgtgagcctgggcagcgcccagagcccccccctgagccccctggccctgggcatcaaggagcacgagctggtgaccggcctggcccagttcaacctgcagggcagccagggcatggaggagaccagccagctgaccctgagcgacttcagccccatggagctggagagcgtgggccacagaggcccccagagcctgagcgccagcagcagcagcctgacccccatgggcagagacgccctgggcagcctgagccccgccctggaggacggcaaggccgcccccgacgagcccggcagcgccgccctgggcagcgtgggcagcagcgaccccgagaacaaggaccccagacccctgttctgcatcagcgacaccaccgactgcagcctgaccctggactgcagcgagggcaccgacagcagacccagaggcggcgaccccgaggagggcggcgagggcgacggcagcatgagcagcggcgtgggcgagatgggcgacagccaggtgagcagcaaccccaccagcagcccccccggcgaggcccccgcccccgtgagcgtggacagcgagcccagctgcaagggcggcctgcccagagacaagcccaccaagagaaaggacgtggtggcccccaagagaggcagcctgaaggaggccagccccggcgccagcaagcccggcagcgccagaagaagccagggcgccgtggccaagagcgtgagaaccctgaccgccagcgagaacgagagcatgagaaaggtgatgcccatcaccaagagcagcagaggcgccggctggagaagacccgagctgagcagcagaggccccagccagaacccccccagcagcaccgacaccgtgtggagcagacagaacagcgtgagaagagccagcaccggcgccgaggagcagagactgcccagaggcagcagcggcagcagcagcaccagacccggcagagacgtgcccctgcagcccagaggcagcttcaagaagcccagcgccaagcccctgagaaacctgcccagacagaagcccgaggagaacaagacctgcagagcccacagcgagggccccgagagccccaaggaggagcccaagacccccagcgtgcccagcgtgccccacgagctgcccagagtgcccagcttcgccagaaacaccgtggccagcagcagcagaagcatgagaaccgacctgccccccgtggccaaggcccccggcatcaccagaaccgtgagccagagacagctgagagtgaagggcgaccccgaggacgccgcccccaaggacagcagcaccctgagaagagccagcagcgccagagcccccaagaagagacccgagagcgccgagggccccagcgccaacaccgaggcccccctgaaggccagaggcgccggcgagagagccagcctgagaagaaaggacagcagcagaaccaccctgggcagaatcctgaaccccctgagaaagtag

SEQ ID NO: 228498 - DNA, 3432 bp, Artificial Sequence
  derived and/or modified sequence
atgcatgtcatgaactgcgtcagtctggtgtctgacaaagagaacgggaacatagcaacagctcccggattcatgatcggtcaaacaccaccgcccgcacccccgccaccaccccccccccctcccccctcgcctccatgctcatgcagtcgagaggagtgcccctcaagtccgcccccccccccccccccaccacttcccggcgagcctcccattcccccccccccacctggtctgccgccaaccacacacatgaacggctactctcacctcggaaagaagaagcggatgcgatctttcttctggaagactatccccgaagaacaggtcaggggcaagacaaatatttggacattggctgccaggcaggagcatcactatcagattgacacgaaaactatcgaggagttgtttggtcagcaggaggacacaactaaaagtagcctgcctagacgtgggcgcacccttaacagcagtttcagagaggcaagggaagaaattactatcttagatgccaagaggagcatgaacatcggcatctttctgaagcagtttaagaagtctcctcgtagcatcgttgaggacatacaccagggaaaatctgaacattatgggtcagaaacactgcgtgagtttctcaaatttcttccggaaagcgaggaagtcaagaagctgaaagccttctccggggatgtgtctaaactgagtctggctgactcgttcctttacggcctcatccaggtacctaattactcattacggatcgaggccatggtgctgaagaaagaattcctgcccagctgttcatcgttgtataccgatattactgtcctgcggacagctatcaaggaactgatgtcatgcgaggaactacactccatcctccatctggtgttacaggcggggaacattatgaatgcgggtggctatgccggcaacgccgttggatttaagctgtcaagcctgctgaagctcgcggatacgaaagctaataaacccggaatgaacctgctgcatttcgtggctcaggaggcccagaagaaagacactatccttctcaatttctccgaaaagttacaccatgtccagaagaccgctcgtctctcactggagaacacggaagcggaactgcacttgttatttgtcagaaccaagtccctcaaagaaaatatccagagagatggcgagttatgtcagcaaatggaagactttcttcaatttgcgatagagaaattacgtgaactggaatgttggaagcaggagttgcaggacgaagcctacacgcttatcgatttcttttgcgaggacaaaaagactatgaaactggatgagtgcttccagatatttagagatttctgtacaaaattcaacaaggccgtgaaagataaccatgacagggaggcccaggaactccgacaactgcagaggctgaaggagcaggagcagaaacagaggtcctgggctactggtgaactgggggcattcggtagaagttcttctgagaatgatgtggagctccttacaaaaaagggcgcggagggcttgcttccatttttgcacccacgccctattagccctagttccccctcctataggcctccaaacaccaggcggtcaaggctttctctaggccccagcgctgatcgtgaactgctgacctttctggaaagttctacaggttcacctgaggaaccaaataagttccattcactgccccgatcttccccaaggcaagcgcgccctacaatcgcttgcctggagcctgccgaagtcagacatcaggactctagcttcgcccacaagccccaggcctcaggtgggcaggaagaggcacctaatccaccaagtgcacaggcccaccagctggcggctgcccagcccgagaaccacgcctcggctttcccaagagctagacgccagggcgtgtctgtgttgcggaaaagatactctgaaccggtgagtctcggttctgcacagtcacctccactatcacctctggccctgggaatcaaggaacacgaactagttacagggcttgcccaattcaatctccagggatcccaaggcatggaggagacatcccaactcacattatctgacttctctcccatggaactggaatccgtcggccatcgggggcctcaaagcctctccgcctcctcttcgagtctgacccccatgggaagggacgctctcggctcacttagtcctgccctggaggacggcaaggccgcaccagatgaaccagggtcagcggcactcggctctgtgggctctagtgatccagagaacaaagatcctcgacctctgttttgcatatccgatacgaccgactgctctctgacgcttgattgttccgagggcaccgattcacgcccccggggaggggaccctgaagaaggcggggaaggcgatgggtcaatgagttcgggggtgggcgagatgggggatagtcaggtgtcgagcaacccgacttcgagtccacccggcgaggctccggctccagtctccgtagactccgaaccctcctgcaaggggggtttgccacgcgacaagcccaccaaacgaaaggatgtcgtggcaccaaagaggggttccctgaaagaggcatcaccgggcgcatctaaacctggaagcgcacgacgctcccagggggccgtggccaagtcagtgaggaccctcacggccagtgaaaatgagtccatgagaaaggtgatgcccatcaccaaatcctcgcgtggcgccggatggcgtcgtcctgagctttcctccagagggccgtcccagaatccaccaagttctactgacacagtttggagcaggcagaatagcgtccggcgggcttccactggggctgaggagcaacggttgccccgaggcagttcgggaagcagtagcactagacccggaagagatgtgcctttgcaaccgcgaggatcttttaaaaaaccgtccgcaaagcccctaagaaacctgccgcgccaaaagcccgaggaaaataaaacatgcagagctcactccgaaggtcctgagagcccaaaggaggagccgaaaactccatccgtcccctccgttccccacgaactcccccgggttccctcgtttgcgcgcaacactgtggcctcctcatcacggtccatgcgcacagaccttcctcccgttgcaaaagctcccggtataactagaaccgtttcccagagacaactgagagtgaaaggagatccagaggacgctgctcccaaagacagctcgactctgaggcgggcctcatctgcgcgagctccgaagaagcggccagagtctgctgaaggcccctccgcaaatacagaggcacctctcaaagcccgtggcgcgggcgaacgtgcctcgctgcggcggaaggactcttcacgcacaacattggggagaatcttgaaccctctccgcaaatag

SEQ ID NO: 228499 - DNA, 3432 bp, Artificial Sequence
  derived and/or modified sequence
atgcacgtcatgaattgcgtgagcctcgtctcagacaaggagaatggcaacatagccactgcaccagggttcatgatcggtcaaactccgcctcccgctccacctcctccacctcctcctcctcccccatctcccccctgttcatgctcacgcgaggaatgtccttcctctcctccaccacctccccctcccccactgccaggggagccccccatcccacctccacctcccgggttacctccgaccacacatatgaatggctattcacatcttggcaagaaaaaaagaatgaggagctttttctggaaaaccattccggaggaacaagtgcggggcaaaacaaacatctggaccctagccgcaaggcaggagcaccattatcagattgacaccaagacaattgaggagctcttcgggcagcaggaagacacgaccaaaagctctttgccacgcaggggccgcacactgaattcatctttccgcgaagcccgggaagaaatcacaatcctcgacgcaaagcgctcaatgaatatagggatttttctaaaacagtttaagaagtcgccgcggtcgattgtagaggatatacatcagggaaaaagtgagcattatggtagcgagactttgcgggagttcctcaagtttctgcccgagagcgaagaagtgaagaagctcaaagcattttctggtgacgtatctaagctcagtttggctgactccttcttatatggcctgatccaggtcccaaactactcactgaggatcgaggcgatggtgctaaagaaggagttccttccaagctgttcgagcctttatacagacatcacagtgctccgaaccgccattaaggagttgatgtcctgcgaggagctgcactctattctgcatctagtcttacaggccggaaatatcatgaatgccggaggttatgccggcaacgccgtgggattcaaactgagctcgcttctgaagttggctgacacaaaggccaacaaacctgggatgaatctactgcactttgtggcccaggaggcccagaagaaggatactattctgttgaacttttcagagaaactccatcacgttcaaaagactgctcggttatcgctcgagaacaccgaagccgaattgcaccttctgtttgtgcggacaaagagcctaaaggagaacatccagcgagacggagagctgtgccaacagatggaggacttccttcagttcgccatcgagaaactcagagagctcgagtgctggaagcaggaacttcaggacgaagcttacacattgatagatttcttttgcgaagataagaagaccatgaaattggatgagtgctttcaaatctttcgcgatttctgcactaagttcaataaagccgtcaaagacaaccacgatagggaagcccaggaactgcgccaactgcagcggctgaaagaacaagagcagaagcaacggtcctgggccactggcgaattaggagccttcgggcgcagctcctccgagaacgatgtggaactcctcaccaaaaagggggccgaagggctgctgccttttctccatcctcgtcctatctctccctcatctccctcttatagaccccctaacacccgccggagtcggctgtctctgggcccctccgccgaccgtgagcttctcaccttcttggagagttccaccggaagtcccgaggaaccgaataaattccatagcctccctcggtctagcccaaggcaggcgcgacccacaatagcctgtctggaacctgccgaagtgcggcaccaggactctagcttcgcccacaaacctcaggcctccggcgggcaggaagaggcacctaatccaccatctgcccaggctcatcaactggccgccgcccaaccagagaaccacgcttcggccttcccccgggctcgccggcagggcgtgtcggtactcagaaaaagatattctgagccggtgtcgttagggtccgcccagtccccaccactcagtcctcttgccctgggcatcaaggaacatgaattggtgacaggattggcgcaattcaacctacaaggctcccaaggcatggaggagacatctcaattaacccttagcgatttcagcccaatggagttggaaagcgtcggacacagagggccacagtcattatcagcttcgtcatctagcctgactccaatgggaagagacgcgctgggcagtctgtcccccgccctcgaagacggaaaagccgctcccgatgaaccaggatctgcagccctgggcagtgtgggctcttccgatcccgagaacaaagacccccgccccctattttgtatttcggatacgaccgattgttcgctcacactggattgctccgagggaacagactctaggccacgcggaggggaccccgaggagggtggagaaggtgacggtagtatgagctcaggcgtgggcgagatgggggattcccaggtgtcgagcaacccgactagctctcctccaggcgaagcacctgctcccgtctctgtagactcggagccttcttgtaagggaggtttgccccgcgacaaaccgactaaacgcaaggacgttgtggcgcctaagcgcggaagtctaaaagaagccagcccaggggccagcaaacccggaagcgctagaaggtcccagggcgccgtcgccaagtcggtccgtactctgaccgcttctgagaacgagagtatgcgaaaggttatgccgataacaaagagtagtagaggcgctgggtggcgacggccagagttatcctccagggggccttcccaaaatccaccctccagtacggacactgtctggtcacgccagaatagcgtacggcgagcttccaccggcgccgaggagcagagacttcccagaggaagctcgggatcttccagcacacgcccgggaagggatgttccattgcagccaagagggagcttcaagaaaccctccgccaagcccctgcgcaatcttcctcggcagaaaccagaggagaacaagacatgccgggcccactctgaaggccccgaatcccccaaggaggaaccaaaaacgcccagcgtgcctagcgtcccccacgagctaccccgcgtcccatcctttgctcgcaacaccgtggcttcttccagccgctctatgcgaacagacctgcctcctgtagctaaagctcccgggattacgagaacagtgagccagcggcagctgcgggtaaaaggcgatccagaggacgccgcacccaaggattccagcacactgcgtagagcatcctccgctcgcgcacccaaaaaaagacctgagtctgccgaaggcccttccgcaaacacagaagccccactcaaagcccggggagcaggcgaaagagcatcacttaggaggaaggactcttcaaggacgaccctgggtcggattctgaaccccctcaggaagtag

SEQ ID NO: 228500 - DNA, 6480 bp, Artificial Sequence
  derived and/or modified sequence
agtgctacacaagtttgatgtttgtgtcttcttctccaaggccaagaaattatctccataggaggcaacagtactatgcatgttatgaattgtgtctccttggtcagtgataaagaaaatgggaatattgccacagcacctggattcatgattgggcagacacctcctccagcacctcctccacctcctcctccaccccctccatctccaccatgttcatgttcaagggaagagtgtccttcctcccctcctccacccccaccacctccacttcctggggagcctcccatcccacctcccccaccaggcctacccccaactactcacatgaacggctacagccaccttggtaagaaaaagcggatgagaagctttttttggaaaactattccggaggagcaagttcgaggcaaaaccaacatctggaccttggcagccaggcaggaacatcactaccaaattgatacaaagaccattgaggagctctttgggcagcaggaagacaccaccaagtcttcccttcctaggagaggaagaactttaaattcatccttcagagaagctcgagaagagattactattttggatgcaaaacggagcatgaacattgggatatttcttaagcaatttaagaagtctcctcggtccattgtagaagatattcatcaaggaaaaagtgagcattatggatcagagaccttgcgagaatttcttaagtttttgccagagtcagaagaggtaaagaagttaaaagcgtttagtggcgacgtgtcgaagctgtctctggcagattcctttctgtatggcttaattcaggtgccaaactattcacttcggattgaagccatggtgctaaagaaggaatttctaccttcttgctcttctctatatacagatataacagttttaagaactgctataaaagaactgatgtcatgtgaagagctacattcaatattacacttggtgctccaggctgggaatatcatgaatgcaggagggtatgccggcaatgcagtaggatttaaactgtcttctttgctcaaattggcagacacaaaagcaaacaaacctgggatgaatctcctgcactttgttgcacaggaagcccaaaagaaagataccattcttctaaacttttcagaaaaattgcatcatgttcagaagactgctagattatctctggagaacacggaggcagaactgcacttgctgtttgtcaggacaaaatcactaaaagaaaacatccagcgggatggtgaactttgtcagcagatggaagattttcttcagtttgccatagaaaagctgagggaactggaatgctggaaacaagagctccaggatgaggcctacacccttatagattttttctgtgaagacaaaaaaaccatgaaactggatgaatgctttcagatatttagagatttctgtaccaaattcaacaaagcagttaaggacaaccacgaccgggaggcgcaggagctgaggcagctgcagaggctgaaggagcaggagcagaagcagcgctcctgggcaactggggagctgggggcatttggccggagcagcagtgagaatgatgtggagctgctgaccaagaagggtgcagagggcctgctccctttcctgcaccccaggcccatcagcccctccagcccctcctaccggcccccgaacacccgccgctcccgcctctccctgggtccctctgctgaccgggagctgctgaccttcttggagagctccaccggcagccctgaggagcccaataagttccacagcctgccccggagcagcccccggcaggcccggcccacgatagcctgcctggagcctgcagaagtgaggcaccaggactccagctttgcacacaaacctcaggcctcggggggccaggaggaggcccccaacccaccctcagcacaggcgcaccagcttgcagccgcccagcctgagaaccatgcctctgccttccccagagctcggcgccagggcgtcagtgtcctccgaaagaggtacagtgagccggtgagcctgggctcagcacagtcccctcctctctcgccattggctctgggaattaaggagcatgagctggtgacagggctggcccagttcaacctccagggttcccagggcatggaggagacctcccagctgactctgagtgacttcagcccgatggagctagagtctgtggggcataggggcccgcagtccctcagtgccagcagcagcagcctgacacccatgggcagagatgccctggggagtctcagcccagcgctggaggatggcaaggctgcccccgatgagcctggaagtgcagctttgggatctgtgggtagcagcgaccctgagaacaaagatcctagacctctgttctgcatctcggacaccaccgactgctcactgaccctggactgctcagagggaaccgactccagacccagaggcggggacccggaggaaggcggggaaggggatggctccatgtcctctggggttggagaaatgggggacagccaagtctcctccaaccctacatccagcccccctggggaggctcctgcccccgtctctgtggatagtgagcccagctgcaagggcggcctgcccagggacaaacccaccaaaaggaaagatgttgtagcaccaaagagaggctccctgaaagaggcgtctcccggggcctccaagcccgggagcgcccggcggagccagggggcagtggccaagtctgtgcggaccctgaccgcctcagagaacgagagcatgcgcaaggtcatgcccatcaccaagtccagcagaggcgccggctggaggcgaccagagctgtcatcccgggggccctcccagaatccccccagcagcacagatactgtgtggtcacgccagaactccgtgcggagggcctccacaggcgccgaagagcagaggctgccgcgggggagcagcggctccagcagcacccgtccggggagggacgttcccctgcagcccaggggttctttcaagaagcccagtgccaaaccactcaggaacctccccagacagaagcctgaggaaaataagacctgccgcgcccactccgagggccctgagagtcccaaagaagagcccaagaccccgtcagtgcccagcgtcccccacgaactaccccgtgtcccgagctttgcccggaacacagtggcctcctcctctcgaagcatgagaacagatcttcctcccgtggccaaagcccccggcatcactcggacagtgtcgcagcggcagctgagggtgaaaggggaccccgaggatgccgctcccaaggacagcagcactttgaggcgagccagcagtgcccgggcccccaagaagcgcccagagtctgcggagggtcccagtgccaacacggaggcccctctgaaggccagaggggctggggaaagggcctccctccgtcggaaggactccagtcggaccacgctggggagaatcctcaatcccttacggaagtgatgggtgcctgtcctctcctgcctcctgggattcagacggtgaagactgacttctgggacgaggatggggaaagaggcagcatgtctttgttacagataaagcagccactggtgccactgctagtgacgctgttgggatggcacagtccaggaggcctgtggactgcagcctgctgtgctgagccctgctgcagtccagcgtccagatggatgcacgttcactactgtgacggccgcacctcccccatgcaccccaccctcccccaaagcccggatcccgagaaagatttagtaggagtgtaaagtgacattcttatgaaacaagtcaaaaaagtttttttcaggccagtttttatatatcaaagactttctttttaatataaaaattagctaggtgcagtggttcatgcctgtaatccagcactttgggaggctaagatgagtggattgcttgagcctaggagttcgagaccagcctaggcaacatggagaaaccccgtctctatcagaaatacaaaatttagccgagtgtggtggcacatgcctgtggccccagccactctgaacgctgagatgggaaggtcacttgagcccaggaccccaccactgcactccagcctggatgacagagtgagaccttgtctcaaacaaaacaaaacaaaaatgaaatgttctagttttggttccttttgcagagtgaaatgcctcccaggaaaaaaatacatatgtatttttttgcgacagggtcgtgctcttgtctcccagactggactgcagtggcacaatcatagctcactgcagctttgacctcccagacccaagtgatcctcccacctcagcctccctcagagctgggactacaggcgtgcaccaccacgcctggttaattgtttttttttaatttatcttttgtagagatgggatctcactatgttgctcaggctgatctcgagctcctgggctcaagtgatcctcccacctcagcctcccaaagtgctgggattacaggtgtgagccaccacacttggccagtatatcctcagtatgaagatatttttatcttcctgtgttctctggcttcagagtttcacctgcccacacagggtccgttgctggcaactggacttccccataagccttgggtatcctgtgatgggctgtgtctccctgaagattgtctggcttgcccacttctccgtgcatgactctgggtgtgagtctgtctaggaacaggagggaaagttggactcagacagaaatcagatgcttccatgtattcagggcgcgcattgtgagcagtggagtatgagccttgagggcctcatggttgcagggcaggcttccctgcagatgggtggcagcccctggtagaatgctggatttctctggaatctagaagtgccatattttagtggaaaggcatcagggctgtttgacagtgtgcgtctttccaatcccatgttcctccattcgtgtgtctgttataaaactgagtgaaggctgctatgacctgtgttcactctggttacagggaggtgcaaaccattctgtctcccagcctttcttctctctttgtgtgctcccagcacttccttcttttctaacatggcctggagagagtctctctctccttgtctctgtctcttaataatagtttttaacgtggacatctcttccttggtacagtggtttttaaatactgagaagaaccaagtcaggttttttaaagcagactaaaagcatgaaattgctttcagaagaatgtatatcatcgggaaaagttcgggggcagagtgggggaatcaggctttattcaaaagaaacagttgaaaacatgggactttttctacccaatgcccatttcacgactcctctgagactaattgggaaacggggaaattcttggaattttttttttaagaaacttttttgtgttttttttaattttaggtcacttattagtgaaacctcattttagatctgacattggtagatagatggatttaggcaaatatgatgcgtttgtggggaatccacgtggttgacgttagaacctcccttctgcagactgttgcctgtcatctaagcgaattggaaatgctgagcttccataagtcagctgagttttaaaggtaaacgttatggctgaaatagtaaagcacctgaccacaaaacctcttgtaaaaacagccctgagtaggtatttccagggctccacaaagttgcttatgggaatcctgagctgcttttcaccatctcaagaagcctaagaagttatatatttaatcaggtagacaaaacagttcaaagcataaggtccatggtggtggaaaatggatgcaagtgattctaagtttgtggatttgtggatagcagagggatcgggacctcttggaggaaccctgggtaccaagctcccaggcccttcctctatcatggatgctgggtgactttgggaagtcaccacctcttcccaagcctgtttcccatatcacagatgtggggccatggcctcgatgatggtctccacaggtctttccacctctgtgagtccaagtcaggtcaatcagcaaggacccatctctgccctgggtcagctcctcagaaccaacccccagcatctctaaagcaaaagcctcacctcaagggctgctcagaagagagcaccttcagcatgagttgttgctggaagatctaataagctgtgtttcctgggaagtggtgctttacttagccctgtggacaacttctctatgcatctgtgtgagcagatgatcattgtattaccttttatcggtagtaagcttggaaaaataatttaagaatacaatggagaaatgtaaataagtatctatgtaaatttgtttaaaataaactgaatgtatttaatggtccatttatatgttcttttatgtaacatgtagtttaataaagttcctgtttatgagagtcatgtttcatctcagcttcttcc

SEQ ID NO: 228501 - DNA, 6583 bp, Artificial Sequence
  derived and/or modified sequence
acaacggcgggaggctgcagcggtctgcgcgccgggagcgggggcgcgctggccgcgggtttggaagaggacagttgccctttattctggcggcagatagcagcaggtgaaaaagtgctacacaagtttgatgtttgtgtcttcttctccaaggccaagaaattatctccataggaggcaacagtactatgcatgttatgaattgtgtctccttggtcagtgataaagaaaatgggaatattgccacagcacctggattcatgattgggcagacacctcctccagcacctcctccacctcctcctccaccccctccatctccaccatgttcatgttcaagggaagagtgtccttcctcccctcctccacccccaccacctccacttcctggggagcctcccatcccacctcccccaccaggcctacccccaactactcacatgaacggctacagccaccttggtaagaaaaagcggatgagaagctttttttggaaaactattccggaggagcaagttcgaggcaaaaccaacatctggaccttggcagccaggcaggaacatcactaccaaattgatacaaagaccattgaggagctctttgggcagcaggaagacaccaccaagtcttcccttcctaggagaggaagaactttaaattcatccttcagagaagctcgagaagagattactattttggatgcaaaacggagcatgaacattgggatatttcttaagcaatttaagaagtctcctcggtccattgtagaagatattcatcaaggaaaaagtgagcattatggatcagagaccttgcgagaatttcttaagtttttgccagagtcagaagaggtaaagaagttaaaagcgtttagtggcgacgtgtcgaagctgtctctggcagattcctttctgtatggcttaattcaggtgccaaactattcacttcggattgaagccatggtgctaaagaaggaatttctaccttcttgctcttctctatatacagatataacagttttaagaactgctataaaagaactgatgtcatgtgaagagctacattcaatattacacttggtgctccaggctgggaatatcatgaatgcaggagggtatgccggcaatgcagtaggatttaaactgtcttctttgctcaaattggcagacacaaaagcaaacaaacctgggatgaatctcctgcactttgttgcacaggaagcccaaaagaaagataccattcttctaaacttttcagaaaaattgcatcatgttcagaagactgctagattatctctggagaacacggaggcagaactgcacttgctgtttgtcaggacaaaatcactaaaagaaaacatccagcgggatggtgaactttgtcagcagatggaagattttcttcagtttgccatagaaaagctgagggaactggaatgctggaaacaagagctccaggatgaggcctacacccttatagattttttctgtgaagacaaaaaaaccatgaaactggatgaatgctttcagatatttagagatttctgtaccaaattcaacaaagcagttaaggacaaccacgaccgggaggcgcaggagctgaggcagctgcagaggctgaaggagcaggagcagaagcagcgctcctgggcaactggggagctgggggcatttggccggagcagcagtgagaatgatgtggagctgctgaccaagaagggtgcagagggcctgctccctttcctgcaccccaggcccatcagcccctccagcccctcctaccggcccccgaacacccgccgctcccgcctctccctgggtccctctgctgaccgggagctgctgaccttcttggagagctccaccggcagccctgaggagcccaataagttccacagcctgccccggagcagcccccggcaggcccggcccacgatagcctgcctggagcctgcagaagtgaggcaccaggactccagctttgcacacaaacctcaggcctcggggggccaggaggaggcccccaacccaccctcagcacaggcgcaccagcttgcagccgcccagcctgagaaccatgcctctgccttccccagagctcggcgccagggcgtcagtgtcctccgaaagaggtacagtgagccggtgagcctgggctcagcacagtcccctcctctctcgccattggctctgggaattaaggagcatgagctggtgacagggctggcccagttcaacctccagggttcccagggcatggaggagacctcccagctgactctgagtgacttcagcccgatggagctagagtctgtggggcataggggcccgcagtccctcagtgccagcagcagcagcctgacacccatgggcagagatgccctggggagtctcagcccagcgctggaggatggcaaggctgcccccgatgagcctggaagtgcagctttgggatctgtgggtagcagcgaccctgagaacaaagatcctagacctctgttctgcatctcggacaccaccgactgctcactgaccctggactgctcagagggaaccgactccagacccagaggcggggacccggaggaaggcggggaaggggatggctccatgtcctctggggttggagaaatgggggacagccaagtctcctccaaccctacatccagcccccctggggaggctcctgcccccgtctctgtggatagtgagcccagctgcaagggcggcctgcccagggacaaacccaccaaaaggaaagatgttgtagcaccaaagagaggctccctgaaagaggcgtctcccggggcctccaagcccgggagcgcccggcggagccagggggcagtggccaagtctgtgcggaccctgaccgcctcagagaacgagagcatgcgcaaggtcatgcccatcaccaagtccagcagaggcgccggctggaggcgaccagagctgtcatcccgggggccctcccagaatccccccagcagcacagatactgtgtggtcacgccagaactccgtgcggagggcctccacaggcgccgaagagcagaggctgccgcgggggagcagcggctccagcagcacccgtccggggagggacgttcccctgcagcccaggggttctttcaagaagcccagtgccaaaccactcaggaacctccccagacagaagcctgaggaaaataagacctgccgcgcccactccgagggccctgagagtcccaaagaagagcccaagaccccgtcagtgcccagcgtcccccacgaactaccccgtgtcccgagctttgcccggaacacagtggcctcctcctctcgaagcatgagaacagatcttcctcccgtggccaaagcccccggcatcactcggacagtgtcgcagcggcagctgagggtgaaaggggaccccgaggatgccgctcccaaggacagcagcactttgaggcgagccagcagtgcccgggcccccaagaagcgcccagagtctgcggagggtcccagtgccaacacggaggcccctctgaaggccagaggggctggggaaagggcctccctccgtcggaaggactccagtcggaccacgctggggagaatcctcaatcccttacggaagtgatgggtgcctgtcctctcctgcctcctgggattcagacggtgaagactgacttctgggacgaggatggggaaagaggcagcatgtctttgttacagataaagcagccactggtgccactgctagtgacgctgttgggatggcacagtccaggaggcctgtggactgcagcctgctgtgctgagccctgctgcagtccagcgtccagatggatgcacgttcactactgtgacggccgcacctcccccatgcaccccaccctcccccaaagcccggatcccgagaaagatttagtaggagtgtaaagtgacattcttatgaaacaagtcaaaaaagtttttttcaggccagtttttatatatcaaagactttctttttaatataaaaattagctaggtgcagtggttcatgcctgtaatccagcactttgggaggctaagatgagtggattgcttgagcctaggagttcgagaccagcctaggcaacatggagaaaccccgtctctatcagaaatacaaaatttagccgagtgtggtggcacatgcctgtggccccagccactctgaacgctgagatgggaaggtcacttgagcccaggaccccaccactgcactccagcctggatgacagagtgagaccttgtctcaaacaaaacaaaacaaaaatgaaatgttctagttttggttccttttgcagagtgaaatgcctcccaggaaaaaaatacatatgtatttttttgcgacagggtcgtgctcttgtctcccagactggactgcagtggcacaatcatagctcactgcagctttgacctcccagacccaagtgatcctcccacctcagcctccctcagagctgggactacaggcgtgcaccaccacgcctggttaattgtttttttttaatttatcttttgtagagatgggatctcactatgttgctcaggctgatctcgagctcctgggctcaagtgatcctcccacctcagcctcccaaagtgctgggattacaggtgtgagccaccacacttggccagtatatcctcagtatgaagatatttttatcttcctgtgttctctggcttcagagtttcacctgcccacacagggtccgttgctggcaactggacttccccataagccttgggtatcctgtgatgggctgtgtctccctgaagattgtctggcttgcccacttctccgtgcatgactctgggtgtgagtctgtctaggaacaggagggaaagttggactcagacagaaatcagatgcttccatgtattcagggcgcgcattgtgagcagtggagtatgagccttgagggcctcatggttgcagggcaggcttccctgcagatgggtggcagcccctggtagaatgctggatttctctggaatctagaagtgccatattttagtggaaaggcatcagggctgtttgacagtgtgcgtctttccaatcccatgttcctccattcgtgtgtctgttataaaactgagtgaaggctgctatgacctgtgttcactctggttacagggaggtgcaaaccattctgtctcccagcctttcttctctctttgtgtgctcccagcacttccttcttttctaacatggcctggagagagtctctctctccttgtctctgtctcttaataatagtttttaacgtggacatctcttccttggtacagtggtttttaaatactgagaagaaccaagtcaggttttttaaagcagactaaaagcatgaaattgctttcagaagaatgtatatcatcgggaaaagttcgggggcagagtgggggaatcaggctttattcaaaagaaacagttgaaaacatgggactttttctacccaatgcccatttcacgactcctctgagactaattgggaaacggggaaattcttggaattttttttttaagaaacttttttgtgttttttttaattttaggtcacttattagtgaaacctcattttagatctgacattggtagatagatggatttaggcaaatatgatgcgtttgtggggaatccacgtggttgacgttagaacctcccttctgcagactgttgcctgtcatctaagcgaattggaaatgctgagcttccataagtcagctgagttttaaaggtaaacgttatggctgaaatagtaaagcacctgaccacaaaacctcttgtaaaaacagccctgagtaggtatttccagggctccacaaagttgcttatgggaatcctgagctgcttttcaccatctcaagaagcctaagaagttatatatttaatcaggtagacaaaacagttcaaagcataaggtccatggtggtggaaaatggatgcaagtgattctaagtttgtggatttgtggatagcagagggatcgggacctcttggaggaaccctgggtaccaagctcccaggcccttcctctatcatggatgctgggtgactttgggaagtcaccacctcttcccaagcctgtttcccatatcacagatgtggggccatggcctcgatgatggtctccacaggtctttccacctctgtgagtccaagtcaggtcaatcagcaaggacccatctctgccctgggtcagctcctcagaaccaacccccagcatctctaaagcaaaagcctcacctcaagggctgctcagaagagagcaccttcagcatgagttgttgctggaagatctaataagctgtgtttcctgggaagtggtgctttacttagccctgtggacaacttctctatgcatctgtgtgagcagatgatcattgtattaccttttatcggtagtaagcttggaaaaataatttaagaatacaatggagaaatgtaaataagtatctatgtaaatttgtttaaaataaactgaatgtatttaatggtccatttatatgttcttttatgtaacatgtagtttaataaagttcctgtttatgagagtcatgtttcatctc

SEQ ID NO: 228502 - DNA, 3432 bp, Artificial Sequence
  derived and/or modified sequence
atgcacgtgatgaactgtgtgtccctggtgtctgacaaggaaaatggaaacatcgccacagcccctggcttcatgattggccagaccccacctccagcccctcctcctcctcctcctcctcctccacccagccccccctgcagctgcagccgggaggagtgccccagcagccccccacctcctcctcctccacccctgcctggagagccccccatccccccacctcctcctggcctgccccccaccacccacatgaatggctacagccacctgggcaagaagaagaggatgaggagcttcttctggaagaccatccctgaggagcaggtgcggggcaagaccaacatctggaccctggccgcccggcaggagcaccactaccagattgacaccaagaccatcgaggagctgtttggccagcaggaggacaccaccaagagcagcctgccccggcggggccgcaccctgaacagcagcttccgggaggcccgggaggagatcaccatcctggatgccaagaggtccatgaacatcggcatcttcctgaagcagttcaagaagagccccaggagcatcgtggaggacatccaccagggcaagtctgagcactacggcagcgagaccctgcgggagttcctgaagttcctgcctgagagcgaggaggtgaagaagctgaaggccttctctggagatgtgtccaagctgagcctggccgacagcttcctgtatggcctcatccaggtgcccaactacagcctgagaattgaggccatggtgctgaagaaggagttcctgcccagctgcagcagcctgtacacagacatcaccgtgctgaggacagccatcaaggagctgatgagctgtgaggagctgcacagcatcctgcacctggtgctgcaggccggcaacatcatgaatgccggcggctatgctggaaatgctgtgggcttcaagctgagcagcctgctgaagctggccgacaccaaggccaacaagccaggcatgaacctgctgcactttgtggcccaggaggcccagaagaaggacaccatcctgctgaacttcagcgagaagctgcaccacgtgcagaagacagcccggctgagcctggagaacacagaagctgagctgcacctgctgtttgtgaggaccaagagcctgaaggagaacatccagagagatggagagctgtgccagcagatggaggacttcctgcagtttgccatcgagaagctgcgggagctggagtgctggaagcaggagctgcaggatgaggcctacaccctgattgacttcttctgtgaggacaagaagaccatgaagctggatgagtgcttccagatcttccgggacttctgcaccaagttcaacaaggctgtgaaggacaaccacgaccgggaggcccaggagctgcggcagctgcagaggctgaaggagcaggagcagaagcagaggtcctgggccactggagagctgggcgccttcggccgcagcagcagtgaaaatgatgtggagctgctgaccaagaagggagctgagggcctgctgcccttcctgcacccccggcccatcagccccagcagccccagctacagaccacccaacaccaggaggagccggctgagcctgggccccagcgctgaccgggagctgctgaccttcctggagagcagcacaggcagccctgaggagcccaacaagttccacagcctgcccaggagcagcccccggcaggcccggcccaccatcgcctgcctggagcctgctgaggtgcgccaccaggacagcagctttgcccacaagccccaggccagcggcggccaggaggaggcccccaacccccccagcgcccaggcccaccagctggccgccgcccagcctgagaaccacgccagcgccttcccccgggcccggcggcagggcgtgtctgtgctgaggaagcgctacagcgagcctgtgtccctgggcagcgcccagagcccccccctgagccccctggccctgggcatcaaggagcacgagctggtgacaggcctggcccagttcaacctgcagggcagccagggcatggaggagaccagccagctgaccctgagtgacttcagccccatggagctggagagcgtgggccaccggggcccccagagcctgagcgccagcagcagcagcctgacccccatgggcagagatgccctgggcagcctgagccctgccctggaggatggcaaggccgccccagatgagcccggcagcgctgccctgggctctgtgggcagcagtgaccctgagaacaaggacccccggcccctcttctgcatcagtgacaccacagactgcagcctgaccctggactgcagcgagggcacagacagccggccccggggcggggaccctgaggagggcggggagggagatggctccatgagcagcggcgtgggggagatgggagacagccaggtgagcagcaaccccaccagcagccccccaggagaggccccagcccctgtgtctgtggacagcgagcccagctgcaagggcggcctgccccgggacaagcccaccaagaggaaggatgtggtggcccccaagaggggcagcctgaaggaggccagccctggggccagcaagccaggcagcgcccggcgcagccagggcgctgtggccaagtctgtgaggaccctgacagcctctgaaaatgaatccatgaggaaggtgatgcccatcaccaagagcagcagaggagctggctggaggaggcctgagctgagcagccggggccccagccagaacccccccagcagcacagacacagtgtggagccggcagaacagcgtgcggcgggccagcactggagctgaggagcagaggctgccccggggcagcagcggcagcagcagcaccaggcctggaagagatgtgcccctgcagccccggggcagcttcaagaagcccagcgccaagcccctgaggaacctgccccggcagaagccagaggagaacaagacctgccgggcccacagcgagggccctgagagccccaaggaggagcccaagaccccatctgtgcccagcgtgccccatgagctgccccgggtgcccagctttgccaggaacacagtggccagcagcagccgctccatgaggacagacctgccccctgtggccaaggcccctggcatcaccaggacagtgtcccagaggcagctgcgggtgaagggggaccctgaagatgctgcccccaaggacagcagcaccctgcggcgggccagcagcgcccgggcccccaagaagaggcctgagagcgctgagggccccagcgccaacacagaggcccccctgaaggcccggggggccggggagcgggccagcctgcggaggaaggacagcagcaggaccaccctgggccgcatcctgaaccccctgaggaagtag

SEQ ID NO: 228503 - DNA, 3432 bp, Artificial Sequence
  derived and/or modified sequence
atgcacgtgatgaactgcgtgagcctggtgagcgacaaggagaacgggaatatcgcaacagcgcccggctttatgattggacagaccccaccccccgcaccacccccccccccaccaccccctcctcctagccccccctgtagttgttcaagagaggaatgcccttctagccctcccccccctccacctccacccttgcctggggaacctccaattccgcccccgccccctgggttgccaccaaccacccacatgaacggttattctcacttagggaagaaaaagcggatgcgatcgtttttttggaagacaattcccgaagagcaggtgagagggaaaacgaacatctggacgcttgctgccaggcaggaacaccactaccaaatagacactaagactatcgaagagttattcggtcagcaggaggataccactaaatcttctttaccacggcgcggtagaacattgaactcctcttttagagaagcccgcgaagaaatcaccattttagacgccaagcgcagcatgaatatcgggatctttctaaaacagttcaaaaaaagccctaggagtatcgttgaggacattcaccagggcaaaagtgaacattatggtagtgagacacttagagaattccttaagttcttgcccgagagtgaagaagttaaaaagctaaaagcattttccggagacgtatccaaactgagcttggcagacagtttcttgtacggtctcatccaggtccctaattactccttacggattgaagccatggttcttaaaaaagagttccttccttcctgttcctccctgtacaccgatataaccgtactgcgaacggccatcaaggagctgatgtcatgtgaagaactccattctatcttgcacttagtcctgcaggcagggaacatcatgaacgcagggggatatgccggaaatgccgttggcttcaagctgagcagcctcctgaagcttgccgatactaaagctaataagccgggaatgaatctgctccatttcgtggcacaggaggctcagaagaaggacactatccttttgaactttagcgagaaactccaccatgttcaaaagacagcaaggttgtccctcgagaacaccgaagccgaattacatctgctgttcgtgagaactaagagcctgaaagaaaatattcagcgcgatggagaactatgtcaacagatggaggacttcctccagtttgctatcgagaagctgagggagctggagtgttggaagcaggagctgcaagatgaggcctacacgctcatcgatttcttttgcgaggataagaagactatgaaattggatgagtgctttcagatcttcagggatttctgtaccaaatttaacaaggccgtaaaagacaaccatgacagggaagctcaggaactccgacagttgcagagacttaaagagcaagagcagaagcagaggagctgggcaaccggcgagttgggcgccttcggcagatctagttcagagaacgatgtggagctgctgaccaagaagggtgcagaggggctgctgccgttcctgcacccacgacctatcagcccatccagcccatcttatcgcccccccaacaccagacgttcacgcttgagcctggggcccagcgctgaccgggaactcttaactttcctcgaatcaagcacaggcagccccgaggaacccaacaaatttcatagcttaccacgctcctcgccaaggcaggcgcgcccaactatagcatgcctagagcccgccgaggtaaggcaccaggactcatcatttgcccacaagcctcaggcctctggtgggcaggaagaagctcccaatccgccttctgcacaggcccatcagttagcagcagcccagcctgagaaccacgcttctgcatttcctcgcgctcgacggcagggtgtcagcgtactgcggaaacgttactctgaacctgtctcactgggatccgcccagtccccacccctgagtcctctcgcgctgggaatcaaggaacacgagctggtgactggactggcccaatttaatttgcaaggcagtcagggcatggaagagaccagccaactaacgctctctgattttagcccaatggaactggagtcggtgggacacagagggccacaatctttgtcagcctctagttcctcattaactcctatgggcagggacgccctgggtagcttgtccccagctcttgaggatggcaaagccgccccggacgagcctggatcagcagctctaggaagcgtaggttcttccgatccagagaacaaagaccctcgccctcttttctgcatttccgatactaccgactgttctctcaccctggactgctcggagggaacagattcacgacctcgcgggggggacccagaggagggcggggagggagacgggtctatgtctagcggcgtaggggaaatgggggactcgcaggtcagtagtaacccaacaagctcaccgccaggagaggcacctgctcccgtgtcggttgattcagaaccaagctgcaagggcgggctgcccagggacaagcctacaaagaggaaggacgtggtggcccccaagagagggtcccttaaagaggctagccctggtgcctcaaaaccaggctcggctaggagatcacaaggcgctgtggctaaatccgtaaggacgctgactgcctcagagaatgagtcgatgagaaaggtcatgcctatcaccaaaagttccaggggtgcaggatggaggcgtcctgagctatcatcccggggcccttcccagaaccccccttccagcactgatactgtgtggtcacgtcaaaactccgtcagaagggcttctactggagcagaagaacagcgcttgccccgtgggagttccggctcatcatcaactcgcccagggcgcgatgtgcccttacagccccgtgggtcattcaagaaaccatctgctaagcccctgaggaacctcccccgccagaaacctgaagaaaacaaaacatgcagggcgcactctgaaggaccggagtctcccaaggaggaacccaagacaccttccgtcccttcggttccacacgagctgccaagggttccaagcttcgccaggaacaccgtggccagttcaagccggtcaatgaggactgatttgccccccgtagcaaaagcccctgggattacccgcacggtgtcacagagacagttgcgggtgaagggcgatcccgaggatgctgcaccgaaagattcaagtaccttaaggagagccagttcggcacgcgcccccaagaagaggcctgaatcagccgagggaccaagcgccaatactgaggctcctctgaaagccagaggagccggtgagcgcgcgtccctaagaagaaaggactcctctcggactacattaggcaggatattaaatcctctgaggaaatag

SEQ ID NO: 228504 - DNA, 3432 bp, Artificial Sequence
  derived and/or modified sequence
atgcacgtgatgaactgcgtgagcctggtgagcgacaaggagaacggtaacatcgccaccgcgcctggattcatgatcggccagacccccccccccgcccccccccctcccccgcctcctcccccaccatcgccgccttgcagctgcagccgggaggagtgcccttcctcaccccccccgccaccaccaccccctctaccaggcgaaccacccattcctccccctcccccaggactgccacctaccactcatatgaatggctattctcatctagggaagaaaaagcggatgaggtcatttttctggaagactatacctgaagagcaggtgaggggaaaaaccaacatttggacgctcgctgcgaggcaggagcatcactatcagattgacaccaaaacaatagaggaactcttcggtcagcaagaagatactactaaatccagtctgcctcggcgagggcgtacgctcaacagctcctttagggaggcacgtgaggagattaccattctcgacgctaagaggtcgatgaacatcggtatcttcctgaaacaattcaaaaaatccccccggagtatcgtggaggacattcatcaagggaaaagtgaacattacggaagcgaaaccctacgcgaattcctgaaattcctgccggagagcgaggaggtcaaaaagcttaaagctttctccggagacgtgtcgaaactctccctggctgacagcttcctgtatggactcatacaggtccctaactatagccttcggattgaggctatggttctgaagaaggagtttctgccctcatgtagcagcctttataccgatattacggtcctgcgtaccgccattaaagagttaatgagctgcgaggaactccatagtatcctgcatctggtcttgcaagctggcaatatcatgaacgccggggggtacgccggcaacgccgtcggctttaagctgtcatcactcctgaaacttgcggacactaaggctaataagccgggtatgaaccttctgcacttcgtcgcccaggaggctcagaagaaggatacgattcttcttaactttagtgagaaactgcatcacgtgcagaagacagcccgactcagccttgaaaataccgaagcagagctacacctgctctttgtgcgaactaaatcattgaaggaaaacatccagcgcgacggtgagttgtgccagcagatggaggattttttgcagttcgctattgagaagctgcgcgagctagaatgctggaagcaagagctgcaagacgaggcatatactctgattgacttcttctgtgaagacaagaagactatgaagctcgatgagtgcttccaaattttccgtgacttctgcactaagttcaacaaagctgtgaaggacaatcacgatagggaggcccaggaattaagacagctgcagaggttaaaagagcaggagcagaagcagaggagctgggctacgggcgaattaggcgcattcgggcgctcatcgtccgagaacgatgtggaactcctgacaaaaaagggagccgagggcttgttgccgttccttcacccaaggcccattagcccctcatcaccatcctacagacctcccaacacacggcgctctcgtttatcactgggcccatcagcagatcgtgaactgcttaccttcctagagtcctctacaggctcacccgaagagccaaacaaattccattccctgccccgctcttctcccaggcaggcaaggcctaccatcgcttgtctggaaccagcggaagtgagacaccaggattcttcattcgcccacaagccccaggcttctggtggccaggaagaggcaccaaatcctccttctgctcaggctcaccaacttgctgccgctcagcccgagaatcatgctagtgcctttcctcgtgctcgtcgacagggcgtatctgtgctaaggaaacgctacagtgagcctgtgtcccttggttctgcacagtcgcctccactgtcacccctggctctgggtatcaaagagcacgagctcgttacaggccttgcccagtttaatctgcagggctcccagggcatggaagagacaagccagctgaccttgtcggatttctcccccatggagctggagtccgttgggcatcgcggaccacagtccctaagcgcctctagttcctctctcacaccaatgggtcgcgacgctctcggtagtctctctcctgcactcgaggatggaaaggctgccccagatgagcccggctccgcagcccttggctccgttggatcaagcgacccagagaataaagacccccgtcccctgttctgcatcagcgacacaacggattgtagcctcactttagactgttcagaaggaactgacagcagacctcgtgggggcgacccagaagaaggcggggaaggcgacggaagtatgagcagtggagtcggcgaaatgggtgactcacaggtcagttcaaaccccacatcaagcccacctggtgaggctccggcacctgtctctgtcgacagcgagccctcctgcaagggcggactgcctcgcgacaaacctaccaagaggaaggatgtggttgctcctaagcgcggcagcttaaaagaagcctctcccggcgccagcaagcccggatctgctcggaggagccagggagcagttgcaaagagcgtgagaaccctcaccgcaagtgagaacgagtccatgagaaaagtcatgccaatcaccaagtcctcgcgcggcgccggttggcggagaccagagctttccagcagaggcccttcccagaatcctcctagctcaactgacacagtttggagtaggcagaactctgtcagaagagcatctactggggctgaggagcaacggttgccgcgcggtagttcagggtccagttccactcgccctggccgggatgttccactgcagcctcgcggttccttcaagaagccttctgccaaacctctcaggaacctgccgcgacagaagccagaggagaataaaacctgtcgagcccattctgaaggacctgagtcccctaaggaagagcctaaaactcccagtgttccatcagtaccccatgagttgccacgggtgccaagtttcgccagaaatacggtcgcatcgtcgtcacggtctatgcgcacagatctcccccctgtcgctaaggctccaggcataaccaggacagtgagccagagacagttgcgggttaagggcgaccccgaggacgcagccccaaaggacagctcgacactcaggcgtgcttcgtcagctagagccccgaaaaagaggccagagagcgcagaaggaccctcagcaaacaccgaagctcccctcaaggcccgtggagctggggagcgtgcctcgctgcggcgcaaagactctagcaggaccacattgggccgaatcctgaaccccctccggaaatag

SEQ ID NO: 228505 - DNA, 3432 bp, Artificial Sequence
  derived and/or modified sequence
atgcatgtcatgaactgcgtaagtctggtctccgacaaggaaaacggaaacattgctacagccccagggttcatgattggacaaactccaccaccagctccccctccgccaccaccgccaccacccccatcacccccatgtagttgctcccgcgaggagtgcccttcatccccccctcctccccctcccccaccactacctggagaacctccaatcccacctcccccaccaggcctccccccaaccacccatatgaatggatattctcaccttggcaaaaaaaagcggatgagaagtttcttctggaagactatacccgaggaacaagtgcggggaaagacaaatatctggacccttgcggcacggcaagagcaccattaccagatagatacaaagactatcgaagagctttttggacagcaggaagatacgacaaaaagctctttgccacgacggggtaggacactaaatagttccttccgagaggcacgtgaggagatcactatccttgacgcaaaaaggtctatgaatatcggaatttttctcaaacagttcaaaaagtcacccagatctatcgtggaggatatacatcagggcaaaagtgaacactatgggtcggaaactcttagagagttcctgaaattcctgccagagtctgaagaggtcaagaaactgaaggcttttagcggcgacgtgtctaaacttagtttggctgacagtttcctttatggcttaattcaagtgcctaactattctctccgtatagaggccatggtcctgaaaaaggaatttctgccctcatgctcctctttgtatacagatataactgtcctcaggaccgcgatcaaagaactgatgtcatgcgaggaactccatagcatattgcacctggtcctccaggctggaaacattatgaatgccggtggatacgccggtaacgcggtaggatttaagctctcgagcttattgaaactggcggacaccaaggccaataagccagggatgaacctgctgcacttcgtagctcaagaggctcagaagaaggacacaatccttttgaatttcagcgagaagctgcaccacgtccagaagactgcccgtctgtcactggagaacaccgaggctgagctgcatctgctgttcgtgcggactaagtccctgaaagagaatatccagcgggacggtgagctgtgccagcagatggaagactttctgcaattcgctattgagaaactgcgggagctcgagtgttggaagcaggagctgcaggatgaagcatacacactgatcgactttttctgcgaggataagaagacaatgaaactggacgaatgcttccaaatctttagggacttctgcacgaagttcaacaaagccgtaaaagacaatcatgatcgcgaggctcaggaattgcggcagctgcagcgcctcaaggagcaggagcaaaaacagcgtagttgggctacaggcgagttgggcgcttttggccgttcttccagtgaaaatgatgtcgaactgctcacaaaaaagggcgcagaagggctgttgccattcctgcatccgagaccaatctccccgagctccccaagctatagacctcctaacacccgcaggtcccggttaagtctgggcccatcagcagaccgcgagttactcacattcctggagtccagcacaggctcacccgaggaacccaataaattccatagtttaccacgcagttcaccacgccaagcacggccaaccatcgcgtgcttggaacctgccgaggtacgccatcaggactccagtttcgcacataagccccaagcgtctgggggacaggaggaagcgccaaacccaccttcagcacaggctcatcagctagccgcagctcaacccgagaaccacgctagtgcctttccaagggccagaaggcaaggggtctctgttcttcgcaaacgctattcagagcccgttagcttgggatctgctcagtcccctcctctctccccacttgcactgggcatcaaggaacatgagctggtaacagggctagcacagttcaacctacagggttctcagggaatggaagaaacaagtcagttgaccttgtctgatttctctcccatggaattggaaagtgtgggccataggggacctcaatctttatctgcaagctccagctccttgactcccatgggcagggacgccttgggttcactctctcctgctttagaagatgggaaagccgcacccgacgagccagggagcgcagccctgggtagcgtaggtagcagtgacccagagaacaaagacccaagaccactgttttgtataagcgacacaacagactgctccctgacactggattgctccgaaggcacagactctagaccacgcggtggagaccccgaggaggggggagagggggacggctccatgagttcaggagtgggtgaaatgggcgactcacaggttagcagtaatcctacttcctcacctcctggggaagccccagctccagtgtccgtggacagtgagccttcctgcaaaggcggtctcccgagagataaacccactaaaaggaaggacgtggtggctccaaaacgcggaagtctaaaggaagcctccccaggagcatccaaacccggttctgccagacggagtcagggggctgttgccaaatccgtgagaactctgacggccagcgagaatgaatctatgaggaaagtaatgcccattactaagtccagtcgtggcgcaggctggcgtaggcctgagctaagctcgcgaggacctagccaaaatcctccaagctctacggatactgtttggtcgcgccaaaattctgtgcggagagccagtaccggcgctgaggagcaacggcttcctcgtggcagtagtggcagcagctccactaggcctgggcgagatgtgccgctgcagcctaggggttctttcaaaaagccatccgccaaacccctgcggaacctaccgcgtcaaaagcccgaggagaataagacttgtagggctcatagcgagggccctgagtccccaaaggaggagcctaaaactccatccgtcccttcagtgcctcacgagttgcccagggtaccttcttttgctcgcaatacagttgcttccagctcacggagtatgcgaaccgatctgcctcccgtcgcaaaggctccaggtatcacacgaacagtgagccaaagacagctacgcgttaaaggagacccagaggacgcagcccctaaggacagtagcaccctgcgacgcgcatcatccgccagggcccctaagaagcggccagaatctgccgagggcccaagtgctaataccgaggcgcctttgaaggcgagaggggcaggggagagggcctccttacggcgaaaggactcatctaggaccacactggggcgtattctcaaccctctgcggaagtag

SEQ ID NO: 228506 - DNA, 3432 bp, Artificial Sequence
  derived and/or modified sequence
atgcatgttatgaactgcgtgagcctcgtgtccgataaggagaatggtaacatagctacagctcccggttttatgataggtcagaccccacccccagctccccctccaccaccacccccaccacccccatctcctccatgcagttgtagtagggaggaatgtccaagtagcccgcctccacctccgcctccaccactgcccggagagccaccaatccctccccctccaccaggtcttccccctactacacacatgaatggatattctcacttaggaaaaaagaaacgtatgcgatcctttttttggaaaactatccctgaggaacaggttcgcggaaagactaatatctggaccctcgcggcacgtcaggagcatcattaccagattgatacgaagactattgaagagctgttcggacagcaagaggacaccaccaaatcaagcctgccacgtagaggccgaacccttaactcttcattccgtgaagccagggaagagataaccattttggacgctaagagaagtatgaacatcggtatctttcttaagcagtttaagaagtccccccgatccatcgtcgaagacatccatcaggggaagtccgagcactatggctctgagactctcagagaattcctgaaatttctgccagagtccgaggaggtaaagaaacttaaagcgttttcaggtgatgtgtctaagctgtcccttgcagattcgttcctgtatggcctcattcaggtgccaaattacagcctgcggattgaggccatggtgctcaagaaagagttcctccctagttgcagttcactgtacaccgatatcactgtcctgcgaaccgccattaaggagctgatgtcgtgcgaagaattgcactccatactccatttggtattacaggcgggaaatattatgaacgcaggaggctacgccggtaatgccgtaggctttaaattgagttccctccttaaattagctgataccaaggcaaataagcccggaatgaacctcctacacttcgtggcccaggaagcccagaagaaggataccatcctgctcaacttttccgaaaagctgcatcacgtccagaaaaccgccagactctccttagagaatactgaggccgaactgcaccttcttttcgtccgtacgaagagtctcaaagaaaacattcagcgtgatggcgaactgtgccaacagatggaagattttctccaatttgctattgaaaagcttcgtgagctggaatgttggaaacaggaattacaggacgaggcttacaccctgattgacttcttttgtgaggataaaaaaacgatgaaattggacgagtgcttccagattttcagagatttttgcaccaagtttaacaaggccgtgaaggacaatcacgaccgcgaagcacaggaacttcgccagctccagagacttaaggaacaggaacagaagcaaaggagttgggcaactggggaactaggcgcattcggtcggagcagtagcgaaaatgatgttgagctgctgaccaaaaagggtgcagaaggcttactccccttcctgcatccccgacccataagcccctcatccccaagctatcggcctcctaacaccagacgtagtaggctaagcttgggcccttccgccgatagggagctgcttacctttctagagtcaagtacgggctcccccgaggaaccaaataagttccactctctgcctagaagctcccctcggcaggcccgacccaccatcgcttgcctggaaccagctgaggtgcggcaccaggactcctctttcgcccataagccgcaagcctccggcggacaggaagaagcccctaacccaccatccgctcaggctcaccagctggccgctgcccagccagagaaccatgcctcggcatttcctcgtgcgcgaagacaaggtgtttccgttctaagaaaacgttattcggagcccgtctctttgggctcggcacagtccccacctctaagccctctcgcgctcgggatcaaggaacacgaactggtcaccggactggcccagttcaaccttcagggttcccagggcatggaagagaccagccaactgacgctcagcgatttctctcccatggaactggagtctgtgggacatcgtggaccccagagcctctctgcatcttcttctagccttacacccatgggccgagacgcccttggttcgctgtcgccagccttggaagatgggaaagctgcacctgacgagcccggaagcgctgccttggggtctgttggatcttcagaccccgagaacaaagaccctcgccctctcttttgcatttctgatactaccgattgctcgctcacccttgactgcagcgaagggaccgactcccgacccagaggcggagaccccgaggaggggggtgagggtgatggctctatgagcagcggcgtaggcgaaatgggtgactcgcaagtgagcagtaatccaacaagctccccacctggcgaagcacctgcacctgtgagtgtggatagcgagccgagctgcaaaggcggactaccaagggataaaccgaccaagcgtaaagatgtggtcgcgccaaagaggggatcactgaaggaagccagtccaggggcatcaaagcccggaagcgcaaggagatcacagggcgcagtggcgaaatctgtcagaacactcaccgcgtcagagaacgaatcaatgagaaaggtgatgcccataactaagagctcccgtggggcaggatggagaaggcctgagttgagcagcagaggacccagccaaaatcccccaagcagcactgatacggtctggtcacggcagaactctgtgagacgagccagtactggagccgaggagcagcggctacccagaggctccagtgggtcctcatctacccggcctgggagggacgtcccactccaaccacgcggttcctttaagaagccgtcggccaaaccgttacgcaatttgcccaggcagaagccagaggagaataagacatgtagagcacatagtgaagggccagaatcccccaaagaagagcctaaaacgccatctgttcctagtgtaccacacgagcttcctcgggtcccctcatttgcgaggaatacggttgcctcaagtagcaggagcatgaggacggacctacccccagtggcgaaggccccaggtattactcggaccgtgtctcagcggcagctgcgtgtgaagggagaccccgaggacgccgcacccaaagacagtagtacccttagacgagccagctcggccagggctccgaagaaaagaccagaatccgcagaggggccatccgcaaatactgaggctcctttgaaggcacggggagccggagagcgggcatcactcagacgcaaagatagttcccgcacaacgctgggacggattctgaatcctctccgtaaatag

SEQ ID NO: 228507 - DNA, 5586 bp, Artificial Sequence
  derived and/or modified sequence
atgctgaaggccgtgctgaagaagagcagagagggcggcaagggcggcaagaaggaggccggcagcgacttcggccccgagaccagccccgtgctgcacctggaccacagcgccgacagccccgtgagcagcctgcccaccgccgaggacacctacagagtgagcctggccaagggcgtgagcatgagcctgcccagcagccccctgctgcccagacagagccacctggtgcagagcagagtgaacaagaagagccccggccccgtgagaaagcccaagtacgtggagagccccagagtgcccggcgacgccgtgatcatgcccttcagagaggtggccaagcccaccgagcccgacgagcacgaggccaaggccgacaacgagcccagctgcagccccgccgcccaggagctgctgaccagactgggcttcctgctgggcgagggcatccccagcgccacccacatcaccatcgaggacaagaacgagaccatgtgcaccgccctgagccagggcatcagcccctgcagcaccctgaccagcagcaccgccagccccagcaccgacagcccctgcagcaccctgaacagctgcgtgagcaagaccgccgccaacaagagcccctgcgagaccatcagcagccccagcagcaccctggagagcaaggacagcggcatcatcgccaccatcaccagcagcagcgagaacgacgacagaagcggcagcagcctggagtggaacaaggacggcaacctgagactgggcgtgcagaagggcgtgctgcacgacagaagagccgacaactgcagccccgtggccgaggaggagaccaccggcagcgccgagagcaccctgcccaaggccgagagcagcgccggcgacggccccgtgccctacagccagggcagcagcagcctgatcatgcccagacccaacagcgtggccgccaccagcagcaccaagctggaggacctgagctacctggacggccagagaaacgcccccctgagaaccagcatcagactgccctggcacaacaccgccggcggcagagcccaggaggtgaaggccagattcgccccctacaagccccaggacatcctgctgaagcccctgctgttcgaggtgcccagcatcaccaccgacagcgtgttcgtgggcagagactggctgttccaccagatcgaggagaacctgagaaacaccgagctggccgagaacagaggcgccgtggtggtgggcaacgtgggcttcggcaagaccgccatcatcagcaagctggtggccctgagctgccacggcagcagaatgagacagatcgccagcaacagccccggcagcagccccaagaccagcgaccccacccaggacctgcacttcacccccctgctgagccccagcagcagcaccagcgccagcagcaccgccaagacccccctgggcagcatcagcgccgagaaccagagacccagagaggacgccgtgaagtacctggccagcaaggtggtggcctaccactactgccaggccgacaacacctacacctgcctggtgcccgagttcgtgcacagcatcgccgccctgctgtgcagaagccaccagctggccgcctacagagacctgctgatcaaggagccccagctgcagagcatgctgagcctgagaagctgcgtgcaggaccccgtggccgccttcaagagaggcgtgctggagcccctgaccaacctgagaaacgagcagaagatccccgaggaggagtacatcatcctgatcgacggcctgaacgaggccgagttccacaagcccgactacggcgacaccctgagcagcttcatcaccaagatcatcagcaagttccccgcctggctgaagctgatcgtgaccgtgagagccaacttccaggagatcatcagcgccctgcccttcgtgaagctgagcctggacgacttccccgacaacaaggacatccacagcgacctgcacgcctacgtgcagcacagagtgcacagcagccaggacatcctgagcaacatcagcctgaacggcaaggccgacgccaccctgatcggcaaggtgagcagccacctggtgctgagaagcctgggcagctacctgtacctgaagctgaccctggacctgttccagagaggccacctggtgatcaagagcgccagctacaaggtggtgcccgtgagcctgagcgagctgtacctgctgcagtgcaacatgaagttcatgacccagagcgccttcgagagagccctgcccatcctgaacgtggccctggccagcctgcaccccatgaccgacgagcagatcttccaggccatcaacgccggccacatccagggcgagcagggctgggaggacttccagcagagaatggacgccctgagctgcttcctgatcaagagaagagacaagaccagaatgttctgccaccccagcttcagagagtggctggtgtggagagccgacggcgagaacaccgccttcctgtgcgagcccagaaacggccacgccctgctggccttcatgttcagcagacaggagggcaagctgaacagacagcagaccatggagctgggccaccacatcctgaaggcccacatcttcaagggcctgagcaagaagaccggcatcagcagcagccacctgcaggccctgtggatcggctacagcaccgagggcctgagcgccgccctggccagcctgagaaacctgtacacccccaacgtgaaggtgagcagactgctgatcctgggcggcgccaacgtgaactacagaaccgaggtgctgaacaacgcccccatcctgtgcgtgcagagccacctgggccacgaggaggtggtgaccctgctgctggagttcggcgcctgcctggacggcaccagcgagaacggcatgaccgccctgtgctacgccgccgccgccggccacatgaagctggtgtgcctgctgaccaagaagggcgtgagagtggaccacctggacaagaagggccagtgcgccctggtgcacagcgccctgagaggccacggcgacatcctgcagtacctgctgacctgcgagtggagccccggccccccccagcccggcaccctgagaaagagccacgccctgcagcaggccctgaccgccgccgccagcatgggccacagcagcgtggtgcagtgcctgctgggcatggagaaggagcacgaggtggaggtgaacggcaccgacaccctgtggggcgagaccgccctgaccgccgccgccggcagaggcaagctggaggtgtgcgagctgctgctgggccacggcgccgccgtgagcagaaccaacagaagaggcgtgccccccctgttctgcgccgccagacagggccactggcagatcgtgagactgctgctggagagaggctgcgacgtgaacctgagcgacaagcagggcagaacccccctgatggtggccgcctgcgagggccacctgagcaccgtggagttcctgctgagcaagggcgccgccctgagcagcctggacaaggagggcctgagcgccctgagctgggcctgcctgaagggccacagagccgtggtgcagtacctggtggaggagggcgccgccatcgaccagaccgacaagaacggcagaacccccctggacctggccgccttctacggcgacgccgagaccgtgctgtacctggtggagaagggcgccgtgatcgagcacgtggaccacagcggcatgagacccctggacagagccatcggctgcagaaacaccagcgtggtggtggccctgctgagaaagggcgccaagctgggcaacgccgcctgggccatggccaccagcaagcccgacatcctgatcatcctgctgcagaagctgatggaggagggcaacgtgatgtacaagaagggcaagatgaaggaggccgcccagagataccagtacgccctgagaaagttccccagagagggcttcggcgaggacatgagacccttcaacgagctgagagtgagcctgtacctgaacctgagcagatgcagaagaaagaccaacgacttcggcatggccgaggagttcgccagcaaggccctggagctgaagcccaagagctacgaggccttctacgccagagccagagccaagagaaacagcagacagttcgtggccgccctggccgacctgcaggaggccgtgaagctgtgccccaccaaccaggaggtgaagagactgctggccagagtggaggaggagtgcaagcagctgcagagaagccagcagcagaagcagcagggccccctgcccgcccccctgaacgacagcgagaacgaggaggacacccccacccccggcctgagcgaccacttccacagcgaggagaccgaggaggaggagaccagcccccaggaggagagcgtgagccccacccccagaagccagcccagcagcagcgtgcccagcagctacatcagaaacctgcaggagggcctgcagagcaagggcagacccgtgagcccccagagcagagccggcatcggcaagagcctgagagagcccgtggcccagcccggcctgctgctgcagcccagcaagcaggcccagatcgtgaagaccagccagcacctgggcagcggccagagcgccgtgagaaacggcagcatgaaggtgcagatcagcagccagaaccccccccccagccccatgcccggcagaatcgccgccacccccgccggcagcagaacccagcacctggagggcaccggcaccttcaccaccagagccggctgcggccacttcggcgacagactgggccccagccagaacgtgagactgcagtgcggcgagaacggccccgcccaccccctgcccagcaagaccaagaccaccgagagactgctgagccacagcagcgtggccgtggacgccgccccccccaaccagggcggcctggccacctgcagcgacgtgagacaccccgccagcctgaccagcagcggcagcagcggcagccccagcagcagcatcaagatgagcagcagcaccagcagcctgaccagcagcagcagcttcagcgacggcttcaaggtgcagggccccgacaccagaatcaaggacaaggtggtgacccacgtgcagagcggcaccgccgagcacagacccagaaacacccccttcatgggcatcatggacaagaccgccagattccagcagcagagcaacccccccagcagaagctggcactgccccgcccccgagggcctgctgaccaacaccagcagcgccgccggcctgcagagcgccaacaccgagaagcccagcctgatgcaggtgggcggctacaacaaccaggccaagacctgcagcgtgagcaccctgagcgccagcgtgcacaacggcgcccaggtgaaggagctggaggagagcaagtgccagatccccgtgcacagccaggagaacagaatcaccaagaccgtgagccacctgtaccaggagagcatcagcaagcagcagccccacatcagcaacgaggcccacagaagccacctgaccgccgccaagcccaagagaagcttcatcgagagcaacgtgtag

SEQ ID NO: 228508 - DNA, 5586 bp, Artificial Sequence
  derived and/or modified sequence
atgttaaaagccgttctcaagaaatcaagagaaggcggaaaagggggcaagaaagaagccgggagcgattttggcccggagactagtcctgtcctacacttggatcactcagccgactcaccagtgtcaagtttgcctacggcggaggacacctatcgggtgtctctcgccaagggtgtgtccatgtcacttccgtcctcccctctactgccccgccaaagccatcttgtccagtcaagagtgaacaagaagagtcccggcccagttcggaagcctaagtacgtcgaaagcccccgggttcccggtgacgctgtcatcatgcctttccgggaagtggccaagcctacggaacccgacgagcatgaagcaaaagctgacaacgagccttcgtgcagccccgctgcacaggaactgctcacaaggcttgggttcctgctgggcgagggaattccctctgccacccatattacaattgaggacaagaacgagaccatgtgcaccgccctgtcacaagggatctccccgtgttctacactaacctcatctactgcttcaccttccaccgatagcccatgcagcactttaaacagctgcgtgagcaagacggccgccaataagagtccctgtgaaacaatcagcagcccatcctccacccttgaaagcaaagactccggtattatagctacaataactagctcctcagaaaatgacgaccgctcggggagttctctggagtggaataaggatggcaatttgcggttgggggttcagaaaggggtgctgcatgaccgaagggctgacaattgctctcccgtagccgaagaggagacaaccgggagcgccgagtctaccctccccaaggccgagtcgagcgctggcgacgggcctgtcccttactcccagggcagcagcagtctgataatgccccggcccaatagcgtggctgcgaccagcagtactaagcttgaggatttgtcctatcttgatgggcagagaaacgcaccgctcagaacctctatccggttgccctggcacaacacggcaggcggccgcgcacaggaggtaaaggcaagattcgctccctataagcctcaggacattctgttgaagccgttgctgttcgaggtcccatctattacaacggactctgtttttgttggtcgtgactggctgtttcaccaaatcgaggaaaatctccgcaataccgagctggctgagaacaggggtgccgttgtggtgggaaacgtgggttttggtaaaaccgctatcatctctaaactggtcgcgctgagctgccacggttcaagaatgagacaaatcgcaagcaattcccccggcagctcccctaagacatccgatcccactcaggacttgcatttcacaccgctgttgagtcctagtagttccacgagcgctagctctacagccaaaactcctttggggagcataagcgcagaaaatcagaggcctagggaggatgctgtgaagtatctggcttctaaggtggtggcctaccattattgtcaggccgataatacatacacgtgcctggttcctgaatttgtgcacagcatcgccgccctgctgtgtcgatcccaccagctggccgcctatcgggacctgttaattaaggagccccagctgcagagcatgttaagtctgcgaagctgcgtgcaggatccagtagccgcgtttaaaagaggtgtgctggagcctctgacaaacctaagaaatgaacagaaaatcccggaggaggaatacattattcttatcgatggcctgaacgaggcagagttccacaaacctgactatggcgacaccctgtcttcatttatcacaaagatcatcagtaagttccccgcctggcttaagctgatcgtcaccgtgcgtgctaatttccaagagattatctccgcactgccctttgtcaaattatctctggacgattttccagacaataaggacatccattcagatctgcacgcttacgtgcagcaccgtgtgcatagtagtcaggacatcctgtctaatatatctctgaacggcaaggcagatgccaccctgattggaaaagtgtcctcacacctcgttctcaggagcctagggtcttacctgtatctgaaactcactcttgacctgttccagcgaggtcacttagtgattaaatccgcatcgtacaaagtggttcctgtgagtctgtccgaactgtacctgctgcaatgtaatatgaagtttatgacacaatctgcttttgaaagagccctccctatactgaacgtcgccctcgcatcccttcatcccatgacagatgagcagatcttccaggcgatcaacgcaggccatatacaaggggagcagggctgggaagacttccagcagcgcatggacgcattatcatgtttcctgatcaaacgccgcgacaagacacgcatgttttgccacccatcttttagagaatggcttgtttggagggcagatggcgagaataccgcttttctgtgtgaacctaggaatggacatgccctgttagccttcatgttttctagacaggaaggtaaactgaacagacagcaaactatggagctgggccaccatattctgaaggcccatatcttcaagggcctcagtaaaaagaccggtatcagtagttctcatctgcaggccctctggattggttattccactgagggactatcagccgcccttgcctcgctcaggaatttgtacacccctaacgtgaaagttagcaggctgctgatcctgggaggggccaacgtcaattatcgaacagaggtgctcaacaacgctcccattctgtgcgttcagtcacacctgggccatgaggaagtggtgaccctcctcctcgagtttggagcctgcctggacgggacaagcgagaacggaatgactgccctatgctacgccgccgcagctgggcacatgaagctggtctgtctattgacaaaaaaaggagtgcgggttgatcacctggacaagaagggtcagtgtgccctagttcacagcgccctccgtgggcatggcgacatcttgcagtacctgctcacctgtgagtggtccccaggtcctccccagcctggaactctgcggaaatctcacgcacttcagcaagcactcactgccgccgccagcatgggccactctagtgtggtccagtgcctgttgggcatggaaaaggaacacgaagtcgaagttaatggtaccgacacactgtggggtgagaccgcccttacagccgccgccggcagaggcaaactggaggtgtgtgaactgctgctcgggcatggtgctgccgtgtcacgcacgaacaggagaggcgttccgccactgttttgcgccgccaggcaaggccactggcaaatcgtcagattgcttctggaaagggggtgtgacgtaaatctatctgataagcaggggcggactcccctcatggtggcagcctgcgagggtcaccttagcactgtagagttcctgctgtccaaaggcgcggctctcagctccctggataaagagggactcagcgctctttcctgggcctgtctgaaaggtcaccgggcggtggttcagtacctggttgaggaaggtgcagcaattgatcagaccgataaaaacggcaggacacccctggacctggctgcattttacggtgacgccgagaccgtgctctatctcgtagaaaagggcgcagttattgaacacgtggaccacagcggaatgcgcccgctggatcgcgcgatcggctgccgaaataccagtgtggttgttgcattgttacgcaagggcgccaaacttgggaacgccgcctgggcaatggccaccagcaagcccgatattctcataattcttcttcaaaagcttatggaagaaggtaatgtgatgtataagaagggaaagatgaaggaggcagcgcagcggtaccagtacgctctgcggaagtttcccagagagggcttcggtgaggatatgaggccctttaatgaactgagagtgagtctctacctcaacctgagccgatgcaggaggaagaccaacgacttcggcatggccgaagaatttgcttctaaagccctggaacttaaaccgaagtcttacgaggccttctacgcaagggcaagggctaaacggaattctagacagtttgtggccgcccttgctgatctgcaagaagcggtaaagctgtgtcccacaaatcaggaggtgaaacgactgcttgctcgtgtggaagaggagtgtaagcagctgcaaagatcacagcagcagaagcagcagggacctttgcctgccccactgaatgatagcgagaatgaggaagatacacctactcctggcttaagcgaccattttcattcggaggagacagaggaggaagagaccagccctcaagaggaatcagtaagtcccacacctcgctcacagccaagctcctcagtaccaagctcctatatccggaaccttcaggagggcctccagagcaagggtaggcctgtaagccctcaaagccgggctggcataggtaagtcgctcagagagccagtcgcacagcccggcttgctattgcaaccctctaagcaggcccaaattgtaaagacttcacagcatcttggttcaggacaaagcgccgtgcgaaacgggtcaatgaaagtacaaatttcctcccagaatcccccccccagtcctatgccgggccgaatcgccgccacgccggccgggtcacgtactcaacatctggagggcactggtacctttaccaccagggccgggtgcggccactttggcgatcggctcggaccctcccagaatgttcgtcttcagtgcggcgagaacggcccagcccaccctctgccttctaaaacgaagactaccgagcgactgctaagccacagcagcgtggcagtggatgccgcccctcccaatcagggcggtctggctacctgctccgacgttcgccatccagcaagccttaccagctctgggtccagcggatcaccgtcctcgtcaattaagatgtcctccagtacctcaagcttgacaagtagcagtagctttagcgatgggtttaaagttcagggccctgacactcggatcaaggacaaggttgtgacccacgtgcagagcggtacagcagagcaccgccctaggaacaccccattcatgggcatcatggataaaactgcccggtttcaacagcagtctaaccccccatctaggtcttggcactgtccagctccagaagggctattgactaatacctcgtcggccgctggactccagagcgctaacacagaaaaaccttccctcatgcaggtgggcggatacaataatcaagcaaagacatgtagcgtcagcacgttatcggcttccgtgcataacggcgcacaggttaaggagctcgaggagtctaagtgccagatccccgtccatagccaggagaaccgaatcactaaaaccgtgagtcacctctaccaagaatccatttcgaagcaacaaccccatatcagcaatgaggcccatcggagccatctgacagcggccaaacctaaacgatcgttcattgagagtaacgtgtag

SEQ ID NO: 228509 - DNA, 5586 bp, Artificial Sequence
  derived and/or modified sequence
atgctgaaggctgtgctgaagaagagccgggagggcggcaagggcggcaagaaggaggccggcagtgactttggacctgagaccagccctgtgctgcacctggaccacagcgctgacagccctgtgagcagcctgcccacagctgaggacacctacagagtgtccctggccaagggcgtgtccatgagcctgcccagcagccccctgctgccccggcagagccacctggtgcagagccgggtgaacaagaagagccctggccctgtgaggaagcccaagtatgtggagagcccccgggtgcctggagatgctgtgatcatgcccttccgggaggtggccaagcccacagagccagatgaacatgaggccaaggctgacaatgagcccagctgcagccctgctgcccaggagctgctgacccggctgggcttcctgctgggggagggcatccccagcgccacccacatcaccatcgaggacaagaatgagaccatgtgcacagccctgagccagggcatcagcccctgcagcaccctgaccagcagcacagccagccccagcacagacagcccctgcagcaccctgaacagctgtgtgtccaagacagctgccaacaagagcccctgtgagaccatcagcagccccagcagcaccctggagagcaaggacagcggcatcatcgccaccatcaccagcagcagtgaaaatgatgacaggagcggcagcagcctggagtggaacaaggatggcaacctgcggctgggcgtgcagaagggcgtgctgcatgaccggcgggctgacaactgcagccctgtggccgaggaggagaccaccggcagcgctgagagcaccctgcccaaggccgagagcagcgctggagatggccctgtgccctacagccagggcagcagcagcctcatcatgccccggcccaacagcgtggccgccaccagcagcaccaagctggaggacctgagctacctggatggccagagaaatgcccccctgcggaccagcatccggctgccctggcacaacacagctgggggccgggcccaggaggtgaaggccaggtttgccccctacaagccccaggacatcctgctgaagcccctgctgtttgaggtgcccagcatcaccacagattctgtgtttgtgggccgggactggctgttccaccagatcgaggagaacctgaggaacacagagctggccgagaacagaggagctgtggtggtgggcaatgtgggctttgggaagacagccatcatcagcaagctggtggccctgagctgccacggcagcaggatgaggcagatcgccagcaacagccctggcagcagccccaagaccagtgaccccacccaggacctgcacttcacccccctgctgagccccagcagcagcaccagcgccagcagcacagccaagacccccctgggcagcatctctgctgagaaccagaggccccgggaggatgctgtgaagtacctggccagcaaggtggtggcctaccactactgccaggccgacaacacctacacctgcctggtgcctgagtttgtgcacagcattgctgccctgctgtgccgcagccaccagctggccgcctacagagacctgctgatcaaggagccccagctgcagagcatgctgagcctgcggagctgtgtgcaggaccctgtggccgccttcaagaggggcgtgctggagcccctgaccaacctgagaaatgagcagaagatccctgaggaggagtacatcatcctgattgatggcctgaatgaagctgagttccacaagccagactatggagacaccctgagcagcttcatcaccaagatcatcagcaagtttcctgcctggctgaagctgattgtgacagtgcgggccaacttccaggagatcatcagcgccctgccctttgtgaagctgagcctggatgacttcccagacaacaaggacatccacagcgacctgcacgcctacgtgcagcaccgggtgcacagcagccaggacatcctgagcaacatcagcctgaatggcaaggcagatgccaccctgattggcaaggtgagcagccacctggtgctgcggagcctgggcagctacctgtacctgaagctgaccctggacctcttccagaggggccacctggtgatcaagagcgccagctacaaggtggtgcctgtgtccctgtctgagctgtacctgctgcagtgcaacatgaagttcatgacccagagcgcctttgagcgggccctgcccatcctgaatgtggccctggccagcctgcaccccatgacagatgagcagatcttccaggccatcaatgccggccacatccagggcgagcagggctgggaggacttccagcagaggatggatgccctgagctgcttcctgatcaagagaagagacaagaccaggatgttctgccaccccagcttccgggagtggctggtgtggagggcagatggagagaacacagccttcctgtgtgagcccagaaatggccacgccctgctggccttcatgttcagccggcaggagggcaagctgaaccggcagcagaccatggagctgggccaccacatcctgaaggcccacatcttcaagggcctgagcaagaagacaggcatcagcagcagccacctgcaggccctgtggattggctacagcacagagggcctgtctgctgccctggccagcctgaggaacctgtacacccccaacgtgaaggtgtcccggctgctgatcctgggcggggccaacgtgaactacagaacagaggtgctgaacaatgcccccatcctgtgtgtgcagagccacctgggccacgaggaggtggtgaccctgctgctggagtttggagcctgcctggatggcaccagtgaaaatggcatgacagccctgtgctatgctgctgctgctggccacatgaagctggtgtgcctgctgaccaagaagggcgtgcgggtggaccacctggacaagaagggccagtgtgccctggtgcacagcgccctgcggggccatggagacatcctgcagtacctgctgacctgtgagtggagccctggccccccccagcccggcaccctgaggaagagccacgccctgcagcaggccctgacagctgctgcctccatgggccacagctctgtggtgcagtgcctgctgggcatggagaaggagcacgaggtggaggtgaatggaacagacaccctgtggggcgagacagccctgacagctgctgctggccggggcaagctggaggtgtgtgagctgctgctgggccatggagctgctgtgtccaggaccaacagaagaggagtgcccccactcttctgtgccgcccggcagggccactggcagatcgtgcggctgctgctggagcggggctgtgatgtgaacctgagtgacaagcagggccgcacccccctgatggtggccgcctgtgagggccacctgagcacagtggagttcctgctgagcaaaggagctgccctgagcagcctggacaaggagggcctgagcgccctgtcctgggcctgcctgaagggccacagagctgtggtgcagtacctggtggaggagggcgccgccatcgaccagacagacaagaatggccgcacccccctggacctggccgccttctatggagatgctgagaccgtgctgtacctggtggagaagggagctgtgattgaacatgtggaccacagcggcatgaggcccctggaccgggccatcggctgcaggaacacctctgtggtggtggccctgctgaggaagggggccaagctgggcaatgctgcctgggccatggccaccagcaagccagacatcctgatcatcctgctgcagaagctgatggaggagggcaatgtgatgtacaagaagggcaagatgaaggaggccgcccagcgctaccagtatgccctgaggaagttcccccgggagggctttggagaggacatgaggcccttcaatgagctgcgggtgtccctgtacctgaacctgagccgctgcaggaggaagaccaatgactttggcatggccgaggagtttgccagcaaggccctggagctgaagcccaagagctatgaggccttctacgcccgggcccgggccaagaggaacagccggcagtttgtggccgccctggccgacctgcaggaggccgtgaagctgtgccccaccaaccaggaggtgaagaggctgctggcccgggtggaggaggagtgcaagcagctgcagaggagccagcagcagaagcagcagggccccctgcctgcccccctgaatgattctgaaaatgaggaggacacccccaccccaggcctgagtgaccacttccacagcgaggagacagaggaggaggagaccagcccccaggaggagagcgtgagccccacccccaggagccagcccagcagctctgtgcccagcagctacatccggaacctgcaggagggcctgcagagcaagggccggcctgtgagcccccagagccgggccggcatcggcaagagcctgcgggagcctgtggcccagcccggcctgctgctgcagcccagcaagcaggcccagatcgtgaagaccagccagcacctgggcagcggccagagcgctgtgagaaatggctccatgaaggtgcagatcagcagccagaaccccccacccagccccatgcctggaagaattgctgccaccccagctggcagcaggacccagcacctggagggcaccggcaccttcaccacccgggccggctgcggccactttggagaccggctgggccccagccagaatgtgcggctgcagtgtggagaaaatggacctgcccaccccctgcccagcaagaccaagaccacagagcggctgctgagccacagctctgtggccgtggatgctgccccacccaaccagggcggcctggccacctgcagtgatgtgcgccacccagccagcctgaccagcagcggcagcagcggcagccccagcagcagcatcaagatgagcagcagcaccagcagcctgaccagcagcagcagcttcagtgatggcttcaaggtgcagggccctgacacccgcatcaaggacaaggtggtgacccacgtgcagagcggcacagctgagcaccggcccaggaacacccccttcatgggcatcatggacaagacagcccgcttccagcagcagagcaacccccccagccgctcctggcactgcccagcccctgagggcctgctgaccaacaccagcagcgctgctggcctgcagagcgccaacacagagaagcccagcctgatgcaggtgggcggctacaacaaccaggccaagacctgcagcgtgtccaccctgagcgcctctgtgcacaacggggcccaggtgaaggagctggaggagagcaagtgccagatccctgtgcacagccaggagaaccgcatcaccaagacagtgagccacctgtaccaggagagcatcagcaagcagcagccccacatcagcaatgaggcccacaggagccacctgacagctgccaagcccaagaggagcttcatcgagagcaatgtgtag

SEQ ID NO: 228510 - DNA, 5586 bp, Artificial Sequence
  derived and/or modified sequence
atgctgaaggccgtgctgaagaagagccgggagggcggcaagggcggtaagaaggaagctggatctgacttcggccctgagacatcccccgttctacatctagaccactccgccgactcacccgtttcttctctccccaccgcggaggatacataccgcgtgtccttagctaaaggtgtgtcgatgtcattgccctctagccctctacttccccggcagtcgcatctagtgcagtcacgggtgaacaaaaagtctcctggtcccgtacgaaagcccaagtatgtggagtccccacgggtgcccggcgacgccgtcattatgccgtttcgtgaagtagcaaagcccactgagcctgacgagcatgaggcgaaggccgataatgagcctagctgttcccctgccgcccaagagctcttgacacgtctcggattcctactcggtgagggcatacccagtgctactcatatcacaattgaagataagaatgagactatgtgtactgcactctcgcaagggatttccccttgtagcactttgacctcttccactgcttcgccatcaaccgactcaccctgttccactctaaattcttgcgtgagcaaaaccgcagctaacaagagcccctgcgaaacaattagctcgccctccagtacactagagtcgaaggactccgggatcatcgccaccatcacctcttcctccgaaaacgacgacagatccggctcttctctggaatggaataaagacgggaacctgcgccttggcgttcagaaaggcgtgctccacgaccgcagagccgacaactgctcccctgtggccgaggaagaaacgaccggctctgcagagagcaccctgcccaaggcggagagcagcgcaggcgacggaccagtgccgtactcccagggcagtagctccttaatcatgcctcgccccaattcagtcgccgcaacgagttcgaccaagctagaggatctgtcgtacctcgacggacagaggaacgccccgctacggacaagcattaggttgccatggcataatactgcaggcgggcgggctcaagaggtcaaggcccgttttgcaccatacaagccacaagatatcttgctgaagcccctgctattcgaggtgccctccattacaaccgacagcgttttcgtgggaagggattggctcttccatcagatcgaggagaaccttcggaataccgagctggctgagaatagaggcgcagtcgtggtcgggaacgtgggatttggcaagactgccatcatctcgaaactcgtggcgctcagctgtcacggttcccgcatgcggcaaatagcaagcaattctccagggtccagtccaaaaacaagcgatccaactcaagatctccactttacgccccttttgtctccatcgtcatctacaagcgcaagctcaacagcaaaaacccctttaggctccatcagtgcggaaaatcagaggccccgtgaagacgcggtgaagtacttggcctctaaggtcgttgcctaccactattgccaagcagataatacctatacttgtttggtacctgagtttgttcatagcatagccgccctgctatgccgatcgcaccagttggcagcatacagggacttgctcattaaagaacctcagctgcaaagcatgctcagtttgcgaagctgcgtacaggatcccgttgcagctttcaagcggggtgttctggagcctctgactaatctgcgtaacgagcagaaaattcctgaggaggagtatattatcctcattgacggtcttaacgaagcggagttccacaagccagactacggcgatacattgtcttccttcataaccaagattatcagtaaattccccgcctggctgaagctcatagtgactgttagagctaattttcaagagatcatcagcgccctgccgttcgtcaaattgagcctggacgattttcccgataacaaggacattcatagcgatctccatgcttacgttcagcatagggtacactcatctcaggacattctgtctaacattagcctgaacggcaaggccgatgctacactgattggcaaggtgtcatcccatttggtactgagaagtctaggttcttacctgtacttgaaactgactttggatctcttccagcgcggtcaccttgtgattaaatcagcctcatataaagtggttcctgtttccctgagtgagctgtacttgttgcagtgtaatatgaagttcatgacacagtctgcattcgagcgcgccctcccaattttgaatgttgccctcgcctcgctgcacccgatgactgatgaacagatctttcaggccatcaatgcaggacacattcagggagagcaaggctgggaagacttccagcaacggatggacgcactatcctgcttcttaattaagaggcgcgacaagacccgaatgttctgccacccatcattcagggaatggctggtgtggcgtgccgacggagagaacaccgcatttctgtgtgaacctcgcaacggacatgctctgctcgcatttatgttctctagacaggagggcaaactgaatagacagcaaactatggaactaggacatcacattcttaaagcgcacattttcaaggggttaagcaagaagaccggcatctcatcttcacatctccaggcactctggatcgggtatagtactgagggtctatctgcagctctcgcaagcctaagaaatctctacactcccaatgtgaaggtgagtcgacttctaattttaggcggcgccaatgtcaattaccgcacagaggttcttaacaatgcccctatactgtgcgtgcaatctcacctgggccatgaagaagtggtcacactgctcttggaattcggagcttgcctggacgggaccagcgagaatggcatgactgcactctgttacgccgctgcggcagggcatatgaagctcgtctgtcttctcaccaagaagggagtgagggtggaccatctggataagaaggggcaatgtgccctggttcatagcgccctgagaggccacggagacatcctccagtacctcttgacctgtgaatggtcgccaggtccacctcagcccggcactctccgaaagagccatgccttgcagcaggccctgacggccgctgcgtcaatggggcattcatccgtagtgcaatgtttgttgggcatggaaaaggagcacgaagttgaagtgaacgggaccgataccctctggggagaaactgccctaaccgctgctgccggacggggtaagctggaggtgtgcgaactgctcctggggcacggggcggccgtgagtcgaacaaataggcgcggcgtgcccccactgttttgcgctgccaggcagggccactggcagattgtgcggctgctgttggaaaggggatgtgacgtcaacttatcagacaaacagggcagaaccccactgatggtggctgcttgcgaaggccatctatctacggtagaatttctgctcagcaaaggagctgcactgagcagtctagataaggagggcctcagcgctttgagctgggcttgtctgaaaggtcacagggccgtggttcagtatcttgtagaggaaggagcggcgatcgaccaaaccgacaagaatgggcggaccccactggacctcgccgcgttctatggcgacgccgaaaccgtactgtacttagtcgagaagggagcagtgatagaacatgtggaccacagtgggatgagacctctggatcgcgctatcgggtgccgaaacacgtccgttgtcgttgctcttttacgtaagggagcaaagttgggaaacgctgcctgggccatggctacctctaagccagatatactaattattctgttgcaaaagcttatggaagagggcaacgtgatgtataagaagggcaagatgaaagaagcggctcagcgatatcagtacgcgctccgcaaatttcctcgcgagggttttggtgaggatatgaggccgttcaatgagttgcgggtgtccctatacctgaacctgagtaggtgcagacggaaaaccaacgatttcgggatggcggaggaatttgcttcgaaggcccttgaactaaaacctaagagttacgaagctttttatgcgcgagcccgggccaagaggaatagtcgacagttcgtggctgctctggccgacttacaggaggcagtcaagctttgtcccactaatcaggaagtgaagagacttctcgcgcgtgttgaggaagagtgcaagcagttgcagaggtctcagcagcagaagcagcaaggacctctgccggctcccttaaatgactcggagaacgaagaagacacccctacccctgggctttcagatcacttccatagcgaagaaactgaggaagaagaaacgtcccctcaagaagagtcggtcagtcccactcctaggagtcagccctccagcagcgtcccatcctcatacatcagaaatcttcaggaaggactccagagcaaaggtagacctgtgtctccacaatctcgcgctggcatcgggaaaagtctcagagagccggtagcccagcctggcctactgctgcagccatctaaacaggcccagatcgtgaagacctcacaacacctcggttcaggccagagtgcggtgcgcaacggctcaatgaaggtgcagatttcttcccaaaatcctcccccatcacctatgccaggccgcattgctgcaacccccgctggtagtaggacacagcatctggagggcacggggacattcactacccgcgccggctgtggacactttggagacagattggggccttctcagaatgttcgcctgcagtgtggcgagaatggtcccgcacaccccctcccctccaagacaaagactactgaaagactgctgagccatagttccgttgccgtcgatgcagctcctccgaatcagggcggcctcgcaacctgtagcgacgtaagacaccccgcctcactgacgtcgtccggctcttccggaagcccttccagttcaattaaaatgtcctcttcgacaagctccctgaccagcagttcttcgtttagtgatggattcaaggtgcaagggcctgatacgcggatcaaagacaaggtggttacgcacgtgcaatccgggacagccgagcatcgccctcgtaacactccattcatgggtatcatggacaaaactgcacgcttccagcagcagtctaaccccccctcacggagttggcactgcccggccccagaggggctgctgactaatacgtcttctgcggccggacttcaatctgctaacaccgagaaaccgtcgctgatgcaagtgggaggctataataaccaggccaagacctgcagcgtatccaccctcagtgcaagcgtacacaacggcgcccaagtcaaagaattagaggaaagtaagtgtcagatacccgtccattcccaggagaatcgtattacaaaaaccgtctcacacctctatcaagagtcgatatctaaacagcaaccacatatttctaacgaagctcaccgctctcatcttaccgccgccaaaccgaagcgatctttcatcgaatccaacgtgtag

SEQ ID NO: 228511 - DNA, 5586 bp, Artificial Sequence
  derived and/or modified sequence
atgttaaaagcggtgctgaaaaaaagtcgcgaaggtggtaaggggggtaagaaagaggcgggatctgacttcggaccggagaccagtcccgtgctgcatcttgatcactccgctgactctcccgtgagctctttgcctaccgctgaagatacctacagggtgagtctggccaaaggcgtgtcaatgagcttgccctctagcccccttctcccacgccagtcccatctagtgcagagccgggtgaataaaaaaagccctgggccagtcaggaaacccaagtacgtcgaaagcccacgcgttcctggtgatgctgtaatcatgcccttccgcgaggtcgcaaagcccacggaacctgacgaacacgaggcgaaggcggacaatgaaccatcctgctcgccagcagcccaggagttgctgacaagactaggattcctactcggagagggtatccccagcgcaacccacatcaccatcgaagacaagaatgaaaccatgtgcactgctctgagccaggggatcagcccatgctccactttgacttcttctactgcctcccccagcaccgattccccttgcagcacattaaattcttgtgtgtccaagacagcagccaacaagtcgccatgtgagaccatctcgtcgccctccagtacactggagtccaaagatagcggtatcatcgctactatcacatctagtagcgagaatgatgaccgaagcggctctagccttgagtggaacaaagatgggaaccttcggttaggtgtgcagaagggcgttctacatgatagaagagcagacaattgttctccagtggcggaagaagagacgacggggtctgcagaatcgaccctgcctaaggctgagagctccgccggtgatggtcctgtaccctattcccaggggtcatcctcactgatcatgccgagaccaaactcagttgccgcaacctcctccactaaactcgaagatctctcttacctcgatggccagagaaatgcacctctacgcacaagcatccgactcccttggcacaacacagctgggggacgggcacaggaggtaaaggctaggttcgcgccatataagccacaggacatcttgctgaagcctcttctgtttgaagttcccagcataacaacggactctgtgttcgtgggtagagattggctgttccatcagattgaagagaatttgcgaaacaccgagctggcggagaatcggggtgccgtggtggttggcaacgtcggattcggaaagacagctattatatcaaagcttgtggcactgtcctgtcacggatcacgcatgcggcagattgcgtctaacagccctggttctagtccaaaaacctctgaccctacccaggacttgcattttacccccctactctccccgtcatcttctacgtccgcaagtagcacagctaagaccccgctcggatcaatctccgcagagaaccagagaccccgagaggacgctgttaagtacctggcctccaaagtggtcgcgtaccattactgtcaggcagacaatacatatacatgcctagtaccagagtttgtgcatagcatagctgcactgctgtgtcggagccaccaactggcggcttatcgggatctactcattaaggaaccccagcttcagagcatgcttagcctgcgatcctgcgtccaggaccctgtggcggcattcaaaaggggggtactcgaaccactcactaacctacgcaatgagcagaagatccctgaagaggagtacatcatcctgattgacgggttgaatgaggccgaattccacaagccagattatggagacacactgtcctcctttattaccaaaataatttccaagttccctgcctggctgaagttgattgtaaccgtgcgggcaaactttcaggaaatcatcagcgcactgccctttgttaagctgtctctggacgattttccagataacaaggacatccactctgatttgcatgcctatgtccagcacagggtgcactctagtcaggacatcctttccaatatctccctcaacggaaaggcagacgccacgcttatcggtaaggtaagtagccacctggtgctgaggtctctgggcagttacctctatctgaagctgacactcgatttgttccagcgaggccatctcgtgatcaaatccgcgagctacaaggtggtgcccgtgtcactgagcgagctttacctcttgcagtgtaacatgaaatttatgacccaatcagcatttgagcgggcactacctatcttgaatgtggcactggcctccttgcaccccatgacagacgaacagatttttcaggccataaacgcagggcatatacaaggggagcagggatgggaggacttccagcagaggatggatgccctgtcctgtttcctaatcaagcgtcgggataagacacgtatgttttgccatccttccttccgcgagtggctcgtgtggagagctgacggtgagaatactgctttcctttgcgagcctagaaatggccacgccctgttggcgttcatgttctcacgccaggagggcaaactcaaccgacaacagacaatggagcttggtcaccatatcttgaaagcgcatatttttaaaggactgtcaaaaaagacagggatcagctcgagtcatctgcaggctctatggattgggtattctacagagggtctgtccgcagccctggcgagtcttaggaatttatacaccccgaacgtcaaggtgtcccgactgctgattctgggcggagccaatgtgaactatcgaaccgaggtccttaataacgctccgatcctctgcgtgcagagtcacctaggtcatgaagaagtcgtcaccctactgctggagttcggagcgtgtctggatggcacttccgagaacggtatgacagccctgtgctatgcagctgctgctggccatatgaagcttgtttgcctgttgacaaaaaagggagttcgcgtcgatcatcttgacaagaaaggccagtgtgctcttgtgcacagcgcactgcgcggacacggggacatactgcagtaccttctgacctgcgagtggtcccccggaccccctcagccgggaaccctccggaagtcgcatgccttgcagcaagccctgacagccgcagcttctatgggtcattcaagcgtcgtgcaatgcctccttgggatggagaaagaacatgaagtggaggtcaacggcacagatacgctttggggcgagacagccctgacagcagctgccggacgcggtaaattggaggtgtgtgaactcctcctggggcacggggctgctgtcagtcgcaccaatcgtcggggagtaccaccactcttctgcgcggctcgccagggccactggcagatcgttagattattgctggagcggggttgcgacgtcaatctgtctgataagcaagggagaacccctctgatggtagcggcatgtgaaggtcacttgagcacagtcgagtttcttctgagcaagggggcagccctcagcagcctcgacaaggagggtttgagtgccctatcctgggcctgccttaagggccaccgggcagtggtccagtacctggtggaggagggcgcagcaatagatcagaccgacaaaaatgggagaactccgctagacctcgcagccttttatggagatgcagaaactgtcctctatttggtcgagaagggtgccgtcattgagcacgtagatcatagcgggatgcgccctctcgatcgagccattggatgcaggaacacctcagtagttgtagcccttctcagaaagggagcaaagctcggcaacgccgcatgggcgatggctacttcaaagcctgacatccttatcatacttctccagaagctaatggaagagggaaatgtgatgtacaaaaaaggtaagatgaaggaggccgctcagcgctaccagtacgcgctgaggaaatttccacgcgagggttttggcgaagatatgaggccgttcaacgagctgcgcgtttcattgtacctgaatttgagtcggtgcagacgtaagaccaatgattttggcatggcagaagagttcgcctctaaagcactggagttgaagcctaaatcttatgaggccttctacgcccgagcacgggcaaagcgcaatagccgccagttcgtcgctgctctggcggaccttcaggaggcggtcaagctgtgtcctacaaaccaggaagtcaaacgtctgctggcccgtgtggaggaagagtgtaagcagctccagagaagccaacagcagaaacagcagggacctctcccagcaccactcaatgacagtgaaaatgaggaggatacaccaacacccggtctctcggaccattttcactcggaagaaactgaggaggaagagaccagccctcaagaggagagtgtgtccccaaccccaaggtcccagccatccagcagtgtgccaagttcatatattagaaatctccaggagggcttgcagagcaagggacgcccagtatcaccgcagtctcgagcaggaattggcaagagcttgcgggaaccagttgcgcagcctggtctgctgctgcaaccgtccaagcaagcccagattgtgaaaacttcccagcatctcggtagtggccagtccgcggtcaggaacgggtctatgaaggtgcagataagctcccagaatccacctccgagcccaatgccaggccgtattgcagcgacccctgccggatcccggacacagcacctcgagggaacaggaactttcacgactcgcgctgggtgtgggcacttcggggataggctcgggccaagtcagaacgttcgcctccagtgtggggagaatggaccagcacacccgctaccaagcaaaacaaagactacagaacgcctgctctcacacagttccgtcgctgtggatgccgcaccacccaatcagggcggtttggccacttgctcagacgtgcgccatccggcttccctaaccagctccggtagttccggatccccttcctccagcatcaagatgtctagctccacttcttccctaacctcctctagttcgttttcagatgggtttaaggtgcagggacccgacacacgcatcaaagacaaggtcgtaacgcatgtgcagagtgggaccgctgagcatcgtccacgcaatacccctttcatgggtatcatggacaaaaccgcacggtttcagcaacagagtaacccacccagtaggagttggcattgccccgctcccgagggacttctcaccaacacgtccagcgctgctggacttcagtcggccaacaccgagaagcctagtttaatgcaggttggcggttataataaccaggcgaaaacctgttctgtatcgactctgagcgcaagcgtccataacggagcccaagtgaaggagttggaggagtccaaatgccagattccagtacattctcaggagaaccgaattaccaagactgtaagtcacctgtatcaggaatccatcagtaagcagcagcctcacatctccaatgaagctcataggtcccacctgaccgccgctaagcccaagcgctcattcatcgaatccaatgtataa

SEQ ID NO: 228512 - protein, 1307 aa, Artificial Sequence
  derived and/or modified sequence
MGSVTGAVLKTLLLSTQNWNRVEAGNSYDCDDPLVSALPQASFSSSSELSSSHGPGFARLNRRDGAGGWSPLVSNKYQWLQIDLGERMEVTAVATQGGYGSSNWVTSYLLMFSDSGWNWKQYRQEDSIWGFSGNANADSVVYYRLQPSIKARFLRFIPLEWNPKGRIGMRIEVFGCAYRSEVVDLDGKSSLLYRFDQKSLSPIKDIISLKFKTMQSDGILLHREGPNGDHITLQLRRARLFLLINSGEAKLPSTSTLVNLTLGSLLDDQHWHSVLIQRLGKQVNFTVDEHRHHFHARGEFNLMNLDYEISFGGIPAPGKSVSFPHRNFHGCLENLYYNGVDIIDLAKQQKPQIIAMGNVSFSCSQPQSMPVTFLSSRSYLALPDFSGEEEVSATFQFRTWNKAGLLLFSELQLISGGILLFLSDGKLKSNLYQPGKLPSDITAGVELNDGQWHSVSLSAKKNHLSVAVDGQMASAAPLLGPEQIYSGGTYYFGGCPDKSFGSKCKSPLGGFQGCMRLISISGKVVDLISVQQGSLGNFSDLQIDSCGISDRCLPNYCEHGGECSQSWSTFHCNCTNTGYRGATCHNSIYEQSCEAYKHRGNTSGFYYIDSDGSGPLEPFLLYCNMTETAWTIIQHNGSDLTRVRNTNPENPYAGFFEYVASMEQLQATINRAEHCEQEFTYYCKKSRLVNKQDGTPLSWWVGRTNETQTYWGGSSPDLQKCTCGLEGNCIDSQYYCNCDADRNEWTNDTGLLAYKEHLPVTKIVITDTGRLHSEAAYKLGPLLCQGDRSFWNSASFDTEASYLHFPTFHGELSADVSFFFKTTASSGVFLENLGIADFIRIELRSPTVVTFSFDVGNGPFEISVQSPTHFNDNQWHHVRVERNMKEASLQVDQLTPKTQPAPADGHVLLQLNSQLFVGGTATRQRGFLGCIRSLQLNGMTLDLEERAQVTPEVQPGCRGHCSSYGKLCRNGGKCRERPIGFFCDCTFSAYTGPFCSNEISAYFGSGSSVIYNFQENYLLSKNSSSHAASFHGDMKLSREMIKFSFRTTRTPSLLLFVSSFYKEYLSVIIAKNGDLQIRYKLNKYQEPDVVNFDFKNMADGQLHHIMINREEGVVFIEIDDNRRRQVHLSSGTEFSAVKSLVLGRILEHSDVDQDTALAGAQGFTGCLSAVQLSHVAPLKAALHPSHPDPVTVTGHVTESSCMAQPGTDATSRERTHSFADHSGTIDDREPLANAIKSDSAVIGGLIAVVIFILLCITAIAVRIYQQKRLYKRSEAKRSENVDSAEAVLKSELNIQNAVNENQKEYFF

SEQ ID NO: 228513 - protein, 1259 aa, Artificial Sequence
  derived and/or modified sequence
MGSVTGAVLKTLLLSTQNWNRVEAGNSYDCDDPLVSALPQASFSSSSELSSSHGPGFARLNRRDGAGGWSPLVSNKYQWLQIDLGERMEVTAVATQGGYGSSNWVTSYLLMFSDSGWNWKQYRQEDSIWGFSGNANADSVVYYRLQPSIKARFLRFIPLEWNPKGRIGMRIEVFGCAYRSEVVDLDGKSSLLYRFDQKSLSPIKDIISLKFKTMQSDGILLHREGPNGDHITLQLRRARLFLLINSGEAKLPSTSTLVNLTLGSLLDDQHWHSVLIQRLGKQVNFTVDEHRHHFHARGEFNLMNLDYEGNVSFSCSQPQSMPVTFLSSRSYLALPDFSGEEEVSATFQFRTWNKAGLLLFSELQLISGGILLFLSDGKLKSNLYQPGKLPSDITAGVELNDGQWHSVSLSAKKNHLSVAVDGQMASAAPLLGPEQIYSGGTYYFGGCPDKSFGSKCKSPLGGFQGCMRLISISGKVVDLISVQQGSLGNFSDLQIDSCGISDRCLPNYCEHGGECSQSWSTFHCNCTNTGYRGATCHNSIYEQSCEAYKHRGNTSGFYYIDSDGSGPLEPFLLYCNMTETAWTIIQHNGSDLTRVRNTNPENPYAGFFEYVASMEQLQATINRAEHCEQEFTYYCKKSRLVNKQDGTPLSWWVGRTNETQTYWGGSSPDLQKCTCGLEGNCIDSQYYCNCDADRNEWTNDTGLLAYKEHLPVTKIVITDTGRLHSEAAYKLGPLLCQGDRSFWNSASFDTEASYLHFPTFHGELSADVSFFFKTTASSGVFLENLGIADFIRIELRSPTVVTFSFDVGNGPFEISVQSPTHFNDNQWHHVRVERNMKEASLQVDQLTPKTQPAPADGHVLLQLNSQLFVGGTATRQRGFLGCIRSLQLNGMTLDLEERAQVTPEVQPGCRGHCSSYGKLCRNGGKCRERPIGFFCDCTFSAYTGPFCSNEISAYFGSGSSVIYNFQENYLLSKNSSSHAASFHGDMKLSREMIKFSFRTTRTPSLLLFVSSFYKEYLSVIIAKNGDLQIRYKLNKYQEPDVVNFDFKNMADGQLHHIMINREEGVVFIEIDDNRRRQVHLSSGTEFSAVKSLVLGRILEHSDVDQDTALAGAQGFTGCLSAVQLSHVAPLKAALHPSHPDPVTVTGHVTESSCMAQPGTDATSRERTHSFADHSGTIDDREPLANAIKSDSAVIGGLIAVVIFILLCITAIAVRIYQQKRLYKRSEAKRSENVDSAEAVLKSELNIQNAVNENQKEYFF

SEQ ID NO: 228514 - DNA, 3924 bp, Artificial Sequence
  derived and/or modified sequence
atgggcagcgtgaccggcgccgtgctgaagaccctgctgctgagcacccagaactggaacagagtggaggccggcaacagctacgactgcgacgaccccctggtgagcgccctgccccaggccagcttcagcagcagcagcgagctgagcagcagccacggccccggcttcgccagactgaacagaagagacggcgccggcggctggagccccctggtgagcaacaagtaccagtggctgcagatcgacctgggcgagagaatggaggtgaccgccgtggccacccagggcggctacggcagcagcaactgggtgaccagctacctgctgatgttcagcgacagcggctggaactggaagcagtacagacaggaggacagcatctggggcttcagcggcaacgccaacgccgacagcgtggtgtactacagactgcagcccagcatcaaggccagattcctgagattcatccccctggagtggaaccccaagggcagaatcggcatgagaatcgaggtgttcggctgcgcctacagaagcgaggtggtggacctggacggcaagagcagcctgctgtacagattcgaccagaagagcctgagccccatcaaggacatcatcagcctgaagttcaagaccatgcagagcgacggcatcctgctgcacagagagggccccaacggcgaccacatcaccctgcagctgagaagagccagactgttcctgctgatcaacagcggcgaggccaagctgcccagcaccagcaccctggtgaacctgaccctgggcagcctgctggacgaccagcactggcacagcgtgctgatccagagactgggcaagcaggtgaacttcaccgtggacgagcacagacaccacttccacgccagaggcgagttcaacctgatgaacctggactacgagatcagcttcggcggcatccccgcccccggcaagagcgtgagcttcccccacagaaacttccacggctgcctggagaacctgtactacaacggcgtggacatcatcgacctggccaagcagcagaagccccagatcatcgccatgggcaacgtgagcttcagctgcagccagccccagagcatgcccgtgaccttcctgagcagcagaagctacctggccctgcccgacttcagcggcgaggaggaggtgagcgccaccttccagttcagaacctggaacaaggccggcctgctgctgttcagcgagctgcagctgatcagcggcggcatcctgctgttcctgagcgacggcaagctgaagagcaacctgtaccagcccggcaagctgcccagcgacatcaccgccggcgtggagctgaacgacggccagtggcacagcgtgagcctgagcgccaagaagaaccacctgagcgtggccgtggacggccagatggccagcgccgcccccctgctgggccccgagcagatctacagcggcggcacctactacttcggcggctgccccgacaagagcttcggcagcaagtgcaagagccccctgggcggcttccagggctgcatgagactgatcagcatcagcggcaaggtggtggacctgatcagcgtgcagcagggcagcctgggcaacttcagcgacctgcagatcgacagctgcggcatcagcgacagatgcctgcccaactactgcgagcacggcggcgagtgcagccagagctggagcaccttccactgcaactgcaccaacaccggctacagaggcgccacctgccacaacagcatctacgagcagagctgcgaggcctacaagcacagaggcaacaccagcggcttctactacatcgacagcgacggcagcggccccctggagcccttcctgctgtactgcaacatgaccgagaccgcctggaccatcatccagcacaacggcagcgacctgaccagagtgagaaacaccaaccccgagaacccctacgccggcttcttcgagtacgtggccagcatggagcagctgcaggccaccatcaacagagccgagcactgcgagcaggagttcacctactactgcaagaagagcagactggtgaacaagcaggacggcacccccctgagctggtgggtgggcagaaccaacgagacccagacctactggggcggcagcagccccgacctgcagaagtgcacctgcggcctggagggcaactgcatcgacagccagtactactgcaactgcgacgccgacagaaacgagtggaccaacgacaccggcctgctggcctacaaggagcacctgcccgtgaccaagatcgtgatcaccgacaccggcagactgcacagcgaggccgcctacaagctgggccccctgctgtgccagggcgacagaagcttctggaacagcgccagcttcgacaccgaggccagctacctgcacttccccaccttccacggcgagctgagcgccgacgtgagcttcttcttcaagaccaccgccagcagcggcgtgttcctggagaacctgggcatcgccgacttcatcagaatcgagctgagaagccccaccgtggtgaccttcagcttcgacgtgggcaacggccccttcgagatcagcgtgcagagccccacccacttcaacgacaaccagtggcaccacgtgagagtggagagaaacatgaaggaggccagcctgcaggtggaccagctgacccccaagacccagcccgcccccgccgacggccacgtgctgctgcagctgaacagccagctgttcgtgggcggcaccgccaccagacagagaggcttcctgggctgcatcagaagcctgcagctgaacggcatgaccctggacctggaggagagagcccaggtgacccccgaggtgcagcccggctgcagaggccactgcagcagctacggcaagctgtgcagaaacggcggcaagtgcagagagagacccatcggcttcttctgcgactgcaccttcagcgcctacaccggccccttctgcagcaacgagatcagcgcctacttcggcagcggcagcagcgtgatctacaacttccaggagaactacctgctgagcaagaacagcagcagccacgccgccagcttccacggcgacatgaagctgagcagagagatgatcaagttcagcttcagaaccaccagaacccccagcctgctgctgttcgtgagcagcttctacaaggagtacctgagcgtgatcatcgccaagaacggcgacctgcagatcagatacaagctgaacaagtaccaggagcccgacgtggtgaacttcgacttcaagaacatggccgacggccagctgcaccacatcatgatcaacagagaggagggcgtggtgttcatcgagatcgacgacaacagaagaagacaggtgcacctgagcagcggcaccgagttcagcgccgtgaagagcctggtgctgggcagaatcctggagcacagcgacgtggaccaggacaccgccctggccggcgcccagggcttcaccggctgcctgagcgccgtgcagctgagccacgtggcccccctgaaggccgccctgcaccccagccaccccgaccccgtgaccgtgaccggccacgtgaccgagagcagctgcatggcccagcccggcaccgacgccaccagcagagagagaacccacagcttcgccgaccacagcggcaccatcgacgacagagagcccctggccaacgccatcaagagcgacagcgccgtgatcggcggcctgatcgccgtggtgatcttcatcctgctgtgcatcaccgccatcgccgtgagaatctaccagcagaagagactgtacaagagaagcgaggccaagagaagcgagaacgtggacagcgccgaggccgtgctgaagagcgagctgaacatccagaacgccgtgaacgagaaccagaaggagtacttcttctag

SEQ ID NO: 228515 - DNA, 3780 bp, Artificial Sequence
  derived and/or modified sequence
atgggcagcgtgaccggcgccgtgctgaagaccctgctgctgagcacccagaactggaacagagtggaggccggcaacagctacgactgcgacgaccccctggtgagcgccctgccccaggccagcttcagcagcagcagcgagctgagcagcagccacggccccggcttcgccagactgaacagaagagacggcgccggcggctggagccccctggtgagcaacaagtaccagtggctgcagatcgacctgggcgagagaatggaggtgaccgccgtggccacccagggcggctacggcagcagcaactgggtgaccagctacctgctgatgttcagcgacagcggctggaactggaagcagtacagacaggaggacagcatctggggcttcagcggcaacgccaacgccgacagcgtggtgtactacagactgcagcccagcatcaaggccagattcctgagattcatccccctggagtggaaccccaagggcagaatcggcatgagaatcgaggtgttcggctgcgcctacagaagcgaggtggtggacctggacggcaagagcagcctgctgtacagattcgaccagaagagcctgagccccatcaaggacatcatcagcctgaagttcaagaccatgcagagcgacggcatcctgctgcacagagagggccccaacggcgaccacatcaccctgcagctgagaagagccagactgttcctgctgatcaacagcggcgaggccaagctgcccagcaccagcaccctggtgaacctgaccctgggcagcctgctggacgaccagcactggcacagcgtgctgatccagagactgggcaagcaggtgaacttcaccgtggacgagcacagacaccacttccacgccagaggcgagttcaacctgatgaacctggactacgagggcaacgtgagcttcagctgcagccagccccagagcatgcccgtgaccttcctgagcagcagaagctacctggccctgcccgacttcagcggcgaggaggaggtgagcgccaccttccagttcagaacctggaacaaggccggcctgctgctgttcagcgagctgcagctgatcagcggcggcatcctgctgttcctgagcgacggcaagctgaagagcaacctgtaccagcccggcaagctgcccagcgacatcaccgccggcgtggagctgaacgacggccagtggcacagcgtgagcctgagcgccaagaagaaccacctgagcgtggccgtggacggccagatggccagcgccgcccccctgctgggccccgagcagatctacagcggcggcacctactacttcggcggctgccccgacaagagcttcggcagcaagtgcaagagccccctgggcggcttccagggctgcatgagactgatcagcatcagcggcaaggtggtggacctgatcagcgtgcagcagggcagcctgggcaacttcagcgacctgcagatcgacagctgcggcatcagcgacagatgcctgcccaactactgcgagcacggcggcgagtgcagccagagctggagcaccttccactgcaactgcaccaacaccggctacagaggcgccacctgccacaacagcatctacgagcagagctgcgaggcctacaagcacagaggcaacaccagcggcttctactacatcgacagcgacggcagcggccccctggagcccttcctgctgtactgcaacatgaccgagaccgcctggaccatcatccagcacaacggcagcgacctgaccagagtgagaaacaccaaccccgagaacccctacgccggcttcttcgagtacgtggccagcatggagcagctgcaggccaccatcaacagagccgagcactgcgagcaggagttcacctactactgcaagaagagcagactggtgaacaagcaggacggcacccccctgagctggtgggtgggcagaaccaacgagacccagacctactggggcggcagcagccccgacctgcagaagtgcacctgcggcctggagggcaactgcatcgacagccagtactactgcaactgcgacgccgacagaaacgagtggaccaacgacaccggcctgctggcctacaaggagcacctgcccgtgaccaagatcgtgatcaccgacaccggcagactgcacagcgaggccgcctacaagctgggccccctgctgtgccagggcgacagaagcttctggaacagcgccagcttcgacaccgaggccagctacctgcacttccccaccttccacggcgagctgagcgccgacgtgagcttcttcttcaagaccaccgccagcagcggcgtgttcctggagaacctgggcatcgccgacttcatcagaatcgagctgagaagccccaccgtggtgaccttcagcttcgacgtgggcaacggccccttcgagatcagcgtgcagagccccacccacttcaacgacaaccagtggcaccacgtgagagtggagagaaacatgaaggaggccagcctgcaggtggaccagctgacccccaagacccagcccgcccccgccgacggccacgtgctgctgcagctgaacagccagctgttcgtgggcggcaccgccaccagacagagaggcttcctgggctgcatcagaagcctgcagctgaacggcatgaccctggacctggaggagagagcccaggtgacccccgaggtgcagcccggctgcagaggccactgcagcagctacggcaagctgtgcagaaacggcggcaagtgcagagagagacccatcggcttcttctgcgactgcaccttcagcgcctacaccggccccttctgcagcaacgagatcagcgcctacttcggcagcggcagcagcgtgatctacaacttccaggagaactacctgctgagcaagaacagcagcagccacgccgccagcttccacggcgacatgaagctgagcagagagatgatcaagttcagcttcagaaccaccagaacccccagcctgctgctgttcgtgagcagcttctacaaggagtacctgagcgtgatcatcgccaagaacggcgacctgcagatcagatacaagctgaacaagtaccaggagcccgacgtggtgaacttcgacttcaagaacatggccgacggccagctgcaccacatcatgatcaacagagaggagggcgtggtgttcatcgagatcgacgacaacagaagaagacaggtgcacctgagcagcggcaccgagttcagcgccgtgaagagcctggtgctgggcagaatcctggagcacagcgacgtggaccaggacaccgccctggccggcgcccagggcttcaccggctgcctgagcgccgtgcagctgagccacgtggcccccctgaaggccgccctgcaccccagccaccccgaccccgtgaccgtgaccggccacgtgaccgagagcagctgcatggcccagcccggcaccgacgccaccagcagagagagaacccacagcttcgccgaccacagcggcaccatcgacgacagagagcccctggccaacgccatcaagagcgacagcgccgtgatcggcggcctgatcgccgtggtgatcttcatcctgctgtgcatcaccgccatcgccgtgagaatctaccagcagaagagactgtacaagagaagcgaggccaagagaagcgagaacgtggacagcgccgaggccgtgctgaagagcgagctgaacatccagaacgccgtgaacgagaaccagaaggagtacttcttctag

SEQ ID NO: 228516 - DNA, 4857 bp, Artificial Sequence
  derived and/or modified sequence
gcggagctcgagcgctgttgtgtgtttggaaggaaggatgctgctgccaatttgtgggaccgctgctgcgaggagtgggcgtggcctcggcggtgtggatgcttgttaggaaagatgctgagtgcttttcagtgaggagtcagggaggtgtgtgtgagagagagagagaaaagagagagacagagacggggagagagagagggagagagaagagagggaggagggaagaagaaaagacggagggaggtgaggaggaagggagggggagagacagagacctagaggggctgaagacccagacagagctggcagagctactgagaagaggactggagcgctctgagagcctctcaagatcttttgggggagcccaataaatgtgaacatgggatctgtcacgggagctgtcctcaagacgctacttctgtctactcaaaattggaacagagtcgaagctgggaattcctatgactgtgatgatcctcttgtgtctgccttgcctcaggcatccttcagcagttcttccgagctctccagcagtcatggtcctggatttgcaaggctgaatagaagagatggagctggtggctggtctccacttgtgtctaacaaataccagtggttgcagattgaccttggagagagaatggaggtcaccgctgtggccactcaagggggatatggtagctccaactgggtgaccagctacctcctgatgttcagtgatagtggctggaactggaaacaatatcgccaagaggacagcatctggggtttttcaggaaatgcaaatgcagacagtgttgtgtactatagactccagccttctatcaaagccagatttctgcgcttcatccctttggaatggaaccccaagggcagaattggaatgcgaatcgaagtgttcggatgtgcatacagatcagaagtggttgatcttgatggaaaaagttcccttctctacagatttgatcaaaaatccctgagcccaataaaagacattatttctttgaaattcaaaaccatgcagagtgatgggattctactccacagggaagggccaaatggagatcacatcacactgcaattaagaagagcaagactctttttacttattaattcaggtgaagctaaactgccttccacttccaccctggtcaatctcaccctgggcagcctgctagatgatcagcattggcattcagtgctcatccagcgtttgggcaaacaagtcaacttcacagtggacgaacacaggcatcatttccatgcacggggagaattcaatctcatgaatcttgattatgagatcagctttggagggattccagcacctggaaaatcagtgtcattcccacatagaaattttcatggatgtttagaaaatctctattataatggagtggatatcattgatttggccaagcagcaaaaaccacagatcattgctatgggaaatgtgtcattttcttgttcacaaccacaatctatgcccgtgacttttctgagctccaggagttatttagcactgccagacttctctggagaggaggaggtttctgccacttttcaatttcgaacttggaataaggcagggcttctgctgttcagtgaacttcagctgatttcagggggtatcctcctctttctgagtgatggaaaacttaagtcgaatctctaccagccaggaaaattacccagtgacatcacagcaggtgtcgaattaaatgatgggcagtggcattctgtctctttatctgctaaaaagaatcacttgagtgtggcggtggacggccagatggcttctgctgctcctctgctggggcctgagcagatttattcgggtggcacctattattttggaggttgtcctgacaaaagctttggatccaaatgtaaaagtccacttggtggatttcagggatgtatgaggctcatttctatcagcggcaaagtggtagatctgatttcagttcagcaggggtcccttgggaacttcagtgaccttcagatagactcatgtggcatctcagacaggtgtttgcccaactattgtgaacacggtggggagtgttcccagtcctggagcacctttcattgtaactgtaccaacactggttacagaggagctacttgccataactctatctatgagcagtcatgtgaagcctataagcacagaggaaatacttcagggttttactatatagattcagatggaagtggtcccctggaaccatttcttctatattgcaatatgaccgaaactgcatggaccatcatacagcacaacggctctgacttaacaagagtcagaaatactaatccagagaacccatatgctgggtttttcgagtatgtggccagcatggagcaacttcaggccactattaaccgtgcagagcactgtgaacaggagtttacttattactgcaagaagtcacggctggtcaataagcaagatggaacccctctgagttggtgggtaggaagaaccaatgaaacgcaaacctactggggaggttcttcgcctgatcttcaaaaatgtacttgtggattagagggaaactgcattgattctcagtattactgcaattgtgatgctgaccggaatgaatggaccaatgacactggattgcttgcttataaagaacatcttccagtaactaagatcgtgattacagacacaggccgactgcattcagaagcagcttataaactggggcctctgctctgccagggagacagatcattttggaattcagcttcctttgataccgaggcttcatatcttcattttcctaccttccacggagaacttagcgcggatgtatctttcttttttaagacaacagcttcatctggggtatttttagagaacttggggattgctgattttatacggatagagcttcgctctccgacagtagtgactttttcatttgatgtggggaatgggccttttgaaatctcagtgcagtcacccacccacttcaacgacaaccagtggcaccatgtgagggttgaaaggaacatgaaggaggcctcccttcaagtggatcagctgacaccaaagacacagcccgcccccgctgatgggcatgtcctgttacagctcaacagtcagctcttcgtgggtggaacggccaccagacagagaggctttctgggctgcattcggtctctgcagttgaatgggatgaccctggatttggaagaaagagcccaggtgactccagaagtgcagccaggttgtaggggacattgcagcagctatgggaagttatgccgcaatggagggaaatgcagagaaagacccattgggttcttttgtgactgcactttctctgcatacacagggccattctgctcaaatgagatttctgcatattttggatctggctcatccgtgatatacaattttcaagaaaattatcttttaagtaaaaactccagctcccacgctgcttcatttcatggtgatatgaagctgagcagagaaatgatcaaatttagtttccgaacaacacgaacaccaagcttgctgctttttgtgagctccttttacaaagaatacctttctgtgatcattgccaaaaatggtgatttgcagatcaggtacaagttaaataaatatcaagagcctgatgttgttaactttgattttaaaaacatggctgatggacaacttcaccacataatgattaacagagaagaaggagtggtctttatagagattgacgataatagaaggagacaagttcacctgtcatcaggcacagaattcagtgcagtcaaatctctggtattgggcaggattttagaacacagtgatgtggaccaggatactgcactggcaggtgcgcagggcttcacaggctgcctctctgcagtgcagctcagccacgtggcccctctgaaggcagctctgcaccccagccacccagaccctgtcactgttacaggacacgtgactgagtccagctgtatggcccagcctggcactgatgccacatcaagggaaaggacacactcgtttgcagatcattctggaacaatagatgacagagagccccttgctaatgcaatcaaaagtgactctgcagtaattggaggtctgatagctgttgtgatttttatcttgctttgcatcactgccatagctgttcgcatttatcagcagaaaaggttatataaaagaagtgaggcaaaaaggtcagagaatgtagacagtgctgaggctgttctgaaaagtgagcttaatatacaaaatgcagtcaatgaaaatcagaaagagtacttcttctgattggcagctatgatttaacataaaattatgatagtttgttttaatagccaggggttctcaatggaaaaacgaatgctcttacactgaatgtacaggcagtgggcttgcagcactgccatcttgccatgtacaggcttggggtggctccaggaagcctcgtccagtgatatatttctcatagcattcattctatggaacaagaaattagatattgctgttaattttcaactgttctggtatgatctaaaacaagtttaacctgcttaatggctacagtttttacatgtgaaaactgtagccttggtctcttaaccatgtaatacataagttttgttagaggtaaaaattaaatttggactataatgtccttgctttatttgagaacatttgctgtgtttgcttttgtctcctcgtggtgttattcatagacctggaaatgcttctcagatcctgtgtggccggtgtttgcatcttcagtggccacaagcataataaagcccctttgcctttctctgtattatattcaatacaatacatcaatagtcttg

SEQ ID NO: 228517 - DNA, 4713 bp, Artificial Sequence
  derived and/or modified sequence
gcggagctcgagcgctgttgtgtgtttggaaggaaggatgctgctgccaatttgtgggaccgctgctgcgaggagtgggcgtggcctcggcggtgtggatgcttgttaggaaagatgctgagtgcttttcagtgaggagtcagggaggtgtgtgtgagagagagagagaaaagagagagacagagacggggagagagagagggagagagaagagagggaggagggaagaagaaaagacggagggaggtgaggaggaagggagggggagagacagagacctagaggggctgaagacccagacagagctggcagagctactgagaagaggactggagcgctctgagagcctctcaagatcttttgggggagcccaataaatgtgaacatgggatctgtcacgggagctgtcctcaagacgctacttctgtctactcaaaattggaacagagtcgaagctgggaattcctatgactgtgatgatcctcttgtgtctgccttgcctcaggcatccttcagcagttcttccgagctctccagcagtcatggtcctggatttgcaaggctgaatagaagagatggagctggtggctggtctccacttgtgtctaacaaataccagtggttgcagattgaccttggagagagaatggaggtcaccgctgtggccactcaagggggatatggtagctccaactgggtgaccagctacctcctgatgttcagtgatagtggctggaactggaaacaatatcgccaagaggacagcatctggggtttttcaggaaatgcaaatgcagacagtgttgtgtactatagactccagccttctatcaaagccagatttctgcgcttcatccctttggaatggaaccccaagggcagaattggaatgcgaatcgaagtgttcggatgtgcatacagatcagaagtggttgatcttgatggaaaaagttcccttctctacagatttgatcaaaaatccctgagcccaataaaagacattatttctttgaaattcaaaaccatgcagagtgatgggattctactccacagggaagggccaaatggagatcacatcacactgcaattaagaagagcaagactctttttacttattaattcaggtgaagctaaactgccttccacttccaccctggtcaatctcaccctgggcagcctgctagatgatcagcattggcattcagtgctcatccagcgtttgggcaaacaagtcaacttcacagtggacgaacacaggcatcatttccatgcacggggagaattcaatctcatgaatcttgattatgagggaaatgtgtcattttcttgttcacaaccacaatctatgcccgtgacttttctgagctccaggagttatttagcactgccagacttctctggagaggaggaggtttctgccacttttcaatttcgaacttggaataaggcagggcttctgctgttcagtgaacttcagctgatttcagggggtatcctcctctttctgagtgatggaaaacttaagtcgaatctctaccagccaggaaaattacccagtgacatcacagcaggtgtcgaattaaatgatgggcagtggcattctgtctctttatctgctaaaaagaatcacttgagtgtggcggtggacggccagatggcttctgctgctcctctgctggggcctgagcagatttattcgggtggcacctattattttggaggttgtcctgacaaaagctttggatccaaatgtaaaagtccacttggtggatttcagggatgtatgaggctcatttctatcagcggcaaagtggtagatctgatttcagttcagcaggggtcccttgggaacttcagtgaccttcagatagactcatgtggcatctcagacaggtgtttgcccaactattgtgaacacggtggggagtgttcccagtcctggagcacctttcattgtaactgtaccaacactggttacagaggagctacttgccataactctatctatgagcagtcatgtgaagcctataagcacagaggaaatacttcagggttttactatatagattcagatggaagtggtcccctggaaccatttcttctatattgcaatatgaccgaaactgcatggaccatcatacagcacaacggctctgacttaacaagagtcagaaatactaatccagagaacccatatgctgggtttttcgagtatgtggccagcatggagcaacttcaggccactattaaccgtgcagagcactgtgaacaggagtttacttattactgcaagaagtcacggctggtcaataagcaagatggaacccctctgagttggtgggtaggaagaaccaatgaaacgcaaacctactggggaggttcttcgcctgatcttcaaaaatgtacttgtggattagagggaaactgcattgattctcagtattactgcaattgtgatgctgaccggaatgaatggaccaatgacactggattgcttgcttataaagaacatcttccagtaactaagatcgtgattacagacacaggccgactgcattcagaagcagcttataaactggggcctctgctctgccagggagacagatcattttggaattcagcttcctttgataccgaggcttcatatcttcattttcctaccttccacggagaacttagcgcggatgtatctttcttttttaagacaacagcttcatctggggtatttttagagaacttggggattgctgattttatacggatagagcttcgctctccgacagtagtgactttttcatttgatgtggggaatgggccttttgaaatctcagtgcagtcacccacccacttcaacgacaaccagtggcaccatgtgagggttgaaaggaacatgaaggaggcctcccttcaagtggatcagctgacaccaaagacacagcccgcccccgctgatgggcatgtcctgttacagctcaacagtcagctcttcgtgggtggaacggccaccagacagagaggctttctgggctgcattcggtctctgcagttgaatgggatgaccctggatttggaagaaagagcccaggtgactccagaagtgcagccaggttgtaggggacattgcagcagctatgggaagttatgccgcaatggagggaaatgcagagaaagacccattgggttcttttgtgactgcactttctctgcatacacagggccattctgctcaaatgagatttctgcatattttggatctggctcatccgtgatatacaattttcaagaaaattatcttttaagtaaaaactccagctcccacgctgcttcatttcatggtgatatgaagctgagcagagaaatgatcaaatttagtttccgaacaacacgaacaccaagcttgctgctttttgtgagctccttttacaaagaatacctttctgtgatcattgccaaaaatggtgatttgcagatcaggtacaagttaaataaatatcaagagcctgatgttgttaactttgattttaaaaacatggctgatggacaacttcaccacataatgattaacagagaagaaggagtggtctttatagagattgacgataatagaaggagacaagttcacctgtcatcaggcacagaattcagtgcagtcaaatctctggtattgggcaggattttagaacacagtgatgtggaccaggatactgcactggcaggtgcgcagggcttcacaggctgcctctctgcagtgcagctcagccacgtggcccctctgaaggcagctctgcaccccagccacccagaccctgtcactgttacaggacacgtgactgagtccagctgtatggcccagcctggcactgatgccacatcaagggaaaggacacactcgtttgcagatcattctggaacaatagatgacagagagccccttgctaatgcaatcaaaagtgactctgcagtaattggaggtctgatagctgttgtgatttttatcttgctttgcatcactgccatagctgttcgcatttatcagcagaaaaggttatataaaagaagtgaggcaaaaaggtcagagaatgtagacagtgctgaggctgttctgaaaagtgagcttaatatacaaaatgcagtcaatgaaaatcagaaagagtacttcttctgattggcagctatgatttaacataaaattatgatagtttgttttaatagccaggggttctcaatggaaaaacgaatgctcttacactgaatgtacaggcagtgggcttgcagcactgccatcttgccatgtacaggcttggggtggctccaggaagcctcgtccagtgatatatttctcatagcattcattctatggaacaagaaattagatattgctgttaattttcaactgttctggtatgatctaaaacaagtttaacctgcttaatggctacagtttttacatgtgaaaactgtagccttggtctcttaaccatgtaatacataagttttgttagaggtaaaaattaaatttggactataatgtccttgctttatttgagaacatttgctgtgtttgcttttgtctcctcgtggtgttattcatagacctggaaatgcttctcagatcctgtgtggccggtgtttgcatcttcagtggccacaagcataataaagcccctttgcctttctctgtattatattcaatacaatacatcaatagtcttg

SEQ ID NO: 228518 - DNA, 3924 bp, Artificial Sequence
  derived and/or modified sequence
atgggatctgtgactggggctgtccttaagaccctgctgctctcaacccagaattggaaccgtgtagaggccggtaacagctatgattgcgacgatccactagtgtccgctctccctcaagcatcattcagcagctcttccgagttgtcttctagccatggaccgggctttgccaggctgaaccgccgcgacggcgccggagggtggtcccctctggtgtcgaataaatatcagtggcttcagatcgacctgggcgagcggatggaggtcaccgcagtggcaacccagggcgggtacggctcatccaactgggtcacctcttatctgctgatgttttcagactcaggatggaactggaaacagtataggcaagaggactccatctggggtttctccgggaacgctaacgcagactctgtcgtatattatcgccttcagccgagcatcaaagcacgcttccttcgcttcattccactcgagtggaatccaaagggtcggattgggatgaggatcgaggtgttcggctgcgcgtatcgctctgaggtggtagacctcgatgggaaaagctcattgctctacaggttcgaccaaaaatccctatcgcccataaaggatatcattagcttgaaatttaagactatgcaatccgacggtatccttctacatagagaaggacctaacggggaccatataaccctacagcttcgacgtgcacggctttttctgctgataaacagcggtgaggcaaagctgccctccactagcaccttggtgaatttaactctgggcagcctcctggacgaccagcactggcacagcgtgctgatccagaggctgggcaagcaggttaatttcacagtcgacgagcataggcaccactttcatgcccgcggggaattcaatcttatgaatctagactatgagatttcattcggaggaatacccgcccccggtaaaagcgtcagctttccgcacaggaactttcatgggtgcttagagaatctctattacaatggggttgacatcatcgacctggccaagcagcagaaaccccagatcatcgcgatgggaaatgtgagcttcagctgttcacaacctcagagcatgcccgtcacttttctctcttcgcgttcgtacttagcgctcccagattttagcggtgaggaggaagtttctgccactttccagttccgaacatggaataaggctgggctcctgctctttagtgagcttcagctgatctcaggcgggatcctcctgttcttatccgacggcaaactgaagtccaacctgtaccagcctgggaagctacctagcgatattactgctggcgtagagttgaacgatggccagtggcattctgtgtctttgagtgctaaaaagaatcacctgagtgttgcagtcgacggtcagatggccagcgcagctccactgttgggaccggagcagatatattcaggagggacatactatttcggcggatgtcccgacaaaagttttggatctaaatgtaagtcaccactgggggggtttcaagggtgtatgcggctgatatctatttctggcaaagtagtggacctaattagcgtccagcagggcagtctaggtaacttttctgatctgcagattgacagctgtggcatcagtgaccgatgtctgccaaattattgcgagcatgggggcgagtgcagccaatcttggagtacatttcactgcaactgtaccaatacggggtataggggcgcaacatgtcacaacagtatctacgagcagtcctgtgaagcatacaaacatcgcggaaacacttctggcttttactatattgactccgacggatccggccccctggagccctttctgctgtattgcaatatgaccgagactgcatggacaattatccaacacaatggctctgacctgacccgcgtgaggaacacaaatcccgagaatccctacgcaggtttttttgaatatgtggcttccatggagcagttacaggcgacgattaacagggctgaacattgtgaacaggagtttacgtactactgtaagaaaagccgcctggtgaacaaacaggacggcacgccactgagctggtgggtgggacgcacaaatgaaacccaaacctattgggggggaagttcccctgacctgcaaaagtgcacctgtgggcttgaaggcaactgcatcgatagtcaatactattgcaattgcgacgccgacaggaatgagtggacaaacgatactggccttttggcctataaggaacatttgcccgtgaccaagatcgtgatcacagacactggccgtttacatagcgaggccgcatataaactaggtcccctgctttgccagggggaccgtagtttctggaattctgcctcttttgataccgaagcttcatatttgcacttcccgaccttccacggggaattgtccgctgatgtctctttctttttcaaaaccactgcatcgagcggtgtgtttctcgagaatctcgggatcgctgacttcatccgaatcgaactgcgaagcccaacggtggtcacgttttccttcgatgtcggtaacgggcctttcgagatttctgtccagagtccaacccatttcaatgataaccagtggcaccacgtgcgagtggaacgaaacatgaaggaggcgtcattgcaagtggatcagctcacacccaaaacccagccagctcccgccgatggtcacgtgttgctgcagctcaacagccagttgtttgttgggggcacagcaacacgacagagaggtttcctgggatgtatccggtctctgcagctcaacggcatgacattggaccttgaagaaagggctcaggtcacccctgaagtgcagccgggatgcaggggtcactgttcttcatacggcaaattatgcagaaacggcggcaagtgccgggagagaccgatcgggtttttctgcgattgtaccttcagtgcatacaccgggccattctgcagtaacgagatttcagcctacttcggcagtggctcatccgtgatatataactttcaggagaactatttgcttagcaaaaatagttcctcccacgccgcgtcttttcatggggacatgaaactgtctcgggagatgataaaatttagttttcgaaccactcggaccccatcactgctgctgttcgtgtcctcattctataaagagtacctgtccgttattattgccaagaatggcgacctgcaaatcaggtacaagctgaataaataccaggaacctgacgtggttaatttcgatttcaagaacatggccgacggtcagctacatcatataatgattaaccgagaggaaggcgtggtgtttatagagatcgacgataaccgacgccggcaggtccatctgagctctggcacggagttttctgctgttaaatccctcgtcctcggacgtattctcgagcatagcgatgtagaccaggatactgccctcgccggagctcaaggtttcacaggatgcctatcggctgtacagctatcccatgtggctcccctgaaggctgcgctgcacccctcacaccctgaccctgttacggtcactggacatgtgaccgaatcctcatgcatggcccaaccgggcactgacgccactagtagagagcggacgcactcatttgcagaccactccgggacaatagacgaccgggagccactagctaatgcaatcaaaagtgacagcgcggtcatcggcggtctaattgcagttgtgatatttattctgctgtgtatcaccgccatcgctgtgcggatttaccaacaaaagagactctacaagcggtccgaggccaaacgctcagaaaacgtcgacagcgccgaagcagttctgaaaagtgagctgaatattcaaaatgctgttaacgaaaaccaaaaagagtatttcttctag

SEQ ID NO: 228519 - DNA, 3780 bp, Artificial Sequence
  derived and/or modified sequence
atggggtcagtgaccggcgcggtgctaaaaacactgctgctgtccacgcagaattggaacagggtcgaggccggcaacagttatgattgcgatgatcctttagtgtccgcactaccacaggcctcattcagcagtagttcggagttatctagttcacatggcccagggttcgcaaggcttaaccgcagagatggcgcgggcgggtggtctcccctcgtgtcaaataagtatcagtggcttcagatagatctgggggagcggatggaagtgacagccgtcgccactcagggaggttacgggtcctccaactgggtaacctcttaccttcttatgttctcagacagcggctggaactggaaacagtacaggcaggaggacagcatctgggggttttccggcaatgccaacgcagacagtgtggtatactacaggcttcaaccttccataaaagcccgattcctacgcttcattcccttagaatggaatcctaagggtcgcattggaatgaggatcgaggtgttcgggtgcgcctaccgcagcgaagtcgtggatttggacggcaaatcatcccttctgtaccggtttgatcagaagtcccttagccccattaaagacatcatttcactcaaattcaagacaatgcaaagtgatggaatccttcttcatcgtgaagggccaaatggggatcatattactcttcagctgaggagagcccggcttttcctactaattaactctggagaggcaaaactccccagtacatctactctggtaaatctcactcttggcagtttgctggatgaccagcactggcactctgtgctgattcagagactcggcaagcaggtgaatttcacagtggatgaacatcgacaccattttcacgctaggggtgaattcaacctgatgaacctggactatgagggaaatgtcagcttctcttgctcacaacctcagtccatgccagtgacgtttctgtcatccagatcatatctggccctaccagattttagcggcgaggaggaggtgtcagcaacattccagtttcgcacatggaacaaagctggcctcctgttattttcagagttgcaactcattagcggagggatattgctgttcttgtcagatgggaagctgaaatcaaacctctatcagcccggaaagctcccctcagatatcacagcaggagttgagctcaacgatgggcagtggcatagtgtgagcttaagcgccaagaagaaccatctgtccgtggctgtggacggccagatggcttcagcagcccctctcctgggtcccgaacagatttacagcggtggcacctactacttcggcggatgcccggacaagtcctttggctccaaatgcaagagcccactgggcggatttcagggttgtatgcgtctgattagcatttctggcaaggtcgtagacctcatctctgtccagcaaggcagtctgggcaatttttcagatctgcagatcgacagctgcggcatctccgaccggtgtcttccaaactattgcgaacatggcggtgagtgctctcagtcttggagcaccttccactgcaattgcaccaatacaggatatcgtggggccacatgccacaattccatttacgaacagtcctgcgaagcttacaaacatagggggaacacaagtggattctattatatcgattctgacggaagcggcccacttgaacccttcttgctgtactgcaacatgaccgaaacagcttggactataatccagcacaatggaagcgatttgacacgggtgaggaacactaaccctgagaatccctacgctggtttctttgagtacgtagcctcgatggagcagctccaggccacaatcaatagagcagaacattgcgaacaggaattcacttattattgtaagaaatcacgcctggtgaacaagcaggacggcacgccattgagctggtgggtaggtcggacaaatgaaactcagacatattggggcggaagctctccggatcttcaaaagtgcacctgtggtctcgaggggaactgtattgactcccagtattactgcaactgtgatgcagatcgaaatgagtggaccaacgacaccggacttctcgcctataaagaacacctacccgtgaccaaaattgtcataaccgataccggcaggctgcattccgaggccgcatataagcttgggccgcttctgtgtcagggtgataggtccttttggaacagtgccagttttgacaccgaagctagttatctgcattttcccaccttccatggagagctgagcgcagatgttagcttcttttttaagacgacagctagctccggggtgtttctcgaaaacctgggaatcgccgacttcataaggattgagctgcgctcccctacagtcgtcacattctcttttgacgttgggaatggcccatttgagatctcagttcagtctccaactcatttcaatgacaaccagtggcaccatgtgagagtggagaggaacatgaaggaggcttcattgcaggttgaccagctaacgcctaaaacccaaccagctcctgcagatggccacgtcctgcttcagctcaactcccagctgtttgtgggtggaacagcaacgcgacagcgggggtttcttggctgcatccggtcactccagctgaacggtatgacactggacctggaagaaagggcccaagtaactcctgaggtgcagcctggctgtagaggtcattgctctagttatggcaaactctgtaggaacggggggaaatgtcgggaaagacctatagggtttttctgtgattgcacattctccgcatatactggcccgttctgctcaaacgaaatctcagcctacttcggctccggctcctccgtgatttataactttcaggaaaattacctcttgagcaaaaattcgagttctcatgcggcatcctttcatggggatatgaagctttcaagggaaatgataaagttctcgtttaggacaacacgtacccccagtctgctgctattcgtctcatctttttataaggagtacctctccgtgataattgctaaaaacggggacctgcagattcggtacaagctgaacaagtaccaagagcccgacgtagtgaatttcgatttcaaaaacatggccgatgggcagctgcaccacattatgattaatcgagaggaaggggtggtttttattgaaatcgatgacaatcggaggaggcaggtccacctctcttcaggcaccgagttctccgccgtcaagagcctggtcctcggccggatcctggagcatagtgacgtggaccaagacaccgctctcgctggagcccagggcttcacaggctgtttatcggcagtgcagttgtctcacgtcgccccactgaaggcagctctacacccctcacatcccgaccccgtcactgttacgggccatgttactgagagtagctgcatggcgcagccagggacagacgctacatcccgggagcgaacccacagctttgctgatcacagcggcaccatagatgatcgtgaacccctggccaatgccattaagagtgactccgccgtcattggggggttaattgccgtggtgatttttattctcctctgtattaccgcaatcgctgtcagaatatatcagcagaagcgcctgtataaacgaagcgaagcgaaacgatcggaaaacgtggactccgccgaagcagttctgaagagtgaactgaacattcaaaatgctgtgaatgagaaccagaaggaatattttttttag

SEQ ID NO: 228520 - DNA, 3924 bp, Artificial Sequence
  derived and/or modified sequence
atgggctctgtgactggagctgtgctgaagaccctgctgctgagcacccagaactggaacagagtggaggccggcaacagctatgactgtgatgaccccctggtgtctgccctgccccaggccagcttcagcagcagcagcgagctgagcagcagccacggccctggctttgcccggctgaacagaagagatggagctgggggctggagccccctggtgagcaacaagtaccagtggctgcagattgacctgggggagaggatggaggtgacagctgtggccacccagggcggctacggcagcagcaactgggtgaccagctacctgctgatgttcagtgacagcggctggaactggaagcagtaccggcaggaggacagcatctggggcttctctggaaatgccaatgctgacagcgtggtgtactaccgcctgcagcccagcatcaaggcccgcttcctgcgcttcatccccctggagtggaaccccaagggcagaattggcatgagaattgaggtgtttggctgtgcctacagaagtgaggtggtggacctggatggcaagagcagcctgctgtacagatttgaccagaagagcctgagccccatcaaggacatcatcagcctgaagttcaagaccatgcagagtgatggcatcctgctgcaccgggagggccccaatggagaccacatcaccctgcagctgcggcgggcccggctcttcctgctgatcaacagcggggaggccaagctgcccagcaccagcaccctggtgaacctgaccctgggcagcctgctggatgaccagcactggcacagcgtgctgatccagaggctgggcaagcaggtgaacttcaccgtggatgagcaccgccaccacttccacgcccggggggagttcaacctgatgaacctggactatgagatcagctttggaggcatcccagcccctgggaagtctgtgtccttcccccacaggaacttccacggctgcctggagaacctgtactacaacggggtggacatcatcgacctggccaagcagcagaagccccagatcatcgccatgggaaatgtgtccttcagctgcagccagccccagagcatgcctgtgaccttcctgagcagccgcagctacctggccctgcctgacttcagcggggaggaggaggtgtctgccaccttccagttccgcacctggaacaaggccggcctgctgctcttcagcgagctgcagctgatcagcggcggcatcctgctcttcctgagtgatggcaagctgaagagcaacctgtaccagcccgggaagctgcccagcgacatcacagctggggtggagctgaatgatggccagtggcacagcgtgtccctgagcgccaagaagaaccacctgtctgtggccgtggatggccagatggccagcgctgcccccctgctgggccctgagcagatctacagcggcggcacctactactttggaggctgcccagacaagagctttggcagcaagtgcaagagccccctgggcggcttccagggctgcatgaggctcatcagcatcagcggcaaggtggtggacctgatctctgtgcagcagggcagcctgggcaacttcagtgacctgcagattgacagctgtggcatcagtgaccgctgcctgcccaactactgtgaacatggaggagagtgcagccagagctggagcaccttccactgcaactgcaccaacacaggctacagaggagccacctgccacaacagcatctatgagcagagctgtgaggcctacaagcaccggggcaacaccagcggcttctactacatcgacagtgatggcagcggccccctggagcccttcctgctgtactgcaacatgacagaaacagcctggaccatcatccagcacaacggcagtgacctgaccagggtgaggaacaccaaccctgagaacccctatgccggcttctttgaatatgtggcctccatggagcagctgcaggccaccatcaacagagctgagcactgtgagcaggagttcacctactactgcaagaagagccggctggtgaacaagcaggacggcacccccctgtcctggtgggtgggccgcaccaatgagacccagacctactggggcggcagcagcccagacctgcagaagtgcacctgtggcctggagggcaactgcatcgacagccagtactactgcaactgtgatgctgacagaaatgagtggaccaatgacaccggcctgctggcctacaaggagcacctgcctgtgaccaagatcgtcatcacagacaccggccgcctgcacagcgaggccgcctacaagctgggccccctgctgtgccagggcgaccgctccttctggaacagcgccagctttgacacagaggccagctacctgcacttccccaccttccatggagagctgtctgcagatgtgtccttcttcttcaagaccacagccagcagcggggtcttcctggagaacctgggcattgctgacttcatcagaattgagctgcggagccccaccgtggtgaccttctcctttgatgtgggcaatggcccctttgagatctctgtgcagagccccacccacttcaatgacaaccagtggcaccacgtgcgggtggagaggaacatgaaggaggccagcctgcaggtggaccagctgacccccaagacccagcctgccccagcagatggccacgtgctgctgcagctgaacagccagctgtttgtgggcggcacagccacccggcagaggggcttcctgggctgcatccgcagcctgcagctgaatggcatgaccctggacctggaggagcgggcccaggtgaccccagaggtgcagcccggctgccggggccactgcagcagctatggcaagctgtgcagaaatggaggaaaatgtcgggagcggcccatcggcttcttctgtgactgcaccttcagcgcctacacaggccccttctgcagcaatgagatcagcgcctactttggaagtggcagcagcgtcatctacaacttccaggagaactacctgctgagcaagaacagcagcagccatgctgccagcttccatggagacatgaagctgagccgggagatgatcaagttctccttccgcaccaccaggacccccagcctgctgctgtttgtgtcctccttctacaaggagtacctgagcgtcatcatcgccaagaatggagacctgcagatccgctacaagctgaacaagtaccaggagccagatgtggtgaactttgacttcaagaacatggctgatggccagctgcaccacatcatgatcaaccgggaggagggcgtggtgttcatcgagattgatgacaacagaagacggcaggtgcacctgagcagcggcacagagttctctgctgtgaagagcctggtgctgggccgcatcctggagcacagtgatgtggaccaggacacagccctggccggggcccagggcttcaccggctgcctgtctgctgtgcagctgagccacgtggcccccctgaaggccgccctgcaccccagccacccagaccctgtgacagtgactggacatgtgacagagagcagctgcatggcccagcctggaacagatgccaccagccgggagaggacccacagctttgctgaccacagcggcaccattgatgaccgggagcccctggccaatgccatcaagagtgacagcgctgtgattggaggcctgattgctgtggtgatcttcatcctgctgtgcatcacagccatcgctgtgcgcatctaccagcagaagaggctgtacaagaggtctgaggccaagagaagtgaaaatgtggacagcgctgaggccgtgctgaagtctgagctgaacatccagaatgctgtgaatgaaaaccagaaggagtacttcttctag

SEQ ID NO: 228521 - DNA, 3780 bp, Artificial Sequence
  derived and/or modified sequence
atgggctctgtgactggagctgtgctgaagaccctgctgctgagcacccagaactggaacagagtggaggccggcaacagctatgactgtgatgaccccctggtgtctgccctgccccaggccagcttcagcagcagcagcgagctgagcagcagccacggccctggctttgcccggctgaacagaagagatggagctgggggctggagccccctggtgagcaacaagtaccagtggctgcagattgacctgggggagaggatggaggtgacagctgtggccacccagggcggctacggcagcagcaactgggtgaccagctacctgctgatgttcagtgacagcggctggaactggaagcagtaccggcaggaggacagcatctggggcttctctggaaatgccaatgctgacagcgtggtgtactaccgcctgcagcccagcatcaaggcccgcttcctgcgcttcatccccctggagtggaaccccaagggcagaattggcatgagaattgaggtgtttggctgtgcctacagaagtgaggtggtggacctggatggcaagagcagcctgctgtacagatttgaccagaagagcctgagccccatcaaggacatcatcagcctgaagttcaagaccatgcagagtgatggcatcctgctgcaccgggagggccccaatggagaccacatcaccctgcagctgcggcgggcccggctcttcctgctgatcaacagcggggaggccaagctgcccagcaccagcaccctggtgaacctgaccctgggcagcctgctggatgaccagcactggcacagcgtgctgatccagaggctgggcaagcaggtgaacttcaccgtggatgagcaccgccaccacttccacgcccggggggagttcaacctgatgaacctggactatgagggcaatgtgtccttcagctgcagccagccccagagcatgcctgtgaccttcctgagcagccgcagctacctggccctgcctgacttcagcggggaggaggaggtgtctgccaccttccagttccgcacctggaacaaggccggcctgctgctcttcagcgagctgcagctgatcagcggcggcatcctgctcttcctgagtgatggcaagctgaagagcaacctgtaccagcccgggaagctgcccagcgacatcacagctggggtggagctgaatgatggccagtggcacagcgtgtccctgagcgccaagaagaaccacctgtctgtggccgtggatggccagatggccagcgctgcccccctgctgggccctgagcagatctacagcggcggcacctactactttggaggctgcccagacaagagctttggcagcaagtgcaagagccccctgggcggcttccagggctgcatgaggctcatcagcatcagcggcaaggtggtggacctgatctctgtgcagcagggcagcctgggcaacttcagtgacctgcagattgacagctgtggcatcagtgaccgctgcctgcccaactactgtgaacatggaggagagtgcagccagagctggagcaccttccactgcaactgcaccaacacaggctacagaggagccacctgccacaacagcatctatgagcagagctgtgaggcctacaagcaccggggcaacaccagcggcttctactacatcgacagtgatggcagcggccccctggagcccttcctgctgtactgcaacatgacagaaacagcctggaccatcatccagcacaacggcagtgacctgaccagggtgaggaacaccaaccctgagaacccctatgccggcttctttgaatatgtggcctccatggagcagctgcaggccaccatcaacagagctgagcactgtgagcaggagttcacctactactgcaagaagagccggctggtgaacaagcaggacggcacccccctgtcctggtgggtgggccgcaccaatgagacccagacctactggggcggcagcagcccagacctgcagaagtgcacctgtggcctggagggcaactgcatcgacagccagtactactgcaactgtgatgctgacagaaatgagtggaccaatgacaccggcctgctggcctacaaggagcacctgcctgtgaccaagatcgtcatcacagacaccggccgcctgcacagcgaggccgcctacaagctgggccccctgctgtgccagggcgaccgctccttctggaacagcgccagctttgacacagaggccagctacctgcacttccccaccttccatggagagctgtctgcagatgtgtccttcttcttcaagaccacagccagcagcggggtcttcctggagaacctgggcattgctgacttcatcagaattgagctgcggagccccaccgtggtgaccttctcctttgatgtgggcaatggcccctttgagatctctgtgcagagccccacccacttcaatgacaaccagtggcaccacgtgcgggtggagaggaacatgaaggaggccagcctgcaggtggaccagctgacccccaagacccagcctgccccagcagatggccacgtgctgctgcagctgaacagccagctgtttgtgggcggcacagccacccggcagaggggcttcctgggctgcatccgcagcctgcagctgaatggcatgaccctggacctggaggagcgggcccaggtgaccccagaggtgcagcccggctgccggggccactgcagcagctatggcaagctgtgcagaaatggaggaaaatgtcgggagcggcccatcggcttcttctgtgactgcaccttcagcgcctacacaggccccttctgcagcaatgagatcagcgcctactttggaagtggcagcagcgtcatctacaacttccaggagaactacctgctgagcaagaacagcagcagccatgctgccagcttccatggagacatgaagctgagccgggagatgatcaagttctccttccgcaccaccaggacccccagcctgctgctgtttgtgtcctccttctacaaggagtacctgagcgtcatcatcgccaagaatggagacctgcagatccgctacaagctgaacaagtaccaggagccagatgtggtgaactttgacttcaagaacatggctgatggccagctgcaccacatcatgatcaaccgggaggagggcgtggtgttcatcgagattgatgacaacagaagacggcaggtgcacctgagcagcggcacagagttctctgctgtgaagagcctggtgctgggccgcatcctggagcacagtgatgtggaccaggacacagccctggccggggcccagggcttcaccggctgcctgtctgctgtgcagctgagccacgtggcccccctgaaggccgccctgcaccccagccacccagaccctgtgacagtgactggacatgtgacagagagcagctgcatggcccagcctggaacagatgccaccagccgggagaggacccacagctttgctgaccacagcggcaccattgatgaccgggagcccctggccaatgccatcaagagtgacagcgctgtgattggaggcctgattgctgtggtgatcttcatcctgctgtgcatcacagccatcgctgtgcgcatctaccagcagaagaggctgtacaagaggtctgaggccaagagaagtgaaaatgtggacagcgctgaggccgtgctgaagtctgagctgaacatccagaatgctgtgaatgaaaaccagaaggagtacttcttctag

SEQ ID NO: 228522 - DNA, 3924 bp, Artificial Sequence
  derived and/or modified sequence
atgggcagcgtgaccggcgccgtgctgaagaccctgctgctgagcacgcaaaattggaatcgagtggaggccggcaatagctatgactgcgacgatcctttagtgagtgccttaccgcaggcttctttcagcagttcatctgaactgtcctcgagccacggtccaggcttcgcgaggctgaatagaagggacggggcaggaggctggagcccgctggtttctaacaagtatcaatggctccagatcgacctcggcgagaggatggaggtgactgcggtcgccacccaagggggctatggctctagcaattgggtgaccagttacctgctcatgttttcagactccggatggaattggaaacagtataggcaggaggattcgatctggggtttcagcggtaacgcgaatgctgactcagtggtctactaccgcctgcagccatcaatcaaggcccgatttctgaggttcatccccctcgagtggaatcccaaagggagaataggaatgaggattgaggtttttggctgcgcttaccgatctgaggtggtggacctggacgggaagtcatctttgctctacaggtttgaccaaaagtctctgtcaccaattaaagatattatctcactcaagtttaagaccatgcagtccgacggaatacttttacaccgggaaggccctaatggcgaccacatcactcttcagctaaggcgcgcccgactctttttgttaatcaactctggggaggcgaaacttccctctaccagcacccttgtgaacctgacccttggaagcttgctggacgaccagcattggcatagtgtcctgattcagagactgggcaaacaagtcaatttcaccgtggatgaacaccggcatcacttccatgcccggggcgagtttaacctcatgaatttggactacgagatctctttcgggggaatcccggctcctggtaagagcgtcagttttccacaccgaaacttccacggctgtctggagaacctctattataatggggtcgatatcatagatctagctaagcaacagaagccacagataatcgccatgggaaacgtgtcatttagctgttcccagccccagagtatgccagttacgttcctcagctcacgctcatacctggccctgcctgatttctcaggcgaagaggaagtgtctgcaacattccagttcaggacttggaataaagccggactcctgctgttttccgaactccagttaatttcaggaggaatactgctattcttgtcagatggcaagctgaagtcgaacttgtaccaaccaggcaagttacctagcgacataactgccggggtcgagttgaacgatggccaatggcactccgtctcactgagtgctaaaaaaaatcatttgtccgtggcagtggacggtcaaatggcttcagccgctccgttgctgggcccagagcagatatacagcggcggcacatactacttcggaggatgccctgataagtcctttggcagcaagtgtaaaagtcctctaggaggttttcaggggtgtatgcggctaattagtatctcaggaaaggtggtcgatcttatcagcgtgcagcaagggagcctgggtaacttctcggaccttcagattgattcctgcgggataagcgaccgttgcctgcctaactactgtgaacatggtggggagtgtagccagtcatggagcacgttccattgcaactgtacaaacactggatacaggggggccacatgtcataacagtatctacgagcaatcctgcgaggcttataagcaccgcggcaacaccagtgggttctattacatagattctgatgggagtggtccacttgagcctttcctgctctactgtaatatgactgaaactgcgtggacaatcatccagcataacgggtccgacttaacaagagtgagaaatacgaaccccgaaaacccttacgctggatttttcgagtatgtggcctccatggaacaattgcaggcaactataaatcgggccgaacactgcgagcaggagttcacctactattgtaaaaaatctcgactggtgaacaaacaggacggcactcctctgtcctggtgggtgggacgtacgaacgagacacagacctactggggtggaagctcgcctgatttacagaagtgtacctgcggccttgagggaaattgtatcgatagtcaatactattgtaattgtgacgctgataggaacgaatggactaatgataccggactcttggcctacaaagagcatctgccagtgactaagatcgttattacagatacaggcaggctgcactcggaagccgcctataaactgggaccacttttatgccaaggggatcgaagcttttggaatagtgctagtttcgatacggaggctagctacctgcatttccccactttccacggagaactctcagccgacgtgtctttcttttttaagacgactgcgtcctcaggcgtttttttggagaatctcggtattgcagattttattaggattgagctgaggtcccctactgtggtgacattcagcttcgatgtaggaaatggaccatttgagatctcagtacaatcacccacacattttaacgacaatcagtggcaccatgtgagggttgaacgcaatatgaaggaagcctcattacaggtggaccagttgacccctaaaacacaacctgcccccgctgacggtcatgttctcctgcaactcaactcccagctcttcgtgggcggcaccgcgacgcgccagcggggcttccttgggtgtatcagatctctccagctgaatgggatgactttggatctggaagagagggcacaagtaaccccggaggtccagcctggatgcagagggcactgctccagttatggcaagctctgccggaacgggggaaaatgtagagaaagacccattggcttcttttgtgactgtacgttcagcgcttacacggggccgttctgcagcaacgagatctctgcctacttcggctcagggagttccgtgatatacaacttccaagagaactacttgctgtccaaaaattcctcctcacacgccgcaagttttcacggagacatgaagctcagcagggagatgataaaattttcatttagaacgacaaggactccctcacttctgctcttcgtgtctagcttttacaaggaatacctcagtgttattatcgcaaaaaacggcgatttgcagatcaggtacaaactcaacaagtatcaggaaccggacgtcgtgaacttcgacttcaaaaatatggcagacggtcagctccaccacatcatgatcaaccgcgaggagggcgtggtattcatcgaaattgacgataacagacgcaggcaggtgcatctttcatccggcactgagttttccgctgtgaaatcgctcgtgctgggtcgcattctggagcattcagacgtagatcaggatactgcccttgcaggagcacaaggcttcactgggtgcctatccgccgtacagttgtcccacgttgctcctctgaaggctgctttgcatcctagccatcctgatcctgtcacagttaccggacacgtgaccgagtcttcatgcatggcacagccaggaaccgacgctacatctcgcgagcgcacacattcatttgcagaccactctggcactattgatgatcgcgagccactggccaacgcgattaagagtgactccgctgtgatcggcggcctgattgccgtcgttatcttcattcttctatgcatcacagccatcgctgtgagaatctatcagcaaaagagactgtacaagcgaagcgaagccaagcgtagcgaaaacgtggactcagccgaggccgtactgaaaagcgagttaaatatccagaatgccgttaacgagaatcagaaggaatatttcttctag

SEQ ID NO: 228523 - DNA, 3780 bp, Artificial Sequence
  derived and/or modified sequence
atgggcagcgtgaccggcgccgtgctgaagaccctgctgctgagcacccagaactggaatcgcgtggaggccgggaactcttatgattgtgacgaccctctggtgagcgctctgcctcaggctagcttctccagcagctctgagctgagctctagtcacgggccaggattcgcaaggctgaaccgcagggatggagcgggcggatggagccctctggtctctaacaagtaccagtggctacagatcgatctgggcgaaagaatggaggtgaccgcagtggcgacccaaggcggctatggatcatcaaattgggtaacaagttatctgctcatgttcagtgatagtggctggaactggaagcagtatcggcaagaagattctatctggggatttagcggtaatgccaatgcggattccgttgtctactacagactgcagccaagcatcaaggcaagattccttaggttcattccacttgaatggaaccctaaggggcgcatcggcatgcggattgaggtgtttggctgcgcatacagatctgaagtggtcgatcttgatggcaaatcaagtctgctgtatcgctttgatcagaagagtttatcaccaataaaagacattatctcactgaagtttaaaacaatgcagagcgatggtatcctgctccatcgggaaggcccaaatggggatcacatcacattgcagctcaggagggcaagactctttcttttgataaacagcggcgaagccaagctgccatctacaagtaccctggttaacctaacgcttgggtcgcttctggacgatcagcactggcactctgtattaatccagagactggggaagcaggtgaattttacagttgacgagcatagacaccactttcacgcccggggcgagttcaacttgatgaacttggactacgaggggaatgtatcattcagctgctcacaacctcagtccatgcccgtgacatttttgtcatctaggtcgtacttagcactacccgatttctccggcgaggaggaagttagtgcaacttttcagtttagaacttggaataaagccggtcttctgcttttttctgagttgcagttgatttctggcgggatcctattgtttctgtcagacggcaaactgaagtctaacctgtatcagccaggcaaactcccgtccgacataactgccggcgtggagctcaacgacggccagtggcattccgtaagtctgagcgcaaagaagaaccatttgagtgtcgccgtggatggccagatggcaagcgcagcacctttgctggggcccgagcagatttacagtggcggaacatactacttcggaggatgtcctgacaaatcattcgggtcgaagtgtaaatctcctctgggtggcttccagggttgtatgcggctgatctcgattagcgggaaggtcgtcgatcttatctcagtgcaacaggggtcccttggaaacttctctgatctgcagatcgatagttgcgggattagcgatcgctgtctgcctaattattgtgaacacggaggtgaatgcagtcaatcatggtcaactttccattgtaactgtaccaacaccggatatagaggtgccacgtgccacaattccatctatgagcagtcctgcgaggcctataagcatcgcggcaataccagcggattttactacatagacagcgatgggtcagggcccctcgagcctttcctcttatactgcaacatgactgagactgcctggactataatccagcacaatgggagtgacttaacgcgagttcgcaacactaaccctgagaacccatacgccgggtttttcgaatatgtggcaagcatggaacagctgcaggcaaccattaatcgggctgagcattgtgagcaagaatttacatactactgtaagaagagcaggctggtcaacaagcaggacggaacacccttgtcctggtgggtgggcagaactaatgaaacccagacgtactggggaggctccagccctgacttgcagaaatgtacctgcggtctggaaggcaactgtattgacagccagtactattgtaactgcgacgcagataggaacgagtggactaatgacacaggcctgctagcttataaagaacatctgccagtgacaaagatcgtgattaccgacacaggtagattacactcagaagctgcctacaagctgggccctctgctctgtcagggtgacaggagcttctggaacagcgcatccttcgatacggaagcctcctatctgcactttcccacattccatggggagctcagtgcggacgtctctttcttctttaaaacgaccgcatcgtcgggcgtttttcttgaaaacctggggatcgccgattttatccggattgagcttcgcagccccacagtggttacctttagcttcgacgtcggaaacggtcctttcgaaatttcagtccaaagccctacccactttaatgataatcagtggcaccacgtgcgcgtggagcgaaatatgaaggaagcctcattgcaagtagaccagcttaccccaaaaacccagcctgctcctgcggatgggcacgtgctgctgcaactcaattcgcagttgttcgtgggcgggactgccactaggcaacgaggctttctgggatgtatccgaagcctacagctgaatggcatgacactggacctagaggagcgggctcaagtaacaccagaagtccaaccaggctgccgggggcactgttcatcttacgggaaactgtgccgcaacggcggcaaatgccgggagcggcctatcggcttcttttgtgattgtaccttctccgcgtacaccggcccgttttgctccaacgagatttccgcttacttcggcagcggctcatctgtgatctacaatttccaggagaactacttgttgtctaagaattcatcttcccatgccgcctcttttcatggcgacatgaaactttcccgcgagatgatcaaattcagcttccgcaccacgcgcacaccctccctgctcctgtttgtcagcagtttttataaggagtacttgtctgtgatcatcgccaaaaatggcgatcttcagatcaggtataagctcaacaaataccaagagcctgacgtagtgaattttgacttcaaaaacatggccgacggccaactgcatcatatcatgatcaatcgagaagaaggtgtcgtctttattgaaatagatgacaatcgccggcggcaagtgcacctaagctccgggactgagttctctgctgtgaaaagccttgtgttgggacggatcctcgaacacagtgatgtggaccaggacaccgccctggccggagcccaaggttttacgggatgcctgtcggctgtccagctaagccacgtggcccctttaaaagcagcgctgcacccttctcaccccgacccagtcactgtaaccggacacgtgaccgagtcttcttgcatggcccagcccggcaccgatgcaacctcaagggagcgcactcatagcttcgctgaccacagtgggactatcgatgatcgtgagcctctcgccaacgcaatcaagagcgacagcgctgtcattggcgggttaattgccgtcgtcatctttatcctgctctgcattactgccattgccgtacgtatctatcagcagaaacgactgtataaacgctctgaggctaaacgctccgagaacgtggactctgccgaagctgtcttaaaatctgaattgaacatacagaatgcagttaacgagaaccagaaggaatattttttttag

SEQ ID NO: 228524 - DNA, 3924 bp, Artificial Sequence
  derived and/or modified sequence
atgggatccgtgactggggcagtcctcaagacacttttgctatccacacaaaattggaatcgagtagaagctggcaactcctacgattgtgacgatcctttggtgtctgctctacctcaggctagctttagttccagcagcgaactgagctcctcacatgggccaggatttgctagactgaaccgtagagacggagccggtggatggtctccgcttgtatccaataagtatcagtggctccagatcgacctgggggagagaatggaggtaaccgccgtggcaacacagggtggatacggatcgtccaattgggtgactagctatttgttgatgttcagcgattctggttggaattggaagcaatacagacaggaggacagcatatggggctttagtggcaatgcgaacgccgactccgtcgtgtattatcgcttgcaaccgagcatcaaggctcgtttcttgagattcattccattggagtggaatccgaaaggtcgaataggcatgcgtatcgaagttttcggatgcgcttatcggtcagaggtggtcgacttggacgggaagagtagcctcctatatcgcttcgaccagaagtctctgagccccattaaagatattatctctttaaaattcaagaccatgcagtctgatggaatcctgttacacagagagggtccaaacggagaccacattacccttcagttgagacgagctaggctgtttttgttgataaattccggggaggctaagctccccagcacctccacattggtgaatctcacgctcggatcccttctggacgaccagcactggcacagtgtcttgattcaacggttggggaagcaagtcaacttcactgttgacgagcaccgccaccacttccacgccagaggtgaattcaatttgatgaacctagattatgagatttcatttgggggaattccagcgccagggaaatctgtgtcttttccccaccgcaactttcacggttgcctcgaaaacctgtattataacggggtggacatcatcgatttggctaagcaacagaaacctcaaataatcgcaatggggaacgtttctttttcctgctcccagccacagagtatgccagtcacttttttgagtagtcgctcatacctggccctacccgatttcagtggcgaggaggaggtgtctgccacctttcagtttagaacctggaataaagccggtttgctgctgttcagcgaactgcagttgatctcagggggaatcctgctctttttgtctgatggcaagcttaaatccaatctgtatcagcccggaaagctgcccagtgatatcacagctggagtggagctgaatgacgggcagtggcactccgtgagtctaagtgcaaagaagaatcacctgagcgtggcggtggacggtcagatggcttccgctgcgcctctgctggggcctgaacagatttattccggaggaacatattatttcgggggatgcccagataagagtttcggttccaaatgtaagagcccactcgggggatttcaaggctgtatgcggttgattagcatatcaggtaaagttgttgaccttattagcgtccagcaagggagtctaggaaactttagcgacctccagatcgattcttgtggcatctcggataggtgtctcccaaactactgcgaacatggaggcgagtgcagccagtcttggtctaccttccattgcaattgcaccaatacgggttatagaggtgctacatgtcataatagtatatacgagcagtcttgtgaggcctacaagcacagagggaacacttctggattctattatatcgacagcgatgggagtggcccactggagcccttcctgctatactgcaatatgactgaaactgcctggacaatcatccagcacaacggcagcgatttaacaagggtgcggaataccaacccagaaaacccttacgctggattctttgaatacgtggctagtatggagcagttacaagccaccatcaacagggctgagcattgtgaacaggagttcacttactattgtaagaaaagcagactagttaacaaacaagatggaacccccctgagctggtgggtggggaggacgaacgagacccagacttattggggtggcagctcaccggacctgcaaaaatgtacctgtggcctggagggaaattgtatcgatagtcaatactattgcaattgcgatgctgatagaaatgaatggaccaacgatacggggttgcttgcctataaagagcatctgcccgtcaccaaaattgtcataacagatactggccgtctccactccgaagccgcttataaactcggacccctgctctgccagggcgatcgctccttctggaattcggccagctttgacaccgaggctagctatctccacttcccaacatttcacggtgagcttagtgccgatgtctcattcttttttaaaacgacagccagctctggggtcttcctcgagaacctcgggatcgctgacttcatacggatcgaactgagaagtcccaccgtagttaccttttcgtttgacgtgggcaacggcccattcgagataagtgtacagtcccctacgcactttaacgataatcaatggcaccatgtgcgggtggaaaggaatatgaaggaagcttcactgcaggtcgaccagttgacccctaaaacacagcccgcacctgcagacgggcacgtcctgttgcagctgaattctcagctgttcgtgggcggtacagccaccaggcaacggggttttctcgggtgtatacgttccctacaacttaacggcatgacgctcgacctggaggagcgggcacaggtgacaccagaggtgcagccgggttgccgcggacactgcagctcttacggtaagctgtgtaggaatggagggaaatgtcgcgagcgacctattgggtttttctgtgactgcacgttctcggcatatacagggccattttgtagcaatgaaatttcagcctatttcggttccgggtcatctgtaatatataactttcaagaaaattatttactctcaaagaattcctctagccacgccgcttctttccacggggacatgaagttgtctcgcgagatgattaagttctctttccgaactacacgtacaccctcgctgctgctctttgtatcaagcttttataaggaatatttgagcgttatcatcgctaagaacggcgatctgcagattcggtataagttgaacaagtaccaggagcccgatgtggtgaactttgattttaaaaacatggctgacggtcagctgcatcacattatgatcaatagagaggagggcgtagtcttcattgagattgacgataacagacgcagacaggtccatctgtcatcgggaacagagttctccgctgtcaagtccctcgtgctaggtagaattctggagcactcagatgtggaccaggataccgctctggcgggagcgcagggctttactggatgcctgtccgccgtgcagctgtctcacgttgcgcctttgaaagcagccctccaccctagtcaccctgatccggtcacggttactggccacgttacagagtccagctgcatggctcagccagggacagatgctacttctcgggaacgcacccactccttcgctgaccatagcggaaccatcgacgacagggaaccactggccaacgccattaagtcagacagtgctgttattgggggattgatcgcggtcgtgatttttattcttttgtgcataactgccatagcagtgcgcatctaccagcagaaacgtctgtacaagcggagcgaagctaagcgaagcgaaaacgtggattcagctgaggccgttcttaagtctgagctgaacatccaaaatgcagtcaatgagaaccagaaggaatatttcttttag

SEQ ID NO: 228525 - DNA, 3780 bp, Artificial Sequence
  derived and/or modified sequence
atgggatccgtgaccggagctgtcttgaaaaccctgttgctgtccacacagaattggaaccgcgtggaggccggaaactcttacgactgcgatgatccactggtcagtgcgctcccccaggcaagtttctcttctagcagcgaactttcttccagccatggcccaggtttcgctagactgaaccgaagagatggggctggcggttggagtcccctggtcagcaataaataccaatggctgcagattgacctgggcgaacgcatggaggtcactgcagtggccacacaggggggatacggttcgtctaactgggtcacaagttacctgcttatgtttagcgactccgggtggaactggaaacaatacagacaggaggacagtatttggggtttctcgggaaacgcaaatgctgattccgttgtctattatagactgcagcccagcataaaagctcgtttcctcagatttatacctcttgaatggaaccctaaaggaaggattggcatgcgaatagaggtattcggttgtgcctaccgatcagaagttgtcgacctggatgggaaaagcagcttgctgtaccggttcgaccaaaagtccttgagtccgatcaaggacattattagtctaaagttcaagacaatgcagtccgacggcattctgttgcatagggaagggcctaacggcgaccatatcacgttgcagcttcgccgtgcgcgactcttcctcctgatcaattctggagaggcaaaactgcccagtacctccacgctcgtgaatctcacattagggtctttactggacgaccagcactggcacagtgtgcttattcagcgcctcggaaaacaggtaaatttcacagtagacgaacaccggcaccactttcacgcaaggggggaattcaatcttatgaatctggattacgagggaaatgtgtccttctcctgttcgcagcctcaatccatgccagttacttttctgtcttcccgttcatacctggccctgccggatttttctggggaagaagaagtgagcgcaacattccagttcagaacttggaataaggccggtctgttgctgttttccgagttgcaactgatctccgggggaatcctgctgtttctctcagacggaaagctgaagagtaacctgtatcagcctggcaaattgccatccgacattactgccggagtggaactcaatgacggacagtggcatagcgtaagcctcagcgctaaaaaaaaccatttgtcagtggcagtggatgggcaaatggctagcgcggctccattactgggccctgagcaaatctattccgggggtacgtactactttggaggatgtcctgataaaagtttcggaagcaaatgtaaaagtcctttaggtggctttcagggctgtatgaggttaatctcaatctcagggaaagtcgtggacctaatctccgtccaacaagggagcctgggaaacttctccgacttgcagattgatagctgtggaattagcgatcggtgcctcccaaattactgcgagcatggtggcgaatgtagtcagtcttggtccacgtttcattgcaactgcacaaacaccggctataggggagccacttgccacaacagcatttacgaacagtcttgtgaagcatataagcacagggggaatacttctgggttctactacatcgattctgacggctctgggccattggaaccgttcctgctctactgcaatatgactgagacagcctggactatcattcaacacaatggatctgatcttaccagagtgcggaatactaaccctgaaaatccctacgcgggtttttttgagtatgtggcttccatggaacagttgcaggccaccatcaatcgggcagagcactgcgaacaagagttcacctactactgcaagaagtcaaggttagtgaacaagcaggacggcacaccactcagctggtgggttggaagaacaaacgagacacagacctactggggcggaagctcacctgacttgcaaaagtgtacttgcggtctggaagggaactgcatagattctcaatattattgcaactgcgacgctgacagaaacgaatggactaatgatacgggtctccttgcctacaaagaacatttgccagtaaccaagattgttatcaccgacacggggagactgcattctgaggctgcgtacaaactcgggccactgctgtgtcagggcgataggtctttctggaactcggcatccttcgataccgaggcttcctatctccatttccccacatttcatggcgaactgtcagccgatgtttccttcttctttaagactacagctagctcaggggtgtttcttgagaacctcggaattgccgactttatacgaattgagctccgcagccctacggtcgtgacatttagttttgacgtggggaacggaccatttgaaatatccgtacagagccccacccacttcaatgataaccagtggcaccacgtccgcgttgagaggaatatgaaagaggcttctctacaggtggatcaactgacaccgaagacgcaacccgctcccgcagatggccatgtgctcctgcaattgaactctcagttgttcgtggggggaaccgctacacgccaacgaggtttcttgggatgtatcaggagtctgcagctgaacggcatgaccttggacctcgaggaaagggctcaggtgacccccgaagtgcagcccggttgcaggggccactgctccagctatggtaaactgtgtcgcaacggtgggaagtgcagagaaaggcccataggattcttttgtgattgcacctttagcgcatatacgggcccattttgttctaacgaaattagcgcttacttcgggtctgggtccagcgtgatctataatttccaggagaattacctcctctccaagaactcctccagtcacgccgctagtttccacggcgacatgaaactgtcaagggagatgatcaagttttcgttccgaaccacacgcacgccatctctcctcctgttcgtcagctctttttacaaggagtatctgtctgtaataattgcaaagaacggagatctgcaaatcagatataaactcaacaagtatcaggagcccgatgtcgtcaattttgacttcaagaacatggccgacggacagctacaccacataatgattaatcgagaggagggggtagtgttcatagagattgacgacaatcggaggagacaggtgcacctctcttcgggaactgaattcagcgccgtaaagtccctcgtgcttgggaggatcctggagcactccgatgttgaccaggacaccgccctcgcgggagcacaaggctttaccgggtgcctcagtgccgtgcaactgagtcacgttgcccctctcaaagccgcactccatcccagccaccctgaccccgtgacagttaccggacatgtcaccgaaagctcttgcatggcacagcctggtacggatgccacctctcgggaacgtacacattccttcgcagatcactcagggacaattgatgaccgggaacctctcgccaatgcaatcaaaagcgatagcgccgtcatcggcggtctcatcgccgtagtcatctttattttgctatgtataaccgctatcgcagtgcgaatctaccagcaaaagaggctgtacaaaagaagcgaggcgaaacgttcagaaaacgttgactctgccgaagcagtgttgaagagcgaattgaatatccagaacgccgtgaacgaaaaccaaaaagagtacttcttctag

SEQ ID NO: 228526 - protein, 1032 aa, Artificial Sequence
  derived and/or modified sequence
MEAAAAVVAAEAEVENEDGDSSCGDVCFMDKGLQSISELSLDSTLHAVNLHCNNISKIEAIDHIWNLQHLDLSSNQISRIEGLNTLTKLCTLNLSCNLITKVEGLEELINLTRLNVSYNHIDDLSGLIPLHGIKHKLRYIDLHSNRIDSIHHLLQCMVGLHFLTNLILEKDGDDNPVCRLPGYRAVILQTLPQLRILDCKNIFGEPVNLTEINSSQLQCLEGLLDNLVSSDSPLNISEDEIIDRMPVITAPIDELVPLEQFASTPSDAVLTSFMSVCQSSEPEKNNHENDLQNEIKLQKLDDQILQLLNETSNSIDNVLEKDPRPKRDTDITSESDYGNRKECNRKVPRRSKIPYDAKTIQTIKHHNKNYNSFVSCNRKMKPPYLKELYVSSSLANCPMLQESEKPKTEIIKVDQSHSEDNTYQSLVEQLDQEREKRWRAEQAENKLMDYIDELHKHANEKEDIHSLALLTTDRLKEIIFRERNSKGQLEVMVHKLQNEIKKLTVELMKAKDQQEDHLKHLRTLEKTLEKMERQKRQQQAAQIRLIQEVELKASAADREIYLLRTSLHREREQAQQLHQLLALKEQEHRKELETREFFTDADFQDALAKEIAKEEKKHEQMIKEYQEKIDVLSQQYMDLENEFRIALTVEARRFQDVKDGFENVATELAKSKHALIWAQRKENESSSLIKDLTCMVKEQKTKLAEVSKLKQETAANLQNQINTLEILIEDDKQKSIQIELLKHEKVQLISELAAKESLIFGLRTERKVWGHELAQQGSSLAQNRGKLEAQIESLSRENECLRKTNESDSDALRIKCKIIDDQTETIRKLKDCLQEKDEHIKRLQEKITEIEKCTQEQLDEKSSQLDEVLEKLERHNERKEKLKQQLKGKEVELEEIRKAYSTLNRKWHDKGELLCHLETQVKEVKEKFENKEKKLKAERDKSIELQKNAMEKLHSMDDAFKRQVDAIVEAHQAEIAQLANEKQKCIDSANLKVHQIEKEMRELLEETCKNKKTMEAKIKQLAFALNEIQQDM

SEQ ID NO: 228527 - protein, 1012 aa, Artificial Sequence
  derived and/or modified sequence
MLLKSIFIVYIFFYSISELSLDSTLHAVNLHCNNISKIEAIDHIWNLQHLDLSSNQISRIEGLNTLTKLCTLNLSCNLITKVEGLEELINLTRLNVSYNHIDDLSGLIPLHGIKHKLRYIDLHSNRIDSIHHLLQCMVGLHFLTNLILEKDGDDNPVCRLPGYRAVILQTLPQLRILDCKNIFGEPVNLTEINSSQLQCLEGLLDNLVSSDSPLNISEDEIIDRMPVITAPIDELVPLEQFASTPSDAVLTSFMSVCQSSEPEKNNHENDLQNEIKLQKLDDQILQLLNETSNSIDNVLEKDPRPKRDTDITSESDYGNRKECNRKVPRRSKIPYDAKTIQTIKHHNKNYNSFVSCNRKMKPPYLKELYVSSSLANCPMLQESEKPKTEIIKVDQSHSEDNTYQSLVEQLDQEREKRWRAEQAENKLMDYIDELHKHANEKEDIHSLALLTTDRLKEIIFRERNSKGQLEVMVHKLQNEIKKLTVELMKAKDQQEDHLKHLRTLEKTLEKMERQKRQQQAAQIRLIQEVELKASAADREIYLLRTSLHREREQAQQLHQLLALKEQEHRKELETREFFTDADFQDALAKEIAKEEKKHEQMIKEYQEKIDVLSQQYMDLENEFRIALTVEARRFQDVKDGFENVATELAKSKHALIWAQRKENESSSLIKDLTCMVKEQKTKLAEVSKLKQETAANLQNQINTLEILIEDDKQKSIQIELLKHEKVQLISELAAKESLIFGLRTERKVWGHELAQQGSSLAQNRGKLEAQIESLSRENECLRKTNESDSDALRIKCKIIDDQTETIRKLKDCLQEKDEHIKRLQEKITEIEKCTQEQLDEKSSQLDEVLEKLERHNERKEKLKQQLKGKEVELEEIRKAYSTLNRKWHDKGELLCHLETQVKEVKEKFENKEKKLKAERDKSIELQKNAMEKLHSMDDAFKRQVDAIVEAHQAEIAQLANEKQKCIDSANLKVHQIEKEMRELLEETCKNKKTMEAKIKQLAFALNEIQQDM

SEQ ID NO: 228528 - DNA, 3099 bp, Artificial Sequence
  derived and/or modified sequence
atggaggccgccgccgccgtggtggccgccgaggccgaggtggagaacgaggacggcgacagcagctgcggcgacgtgtgcttcatggacaagggcctgcagagcatcagcgagctgagcctggacagcaccctgcacgccgtgaacctgcactgcaacaacatcagcaagatcgaggccatcgaccacatctggaacctgcagcacctggacctgagcagcaaccagatcagcagaatcgagggcctgaacaccctgaccaagctgtgcaccctgaacctgagctgcaacctgatcaccaaggtggagggcctggaggagctgatcaacctgaccagactgaacgtgagctacaaccacatcgacgacctgagcggcctgatccccctgcacggcatcaagcacaagctgagatacatcgacctgcacagcaacagaatcgacagcatccaccacctgctgcagtgcatggtgggcctgcacttcctgaccaacctgatcctggagaaggacggcgacgacaaccccgtgtgcagactgcccggctacagagccgtgatcctgcagaccctgccccagctgagaatcctggactgcaagaacatcttcggcgagcccgtgaacctgaccgagatcaacagcagccagctgcagtgcctggagggcctgctggacaacctggtgagcagcgacagccccctgaacatcagcgaggacgagatcatcgacagaatgcccgtgatcaccgcccccatcgacgagctggtgcccctggagcagttcgccagcacccccagcgacgccgtgctgaccagcttcatgagcgtgtgccagagcagcgagcccgagaagaacaaccacgagaacgacctgcagaacgagatcaagctgcagaagctggacgaccagatcctgcagctgctgaacgagaccagcaacagcatcgacaacgtgctggagaaggaccccagacccaagagagacaccgacatcaccagcgagagcgactacggcaacagaaaggagtgcaacagaaaggtgcccagaagaagcaagatcccctacgacgccaagaccatccagaccatcaagcaccacaacaagaactacaacagcttcgtgagctgcaacagaaagatgaagcccccctacctgaaggagctgtacgtgagcagcagcctggccaactgccccatgctgcaggagagcgagaagcccaagaccgagatcatcaaggtggaccagagccacagcgaggacaacacctaccagagcctggtggagcagctggaccaggagagagagaagagatggagagccgagcaggccgagaacaagctgatggactacatcgacgagctgcacaagcacgccaacgagaaggaggacatccacagcctggccctgctgaccaccgacagactgaaggagatcatcttcagagagagaaacagcaagggccagctggaggtgatggtgcacaagctgcagaacgagatcaagaagctgaccgtggagctgatgaaggccaaggaccagcaggaggaccacctgaagcacctgagaaccctggagaagaccctggagaagatggagagacagaagagacagcagcaggccgcccagatcagactgatccaggaggtggagctgaaggccagcgccgccgacagagagatctacctgctgagaaccagcctgcacagagagagagagcaggcccagcagctgcaccagctgctggccctgaaggagcaggagcacagaaaggagctggagaccagagagttcttcaccgacgccgacttccaggacgccctggccaaggagatcgccaaggaggagaagaagcacgagcagatgatcaaggagtaccaggagaagatcgacgtgctgagccagcagtacatggacctggagaacgagttcagaatcgccctgaccgtggaggccagaagattccaggacgtgaaggacggcttcgagaacgtggccaccgagctggccaagagcaagcacgccctgatctgggcccagagaaaggagaacgagagcagcagcctgatcaaggacctgacctgcatggtgaaggagcagaagaccaagctggccgaggtgagcaagctgaagcaggagaccgccgccaacctgcagaaccagatcaacaccctggagatcctgatcgaggacgacaagcagaagagcatccagatcgagctgctgaagcacgagaaggtgcagctgatcagcgagctggccgccaaggagagcctgatcttcggcctgagaaccgagagaaaggtgtggggccacgagctggcccagcagggcagcagcctggcccagaacagaggcaagctggaggcccagatcgagagcctgagcagagagaacgagtgcctgagaaagaccaacgagagcgacagcgacgccctgagaatcaagtgcaagatcatcgacgaccagaccgagaccatcagaaagctgaaggactgcctgcaggagaaggacgagcacatcaagagactgcaggagaagatcaccgagatcgagaagtgcacccaggagcagctggacgagaagagcagccagctggacgaggtgctggagaagctggagagacacaacgagagaaaggagaagctgaagcagcagctgaagggcaaggaggtggagctggaggagatcagaaaggcctacagcaccctgaacagaaagtggcacgacaagggcgagctgctgtgccacctggagacccaggtgaaggaggtgaaggagaagttcgagaacaaggagaagaagctgaaggccgagagagacaagagcatcgagctgcagaagaacgccatggagaagctgcacagcatggacgacgccttcaagagacaggtggacgccatcgtggaggcccaccaggccgagatcgcccagctggccaacgagaagcagaagtgcatcgacagcgccaacctgaaggtgcaccagatcgagaaggagatgagagagctgctggaggagacctgcaagaacaagaagaccatggaggccaagatcaagcagctggccttcgccctgaacgagatccagcaggacatgtag

SEQ ID NO: 228529 - DNA, 3039 bp, Artificial Sequence
  derived and/or modified sequence
atgctgctgaagagcatcttcatcgtgtacatcttcttctacagcatcagcgagctgagcctggacagcaccctgcacgccgtgaacctgcactgcaacaacatcagcaagatcgaggccatcgaccacatctggaacctgcagcacctggacctgagcagcaaccagatcagcagaatcgagggcctgaacaccctgaccaagctgtgcaccctgaacctgagctgcaacctgatcaccaaggtggagggcctggaggagctgatcaacctgaccagactgaacgtgagctacaaccacatcgacgacctgagcggcctgatccccctgcacggcatcaagcacaagctgagatacatcgacctgcacagcaacagaatcgacagcatccaccacctgctgcagtgcatggtgggcctgcacttcctgaccaacctgatcctggagaaggacggcgacgacaaccccgtgtgcagactgcccggctacagagccgtgatcctgcagaccctgccccagctgagaatcctggactgcaagaacatcttcggcgagcccgtgaacctgaccgagatcaacagcagccagctgcagtgcctggagggcctgctggacaacctggtgagcagcgacagccccctgaacatcagcgaggacgagatcatcgacagaatgcccgtgatcaccgcccccatcgacgagctggtgcccctggagcagttcgccagcacccccagcgacgccgtgctgaccagcttcatgagcgtgtgccagagcagcgagcccgagaagaacaaccacgagaacgacctgcagaacgagatcaagctgcagaagctggacgaccagatcctgcagctgctgaacgagaccagcaacagcatcgacaacgtgctggagaaggaccccagacccaagagagacaccgacatcaccagcgagagcgactacggcaacagaaaggagtgcaacagaaaggtgcccagaagaagcaagatcccctacgacgccaagaccatccagaccatcaagcaccacaacaagaactacaacagcttcgtgagctgcaacagaaagatgaagcccccctacctgaaggagctgtacgtgagcagcagcctggccaactgccccatgctgcaggagagcgagaagcccaagaccgagatcatcaaggtggaccagagccacagcgaggacaacacctaccagagcctggtggagcagctggaccaggagagagagaagagatggagagccgagcaggccgagaacaagctgatggactacatcgacgagctgcacaagcacgccaacgagaaggaggacatccacagcctggccctgctgaccaccgacagactgaaggagatcatcttcagagagagaaacagcaagggccagctggaggtgatggtgcacaagctgcagaacgagatcaagaagctgaccgtggagctgatgaaggccaaggaccagcaggaggaccacctgaagcacctgagaaccctggagaagaccctggagaagatggagagacagaagagacagcagcaggccgcccagatcagactgatccaggaggtggagctgaaggccagcgccgccgacagagagatctacctgctgagaaccagcctgcacagagagagagagcaggcccagcagctgcaccagctgctggccctgaaggagcaggagcacagaaaggagctggagaccagagagttcttcaccgacgccgacttccaggacgccctggccaaggagatcgccaaggaggagaagaagcacgagcagatgatcaaggagtaccaggagaagatcgacgtgctgagccagcagtacatggacctggagaacgagttcagaatcgccctgaccgtggaggccagaagattccaggacgtgaaggacggcttcgagaacgtggccaccgagctggccaagagcaagcacgccctgatctgggcccagagaaaggagaacgagagcagcagcctgatcaaggacctgacctgcatggtgaaggagcagaagaccaagctggccgaggtgagcaagctgaagcaggagaccgccgccaacctgcagaaccagatcaacaccctggagatcctgatcgaggacgacaagcagaagagcatccagatcgagctgctgaagcacgagaaggtgcagctgatcagcgagctggccgccaaggagagcctgatcttcggcctgagaaccgagagaaaggtgtggggccacgagctggcccagcagggcagcagcctggcccagaacagaggcaagctggaggcccagatcgagagcctgagcagagagaacgagtgcctgagaaagaccaacgagagcgacagcgacgccctgagaatcaagtgcaagatcatcgacgaccagaccgagaccatcagaaagctgaaggactgcctgcaggagaaggacgagcacatcaagagactgcaggagaagatcaccgagatcgagaagtgcacccaggagcagctggacgagaagagcagccagctggacgaggtgctggagaagctggagagacacaacgagagaaaggagaagctgaagcagcagctgaagggcaaggaggtggagctggaggagatcagaaaggcctacagcaccctgaacagaaagtggcacgacaagggcgagctgctgtgccacctggagacccaggtgaaggaggtgaaggagaagttcgagaacaaggagaagaagctgaaggccgagagagacaagagcatcgagctgcagaagaacgccatggagaagctgcacagcatggacgacgccttcaagagacaggtggacgccatcgtggaggcccaccaggccgagatcgcccagctggccaacgagaagcagaagtgcatcgacagcgccaacctgaaggtgcaccagatcgagaaggagatgagagagctgctggaggagacctgcaagaacaagaagaccatggaggccaagatcaagcagctggccttcgccctgaacgagatccagcaggacatgtag

SEQ ID NO: 228530 - DNA, 3813 bp, Artificial Sequence
  derived and/or modified sequence
gggaaagttcccggctgtcggttggagggtgggtcctcgccccgccccgccccctcgggccgcccttccgcgcttccgggaggcttgtcccaagctcacggacccctcgctgggtgccggttaagaccccgctccccgtcgccagtgctatggaggcggcggcggcggtggtggcggcagaggcggaagtggaaaacgaagacggcgacagcagctgcggggatgtatgcttcatggacaaaggcttgcagagcatatcagaattatctttagattcaactcttcatgccgtcaatcttcattgcaataacatctccaagatcgaagccattgatcatatttggaatttacaacatctagatctgtcatctaatcaaataagtagaattgaaggactaaacacactgacaaaactgtgcacattaaatttgtcctgcaatttgattacaaaagtagaaggacttgaagaactaattaatctgactagactaaatgtatcttataaccacatagatgatcttagtggattgattccccttcatggaattaagcataaacttagatatattgatctacatagtaatcgtatagatagtatccatcacttacttcagtgtatggtaggattgcacttcctgaccaatcttattttggagaaagatggagacgataatcctgtctgtcgactgccagggtacagagcagttattctccagactttgccacagcttagaatcctagattgcaagaacatatttggtgaaccagtaaatttgacagaaataaattcatcacagctgcagtgcctagaaggtcttttggataatttagtttcttctgattctcccctaaatataagtgaagatgagatcattgatagaatgccagtgataacagcacctatcgatgagttagttcccttggaacagtttgcaagtacaccaagtgatgctgtgttgacgtcttttatgtctgtgtgtcaatcttctgagccagagaaaaataatcatgaaaacgatttgcagaatgagataaaacttcagaaattagatgaccaaattctacaacttctaaatgaaacttctaattcaatagataacgttcttgagaaagaccccagaccaaaaagagacacagatataacttctgaaagtgactatggaaacagaaaagaatgcaatagaaaagttcctcgaagatcaaaaatcccttatgatgccaaaaccattcaaactattaagcaccacaataaaaactacaactcttttgtaagttgtaatcgtaaaatgaaaccaccttaccttaaagaattatatgtaagctcatctttagcaaactgtcctatgttacaagaatcagaaaagccaaagactgaaataattaaagtagaccaaagtcactcagaagacaacacttaccagtcccttgttgaacagctagaccaagagagagagaagagatggagagctgagcaagccgaaaataaactcatggattatattgatgagctgcataaacatgcaaatgaaaaagaggatattcatagtctggctctacttaccacagataggctaaaggaaattatttttagagagagaaattccaaaggacaactcgaagttatggttcacaaacttcaaaatgaaattaaaaaactgactgttgaactaatgaaagcaaaagatcaacaagaggatcaccttaaacacttaagaaccctcgaaaaaacattagaaaaaatggagagacaaaaaaggcagcagcaggcagcacagataagactgatccaagaggtggaactcaaagcttcagctgccgatagagaaatatacttacttagaacttcccttcatcgagaaagagaacaagcgcaacaacttcatcaacttcttgcattgaaagaacaggaacacaggaaggaacttgaaacaagggagttttttactgatgctgacttccaggatgccttagctaaagaaatagccaaagaagagaaaaagcatgagcaaatgataaaagaataccaagagaaaattgacgtgttaagccagcagtatatggatttagaaaatgaattccgtattgctttaactgttgaagccagaagatttcaagatgttaaagatggttttgaaaatgttgcaactgagttagcaaagagcaaacatgctcttatttgggctcaacgaaaagaaaatgagtcttcctctttaattaaagatctgacctgtatggtaaaggaacaaaaaacaaaactggcagaagtttctaaattgaaacaagaaacagcagcaaatttacagaatcaaatcaacacccttgaaattttaattgaagatgacaagcagaagagtattcaaatagaacttctcaagcacgaaaaagtccagcttatttctgagctagcagccaaggaatcactaatatttggtttaaggacagaaagaaaagtatggggacatgagctggcacaacaaggatcttctctagcccaaaatcgtggaaaattggaggctcaaattgagagtttatctagagagaatgaatgtctgcgaaagacaaatgaaagtgatagtgatgcattaagaataaagtgcaaaatcatagacgaccaaactgaaactattagaaaattaaaagattgtttacaagaaaaagatgaacacatcaaaagattacaagaaaagatcacagaaatagaaaaatgcactcaagaacaacttgatgaaaaatcttcacaactggatgaggtacttgagaagttggaaaggcacaatgaaagaaaagaaaaactaaaacaacagttgaaaggaaaggaagtagaacttgaagaaatcagaaaagcttacagtacactgaatcggaagtggcatgataaaggagaacttctatgtcatcttgaaacacaagtaaaagaagtgaaagaaaaatttgaaaacaaggaaaagaaacttaaagcggaaagagacaaaagtattgaactacaaaagaatgcaatggaaaaacttcatagtatggatgatgcctttaaaagacaagttgatgcaattgttgaagctcatcaagctgaaatagcacagctggccaatgaaaagcagaagtgtattgattctgcaaatttaaaggtccatcaaattgaaaaagaaatgcgtgaacttttggaagaaacatgcaagaacaaaaaaacaatggaagcaaaaattaagcaacttgcttttgctttaaatgaaattcagcaagatatgtgatggttctgagaatgaatttaattgaaatagaccagcagacctattgtaaaaatgattaaatattgtaatagtagtaactgctatgactttgaaatgtctctttctatacatttcattatgaatatatttttaaagacttttgatcaagtatttattaattgtataggttttttataataaattgttgacaattttgtctattagaaaaaactatcataactagacttacaatatttttcttgtttctgtactatacattgtttggtaattacacatttgcctacaaatttgtgaatgaaaagattagtattttcaccatatgaggtaaaacattttaatcattgttatcttattgtgatgatgaagaactaattatatttgttatttaattgatgtagctcaattcttttaaagtacttatgtagccaaaaagcatttgaaatctgtatgataaaagatgtggcattcttaagaaagtatatgtagccatctccacatcactcattatgaccccttcttttataatgcttatatcttttcattaaagattacatttaaggtttta

SEQ ID NO: 228531 - DNA, 3099 bp, Artificial Sequence
  derived and/or modified sequence
atggaagcagcagccgcagtggtagcagcagaggccgaggtggaaaacgaggatggggactcaagctgcggtgatgtttgtttcatggataagggtttgcaaagcatcagcgagctgtcactggacagcactttgcatgccgtgaacctgcattgtaacaacatctcgaagatagaggccatcgaccatatatggaatctccaacacttagatttgagttctaatcagatctccagaattgaaggcctgaacaccctcacaaagctgtgtactttaaacctttcttgtaatctgattacaaaggtcgaaggcttagaggagctgatcaatctgacccgtctgaatgtttcttataaccacatagacgatctcagcgggctcatccccctgcatggaattaagcacaagctgcgatatatagacctgcactctaatcgtatagatagcatacaccacctgctgcagtgcatggtcgggcttcacttccttacaaatctgattctagagaaagatggagatgataatcccgtgtgcagactccctgggtatcgcgccgttattctgcagacgctgcctcagctccggattctcgactgcaagaatatcttcggggagcccgtgaatctcaccgagattaactcttcacagctgcaatgtcttgaaggtcttctggataatcttgtttcaagcgattccccactgaatatctccgaagatgagatcattgacagaatgcctgtgattacagcccctatagacgagctggtaccactcgagcagtttgccagcactccttctgacgccgtacttaccagcttcatgagcgtgtgccaaagtagcgaacccgagaagaataatcatgagaacgacctgcagaatgagatcaagctgcagaagctggatgatcagatcctgcaactgcttaatgagacatccaacagcatagataacgtattggagaaagacccccgtcctaagcgagatactgacatcacctcagagtctgactatgggaatcgcaaagaatgcaataggaaagtaccgcgccgctcaaaaatcccttacgacgcaaagacaatacaaactatcaagcatcacaacaaaaattacaattcatttgtcagctgcaaccggaaaatgaaacctccttatttgaaggagctgtatgtaagctcctcgctggcaaattgtcctatgttacaggaatccgagaagccaaagacggaaatcatcaaggtagaccagagtcactccgaagacaacacttaccagagtctggtagagcagctcgatcaggagagagagaagagatggagagccgagcaagccgagaacaaactgatggattatatcgatgagctgcacaagcatgccaacgaaaaggaggacatacattccctcgccctgctgactaccgataggctgaaggaaatcatttttagagagagaaatagtaaaggccagctggaggttatggtgcataaactccagaacgaaattaagaaactcactgtggagttgatgaaagccaaagaccagcaggaagaccatctcaagcatctgcggacactagagaagaccctggagaaaatggaaagacagaagcgccagcaacaggccgcacaaattaggttgatccaggaagtcgagctcaaagcctcggctgctgaccgcgagatctacctgctccgcactagccttcatcgagagagagagcaagcacaacagctgcaccaactgctagccctgaaggagcaggagcaccggaaagaattagaaacgcgagagttctttactgatgcagatttccaggacgccctggctaaagagatagccaaggaggaaaaaaagcacgaacagatgataaaggagtatcaggaaaaaattgacgtgctcagccaacagtacatggatctagaaaacgaattcaggatcgcactgactgtagaagcacgcagattccaggatgtgaaagacggattcgagaatgtggcgactgagctggctaaaagtaaacatgccctgatctgggcccagcggaaggagaacgaatcaagctctcttatcaaggatctcacctgcatggtcaaagagcagaagaccaagctcgccgaggtttccaaactgaagcaggagacagcagcgaacctccaaaatcagattaacactctggaaatactgattgaggacgataaacaaaaaagcattcagattgaactcctgaagcatgagaaagttcagttaatcagcgagcttgcagctaaagagtcccttatttttggcctcagaaccgaacgcaaagtctggggtcacgagctggcccaacagggatcctcactcgctcagaatcgggggaagttggaagcacagattgaaagccttagccgagagaatgagtgtctccgcaaaactaatgagagcgacagtgatgctttgaggattaagtgcaagattatcgacgatcagacagaaacgattagaaaactcaaggactgtctccaggagaaagatgaacatattaaacggctccaggaaaagatcaccgagatagagaaatgcacccaagagcagttggatgagaaatcttcccagttagacgaggtactggaaaaacttgaacggcacaacgagaggaaagaaaagctcaaacaacagctcaaaggaaaagaagtggagctagaggagatcaggaaggcttattcaacactcaatcgcaagtggcatgataagggagagctactatgccatctcgagacgcaggtgaaggaggtgaaagagaagtttgagaacaaggaaaagaaactgaaagctgagcgggataagtcaatcgagctgcagaaaaacgccatggagaagctacactctatggatgacgcttttaagcgacaggtggatgccattgtggaagcacatcaggccgaaatagctcagctggccaacgagaaacaaaagtgtatcgacagcgccaatctgaaagtgcatcagattgagaaggaaatgcgtgaacttttagaggaaacgtgcaagaacaagaaaactatggaggcaaagatcaagcaacttgcgttcgctctcaatgagattcagcaggatatgtag

SEQ ID NO: 228532 - DNA, 3039 bp, Artificial Sequence
  derived and/or modified sequence
atgttgctaaagtccatcttcattgtgtatatctttttttactcaatcagcgagctctcactggactctacacttcatgccgtcaacctgcattgtaacaacatcagcaaaatcgaggcgatcgaccacatctggaatctccagcacctagacctgagttccaaccaaatcagccggatcgagggactcaatacattgaccaagctttgcacccttaacctcagttgcaacctcatcactaaagtggaaggcctggaggagctcatcaatcttacgagactgaacgtgtcctacaaccacatcgacgacctatccggcctgatacctctccatggaatcaagcacaaacttcgctacattgacctccattctaatcgcatcgacagcatccaccacctactacaatgcatggtaggacttcattttctgaccaacctgatcctcgaaaaggacggggatgataaccctgtgtgtcgcctgccaggctatcgagccgtgattttacagactttgccgcagcttcgtattttagactgtaaaaacatctttggggagcccgtgaatcttacggagatcaactcctcccagctgcagtgtttagaggggctgcttgacaacttagtatcttctgattccccattaaatattagcgaagacgaaatcattgacaggatgccggtaatcacagctcctatcgatgagctcgttcctctggaacagttcgcttccactccatcagacgccgtgttaacgtcatttatgtccgtctgccagtccagcgaacctgagaagaacaaccatgaaaacgatctgcagaacgaaatcaaattgcagaaactcgatgaccagatcctgcagctcctgaacgagacatctaatagcatagataatgtactggagaaagaccccagacccaaacgagacacagatatcaccagtgaatctgattacggtaaccggaaggaatgcaatcgtaaggtgccacgccggtcaaaaattccttacgatgccaagaccatccagacaattaagcaccacaataagaactacaatagctttgtgagctgtaatcggaagatgaaacccccttatctgaaagagctgtatgtcagtagtagtttagcaaattgtcctatgttacaagaatctgaaaagcctaagaccgaaattattaaagtggaccagagccactccgaggacaatacctatcagtcgctcgtggaacagttggaccaagagagggaaaagagatggagggcagaacaggccgaaaataagctcatggactatatcgacgaattgcacaagcacgcgaatgaaaaagaagatatacatagcctcgccctgctgactaccgataggctcaaggagatcatctttagagagaggaacagtaaggggcagctggaggtcatggtccacaagctgcaaaatgaaattaaaaagctgacagtcgaactgatgaaagcgaaagaccagcaggaggatcacctgaagcacctgcgaacgctggagaagaccctggaaaaaatggaacgccaaaaacgacaacagcaagctgcacagattcgcctgatccaggaggtggagctgaaggcctcagctgcggaccgcgaaatctatctgcttaggacttcactgcaccgagagcgggaacaggcccagcagctccaccagctgctggctttaaaggagcaggagcaccgcaaggagctggaaacaagggaatttttcaccgatgctgacttccaggacgccctcgcgaaagagatcgcgaaggaagagaagaagcacgagcaaatgattaaggagtatcaggaaaagatagacgtgctctcgcagcagtacatggacctggagaacgagtttaggattgctctaaccgtggaggcccgacgcttccaagacgttaaggacggattcgaaaatgttgcaacggagctcgcgaagagcaagcacgctctaatctgggctcaaagaaaggaaaatgaatcatcatcgcttatcaaggatctgacatgtatggtgaaggaacaaaaaactaagctggcagaggtgtccaaattaaagcaagagactgctgctaatcttcaaaaccagattaacaccctggagatacttattgaagatgataaacaaaagtccattcagatcgaactgttgaagcatgagaaggtgcagctgatttccgaactcgccgccaaggagagcctgattttcgggctccgcaccgaacggaaggtttggggacacgaactcgcccagcagggatctagtctggcacagaaccggggaaagctcgaagcccagattgaatctcttagccgcgagaacgagtgcctgcggaaaacaaacgagagcgattctgacgcccttaggatcaagtgcaaaattatcgacgaccagacagagacaatcagaaaactaaaggattgtctccaggaaaaggacgagcacattaaaagactgcaagagaaaatcaccgagatcgagaaatgtacgcaggagcagctggatgagaagtcctcacagctcgatgaggtgctagagaaactcgagagacacaatgaaaggaaagagaagctaaagcaacagctgaaaggcaaagaggttgagctggaggagataaggaaggcatactcaaccctcaaccggaaatggcacgacaaaggtgaacttctttgtcacctcgagacgcaggtcaaggaggtcaaggagaagtttgagaacaaagaaaagaaattaaaggctgaacgcgacaagagcattgaattgcagaagaatgcgatggagaaactgcactccatggacgacgcctttaagcgccaggtggacgcaattgtggaggctcatcaagcagagatcgcgcaactggccaatgaaaaacaaaagtgtatagactctgcaaatctgaaagtgcaccaaatagagaaggagatgcgagagttgctagaggaaacgtgcaagaataaaaagaccatggaggcaaagatcaagcagctggctttcgccctgaacgaaatccagcaggatatgtag

SEQ ID NO: 228533 - DNA, 3099 bp, Artificial Sequence
  derived and/or modified sequence
atggaggccgctgctgctgtggtggccgctgaggccgaggtggagaatgaagatggagacagcagctgtggagatgtgtgcttcatggacaagggcctgcagagcatcagcgagctgagcctggacagcaccctgcatgctgtgaacctgcactgcaacaacatcagcaagattgaggccatcgaccacatctggaacctgcagcacctggacctgagcagcaaccagatcagccgcatcgagggcctgaacaccctgaccaagctgtgcaccctgaacctgagctgcaacctgatcaccaaggtggagggcctggaggagctgatcaacctgacccggctgaatgtgtcctacaaccacattgatgacctgagcggcctcatccccctgcacggcatcaagcacaagctgcgctacatcgacctgcacagcaacagaattgacagcatccaccacctgctgcagtgcatggtgggcctgcacttcctgaccaacctgatcctggagaaggatggagatgacaaccctgtgtgccgcctgcccggctacagagctgtgatcctgcagaccctgccccagctgcgcatcctggactgcaagaacatctttggagagcctgtgaacctgacagagatcaacagcagccagctgcagtgcctggagggcctgctggacaacctggtgtccagtgacagccccctgaacatcagtgaagatgagatcatcgacaggatgcctgtgatcacagcccccattgatgagctggtgcccctggagcagtttgccagcacccccagtgatgctgtgctgaccagcttcatgtctgtgtgccagagcagcgagcctgagaagaacaaccatgaaaatgacctgcagaatgagatcaagctgcagaagctggatgaccagatcctgcagctgctgaatgagaccagcaacagcattgacaacgtgctggagaaggacccccggcccaagagggacacagacatcaccagcgagagtgactatggcaacaggaaggagtgcaacaggaaggtgcccaggaggagcaagatcccctatgatgccaagaccatccagaccatcaagcaccacaacaagaactacaacagctttgtgtcctgcaacaggaagatgaagccaccctacctgaaggagctgtatgtgagcagcagcctggccaactgccccatgctgcaggagagcgagaagcccaagacagagatcatcaaggtggaccagagccacagcgaggacaacacctaccagagcctggtggagcagctggaccaggagcgggagaagcgctggagggctgagcaggccgagaacaagctgatggactacattgatgagctgcacaagcacgccaatgagaaggaggacatccacagcctggccctgctgaccacagaccggctgaaggagatcatcttccgggagaggaacagcaagggccagctggaggtgatggtgcacaagctgcagaatgagatcaagaagctgactgtggagctgatgaaggccaaggaccagcaggaggaccacctgaagcacctgcggaccctggagaagaccctggagaagatggagcggcagaagaggcagcagcaggccgcccagatccgcctcatccaggaggtggagctgaaggccagcgctgctgaccgggagatctacctgctgcggaccagcctgcaccgggagcgggagcaggcccagcagctgcaccagctgctggccctgaaggagcaggagcacaggaaggagctggagacccgggagttcttcacagatgctgacttccaggatgccctggccaaggagatcgccaaggaggagaagaagcatgagcagatgatcaaggagtaccaggagaagattgatgtgctgagccagcagtacatggacctggagaatgagttcagaattgccctgactgtggaggcccggcgcttccaggatgtgaaggatggctttgaaaatgtggccacagagctggccaagagcaagcacgccctgatctgggcccagaggaaagaaaatgaaagcagcagcctcatcaaggacctgacctgcatggtgaaggagcagaagaccaagctggccgaggtgtccaagctgaagcaggagacagctgccaacctgcagaaccagatcaacaccctggagatcctgattgaagatgacaagcagaagagcatccagatcgagctgctgaagcatgagaaggtgcagctgatcagcgagctggccgccaaggagagcctcatcttcggcctgaggacagagaggaaggtgtggggccacgagctggcccagcagggcagcagcctggcccagaacagaggcaagctggaggcccagatcgagagcctgagcagagaaaatgaatgtctgaggaagaccaatgaaagtgacagtgatgccctgcgcatcaagtgcaagatcattgatgaccagacagagaccatcaggaagctgaaggactgcctgcaggagaaggatgagcacatcaagaggctgcaggagaagatcacagaaattgagaagtgcacccaggagcagctggatgagaagagcagccagctggatgaggtgctggagaagctggagcggcacaatgaaaggaaggagaagctgaagcagcagctgaagggcaaggaggtggagctggaggagatcaggaaggcctacagcaccctgaacaggaagtggcatgacaagggggagctgctgtgccacctggagacccaggtgaaggaggtgaaggagaagtttgagaacaaggagaagaagctgaaggccgagcgggacaagagcattgagctgcagaagaatgccatggagaagctgcacagcatggatgatgccttcaagaggcaggtggatgccatcgtggaggcccaccaggccgagatcgcccagctggccaatgagaagcagaagtgcatcgacagcgccaacctgaaggtgcaccagatcgagaaggagatgagggagctgctggaggagacctgcaagaacaagaagaccatggaggccaagatcaagcagctggcctttgccctgaatgagatccagcaggacatgtag

SEQ ID NO: 228534 - DNA, 3039 bp, Artificial Sequence
  derived and/or modified sequence
atgctgctgaagagcatcttcatcgtgtacatcttcttctacagcatcagcgagctgagcctggacagcaccctgcatgctgtgaacctgcactgcaacaacatcagcaagattgaggccatcgaccacatctggaacctgcagcacctggacctgagcagcaaccagatcagccgcatcgagggcctgaacaccctgaccaagctgtgcaccctgaacctgagctgcaacctgatcaccaaggtggagggcctggaggagctgatcaacctgacccggctgaatgtgtcctacaaccacattgatgacctgagcggcctcatccccctgcacggcatcaagcacaagctgcgctacatcgacctgcacagcaacagaattgacagcatccaccacctgctgcagtgcatggtgggcctgcacttcctgaccaacctgatcctggagaaggatggagatgacaaccctgtgtgccgcctgcccggctacagagctgtgatcctgcagaccctgccccagctgcgcatcctggactgcaagaacatctttggagagcctgtgaacctgacagagatcaacagcagccagctgcagtgcctggagggcctgctggacaacctggtgtccagtgacagccccctgaacatcagtgaagatgagatcatcgacaggatgcctgtgatcacagcccccattgatgagctggtgcccctggagcagtttgccagcacccccagtgatgctgtgctgaccagcttcatgtctgtgtgccagagcagcgagcctgagaagaacaaccatgaaaatgacctgcagaatgagatcaagctgcagaagctggatgaccagatcctgcagctgctgaatgagaccagcaacagcattgacaacgtgctggagaaggacccccggcccaagagggacacagacatcaccagcgagagtgactatggcaacaggaaggagtgcaacaggaaggtgcccaggaggagcaagatcccctatgatgccaagaccatccagaccatcaagcaccacaacaagaactacaacagctttgtgtcctgcaacaggaagatgaagccaccctacctgaaggagctgtatgtgagcagcagcctggccaactgccccatgctgcaggagagcgagaagcccaagacagagatcatcaaggtggaccagagccacagcgaggacaacacctaccagagcctggtggagcagctggaccaggagcgggagaagcgctggagggctgagcaggccgagaacaagctgatggactacattgatgagctgcacaagcacgccaatgagaaggaggacatccacagcctggccctgctgaccacagaccggctgaaggagatcatcttccgggagaggaacagcaagggccagctggaggtgatggtgcacaagctgcagaatgagatcaagaagctgactgtggagctgatgaaggccaaggaccagcaggaggaccacctgaagcacctgcggaccctggagaagaccctggagaagatggagcggcagaagaggcagcagcaggccgcccagatccgcctcatccaggaggtggagctgaaggccagcgctgctgaccgggagatctacctgctgcggaccagcctgcaccgggagcgggagcaggcccagcagctgcaccagctgctggccctgaaggagcaggagcacaggaaggagctggagacccgggagttcttcacagatgctgacttccaggatgccctggccaaggagatcgccaaggaggagaagaagcatgagcagatgatcaaggagtaccaggagaagattgatgtgctgagccagcagtacatggacctggagaatgagttcagaattgccctgactgtggaggcccggcgcttccaggatgtgaaggatggctttgaaaatgtggccacagagctggccaagagcaagcacgccctgatctgggcccagaggaaagaaaatgaaagcagcagcctcatcaaggacctgacctgcatggtgaaggagcagaagaccaagctggccgaggtgtccaagctgaagcaggagacagctgccaacctgcagaaccagatcaacaccctggagatcctgattgaagatgacaagcagaagagcatccagatcgagctgctgaagcatgagaaggtgcagctgatcagcgagctggccgccaaggagagcctcatcttcggcctgaggacagagaggaaggtgtggggccacgagctggcccagcagggcagcagcctggcccagaacagaggcaagctggaggcccagatcgagagcctgagcagagaaaatgaatgtctgaggaagaccaatgaaagtgacagtgatgccctgcgcatcaagtgcaagatcattgatgaccagacagagaccatcaggaagctgaaggactgcctgcaggagaaggatgagcacatcaagaggctgcaggagaagatcacagaaattgagaagtgcacccaggagcagctggatgagaagagcagccagctggatgaggtgctggagaagctggagcggcacaatgaaaggaaggagaagctgaagcagcagctgaagggcaaggaggtggagctggaggagatcaggaaggcctacagcaccctgaacaggaagtggcatgacaagggggagctgctgtgccacctggagacccaggtgaaggaggtgaaggagaagtttgagaacaaggagaagaagctgaaggccgagcgggacaagagcattgagctgcagaagaatgccatggagaagctgcacagcatggatgatgccttcaagaggcaggtggatgccatcgtggaggcccaccaggccgagatcgcccagctggccaatgagaagcagaagtgcatcgacagcgccaacctgaaggtgcaccagatcgagaaggagatgagggagctgctggaggagacctgcaagaacaagaagaccatggaggccaagatcaagcagctggcctttgccctgaatgagatccagcaggacatgtag

SEQ ID NO: 228535 - DNA, 3099 bp, Artificial Sequence
  derived and/or modified sequence
atggaggccgccgccgccgtggtggccgccgaggccgaggtggagaacgaggacggtgactcctcatgcggggacgtttgcttcatggataaaggcctgcagtctatctccgagctgtccctggattccactttacatgctgttaacctgcattgtaacaatatttcaaaaatcgaggcgattgaccatatttggaacctgcagcacctggatctctcttctaaccagatttcccgtattgaaggactaaataccttgactaagctgtgcacactgaacctgtcgtgtaatttaataaccaaggttgaaggcctggaagagctcatcaatctaacccgcctaaacgtctcttataatcacatagatgacctgagcggccttatcccactacacggcatcaaacataagctgagatatattgacctacattcaaaccgcatagactcaattcatcacttgctgcagtgtatggtcggacttcatttcttgactaacttaatcctggagaaggacggtgatgataaccctgtttgtagacttcccggctatcgcgccgttatacttcagacactccctcagttgcgcatcctggactgcaagaatatttttggcgaaccagtgaatttgacggaaatcaattcttctcagctccagtgtttagaagggttgctggataaccttgtgagttctgacagcccactgaatattagtgaggatgaaattattgatcgcatgcccgtgatcacagcgcccatagatgagctggttcctttggaacaatttgcctcgacccctagcgacgcagtactgacaagctttatgtctgtctgtcagtctagcgaacccgagaaaaataatcatgaaaacgacttgcagaatgagataaaactgcagaaattagacgaccagatacttcaactgttaaacgaaacaagcaactccattgacaacgtgctggagaaggacccacgtcccaaacgggatacagatatcacaagcgagagtgattacggcaaccgcaaagagtgcaaccgtaaggtgccccgcagaagtaaaataccgtatgatgcaaaaacaattcaaaccattaagcatcacaacaaaaactacaatagttttgtgtcatgtaacaggaaaatgaagcctccttacctgaaggaactctacgtgtcatcttccttggctaattgcccgatgctccaggaatcagaaaagccaaaaaccgaaatcataaaagtggaccagtctcactcagaagacaacacataccagtccctggtcgagcaactggatcaggaacgagagaagcgatggcgtgctgaacaggctgaaaataaactcatggattatatcgatgagctgcataaacatgctaacgagaaagaagatattcacagtctggctctgctgaccacagaccgtcttaaagagattatcttcagagagagaaatagcaaaggacaacttgaagttatggttcacaaattgcaaaatgaaattaagaaactcaccgttgagcttatgaaggccaaggaccagcaggaagatcaccttaagcacctacgaacgctagaaaagacacttgaaaaaatggaacggcagaaacggcagcagcaggcagcccagatcaggctcatccaggaggtcgagctgaaagcgtccgccgccgatcgggaaatctacctacttagaacctccctccaccgcgaaagagaacaggcacagcagctccatcaattactcgccttgaaagagcaggagcataggaaggagttggaaacccgcgaattctttacggacgctgactttcaggatgccctcgccaaagagatcgcgaaagaggaaaagaaacatgagcagatgatcaaagagtatcaagagaagatcgacgttctgtcacagcagtatatggacctcgaaaatgaatttagaatagctctgacagtcgaggcccggagattccaggacgtcaaagatggattcgagaatgtggctacagagctggccaaaagcaagcatgccctgatttgggcacaaaggaaggaaaacgaatcctctagcctcatcaaagatctgacttgcatggtaaaggagcagaaaacgaagcttgccgaggtgagtaaacttaaacaggagacagctgccaatctgcagaaccagataaatacactggaaatcctgatagaagatgataagcagaaatccatccagattgaacttttaaagcacgagaaggtgcagttaatatccgagctggcagctaaagaatccttaatttttggcttgcgcactgaacgcaaggtgtggggtcatgagcttgctcagcaggggtcttccctggctcaaaaccgagggaaactggaggcccaaatagaaagcttgagtcgagagaatgagtgcctgcggaagacgaatgaaagcgactctgacgcattgcggatcaaatgtaagattatcgacgatcagactgagaccatcagaaaattgaaggattgtcttcaggagaaggacgagcatatcaagcgtctccaggaaaagattactgaaattgagaagtgcacacaggagcagctggacgagaaatcttcccagctcgatgaggtgctagagaagctcgaacggcataacgagcggaaagaaaagctgaagcagcaactgaaggggaaggaagttgaactggaggaaattagaaaagcctactccactctgaacaggaaatggcacgataagggagaattactgtgccatctagaaacacaggtcaaagaggtgaaagaaaaattcgaaaacaaggagaagaaactgaaagccgagcgcgataagtccatagagcttcaaaaaaatgctatggaaaaactccactccatggacgatgcattcaaacggcaggtggacgcgatcgttgaggcccatcaggccgaaatcgcccagcttgctaatgaaaagcagaagtgtattgactcagccaacttgaaagtacaccagatagaaaaagagatgcgagagctcttagaggagacatgcaaaaacaagaaaacaatggaggcaaagatcaagcagctggcattcgctctgaatgagattcagcaggacatgtag

SEQ ID NO: 228536 - DNA, 3039 bp, Artificial Sequence
  derived and/or modified sequence
atgctgctgaagagcatcttcatcgtgtacatcttcttctacagcatttccgaattgtccctggatagcaccctgcatgcggtgaatctgcattgtaacaatatctccaagattgaggccattgaccacatctggaatctccaacacctggatcttagtagcaatcaaatttcacgcatagaagggcttaataccctgaccaagctttgcactctgaatctgagctgtaacctgattactaaggtggaagggctcgaagagctgataaatctgactcggctcaatgtgtcttacaatcacatcgatgacctgagcggccttattcccctgcatggtatcaagcataaacttcgctatattgacctgcattccaataggatagattcgatccaccatctgttgcaatgcatggttggccttcactttttgacaaacctgattctggaaaaggatggcgacgataaccccgtttgtagactacctggataccgagctgtgatcctgcaaaccctgccccaacttcgcatactggactgtaaaaacatctttggtgaaccggttaatttgaccgaaatcaactctagccagttgcagtgccttgaggggctcctggacaatctggttagcagcgactctccgcttaacatctctgaggacgagatcatagatcgcatgcccgtaatcactgcccccatcgacgagctcgtgccactcgaacagtttgcctccactcccagtgatgccgtcctgacgtcattcatgtctgtgtgccagtcatctgaaccagaaaagaacaaccatgaaaacgatctgcagaatgaaataaagctgcaaaagctcgacgaccagatcctgcagttgctgaacgagaccagcaatagcattgacaatgtgttggagaaggatcctagacctaaaagggatactgacattactagtgaatccgactatggcaatcggaaagaatgcaatcgaaaggtgcctcgtagatctaaaatcccttatgatgccaagactatccaaactatcaagcatcataataagaactacaatagttttgtttcttgtaaccgcaagatgaaaccaccttatttgaaggagctgtacgtgtcaagctctctcgctaactgccctatgctgcaggagagtgagaagccgaaaactgaaatcattaaagtcgaccaaagtcattctgaagataatacttatcagtccctggtcgaacagcttgaccaggagcgcgaaaagcgatggcgggcagaacaggctgagaacaagttgatggattacattgacgagctccataaacacgccaacgagaaggaggacattcacagcctggccttgctgactaccgatagacttaaagagatcatctttcgggaaagaaatagcaaaggacagctagaggtgatggttcataagttacagaatgaaattaagaaacttaccgtagagctcatgaaagccaaggaccagcaagaggatcacttaaaacacctgcggaccctagaaaagacgctagagaaaatggagcgtcagaagaggcagcaacaggccgcgcaaatccggctgatacaggaggtggagctgaaagcctcggccgccgatagggaaatttatctgctgaggaccagtctccacagggagcgtgaacaggcgcagcaactgcatcagttgctggccctgaaagagcaggagcacaggaaggaattagagacccgagagtttttcaccgacgctgatttccaggacgctctcgcaaaggaaatcgctaaggaagagaagaagcatgagcaaatgattaaagagtatcaggaaaaaatcgacgtgctgtctcagcaatatatggacctcgagaatgagtttaggatcgcccttactgtggaggctagacgattccaggatgtgaaggatggcttcgagaatgtggctacagaactggccaagagtaaacacgccctcatctgggctcagcggaaagaaaatgagtcttcttctttgatcaaagatttgacctgcatggttaaagagcagaagacgaagctggcagaggtcagtaagctgaaacaggagactgccgcgaacctacaaaaccagatcaacaccctagaaatacttattgaggatgacaaacagaagagtattcagatcgaactgctcaaacacgagaaggtgcagctcatttccgaactggctgcaaaagaaagtctgatcttcggcctgcggactgagaggaaggtctggggtcacgagctcgcccagcagggctcatccctggcacagaatcgggggaagctagaggcacagatagagtccctgtctagagaaaatgaatgtctgagaaagaccaacgagtctgacagtgatgctctgcggatcaaatgtaagatcatcgatgatcagactgagacgatcaggaagctcaaggactgtctccaggaaaaagatgagcacataaagagactgcaagaaaagatcacggaaattgaaaaatgtactcaggagcagctcgacgagaagtcctctcagctcgacgaggtgttggagaaactcgagcgccataacgaaagaaaagaaaaattaaaacagcagttgaagggaaaagaggttgagctcgaagagatccggaaggcgtattctaccttaaacaggaaatggcacgacaagggggaattgctgtgccacctggaaacgcaggtaaaggaggtgaaggaaaaatttgaaaacaaggagaaaaagctaaaagctgaacgcgataagtccattgaacttcagaaaaacgccatggaaaagctgcacagcatggacgatgcttttaaacgacaggtagatgctatcgtcgaggctcaccaggcagaaatagcccaactagcaaatgagaaacagaagtgcattgacagcgcaaacctgaaagtgcaccagatcgaaaaggagatgcgcgaacttctcgaggagacgtgcaagaacaagaagactatggaggccaaaattaaacagctggcattcgcgttgaatgaaatacaacaggatatgtag

SEQ ID NO: 228537 - DNA, 4493 bp, Artificial Sequence
  derived and/or modified sequence
cccagatagtcacatttaaaggttgctagtttgaaatttgcaaatgcttccctgctgtcagagttaggtttcctacagctgtaagatagctgctactcaacctacagcagatgcccgtgacattgtgtgttcctgggtgtatctcccatctagcaactccaaactgtgtatgctgtagtttgtgttcctggaactactatcttcaggagaagcttcagttataaatagtaattggagtgaagagatgagttctgtttaggggagatccattaactttcaacaagggaggacagggactttttcaataggaattgcaataacatggtttgtttttgaaaatgcaatagactgtggattaaatagctattgcacacaaagaagaaaataaagttataatctccagcatgagatctggatttacatatgctctgttagctgcaagaatttgggcaagctatttaatttccataaatttaggtatccttaagatacccactgcttagagttattgtgagaattaattgaggtaagaaaactgaggctcaggttgtcatttgctcaaatcacacagcaaaaccgtgatagaatgcagattcaaactgggatattaacattccaaagcctttacagttattgactactattcagcactgccttcaatatatgctgatgactgcacacaggagttagaaatgcccactgtcacttgcctgccttgagcggtttcttgtttgtataaataatccaaaatacttggttgtgttgtaagaagcaccgtgttttgtgagacatttcaaaggtaccacaaataggaaagatttcattctagaatgaatagagcacatatttagtatctacgtgctgtttggttaattttagttatttggtcatgcttttaaaatctatttttatagtatatattttcttttatagcatatcagaattatctttagattcaactcttcatgccgtcaatcttcattgcaataacatctccaagatcgaagccattgatcatatttggaatttacaacatctagatctgtcatctaatcaaataagtagaattgaaggactaaacacactgacaaaactgtgcacattaaatttgtcctgcaatttgattacaaaagtagaaggacttgaagaactaattaatctgactagactaaatgtatcttataaccacatagatgatcttagtggattgattccccttcatggaattaagcataaacttagatatattgatctacatagtaatcgtatagatagtatccatcacttacttcagtgtatggtaggattgcacttcctgaccaatcttattttggagaaagatggagacgataatcctgtctgtcgactgccagggtacagagcagttattctccagactttgccacagcttagaatcctagattgcaagaacatatttggtgaaccagtaaatttgacagaaataaattcatcacagctgcagtgcctagaaggtcttttggataatttagtttcttctgattctcccctaaatataagtgaagatgagatcattgatagaatgccagtgataacagcacctatcgatgagttagttcccttggaacagtttgcaagtacaccaagtgatgctgtgttgacgtcttttatgtctgtgtgtcaatcttctgagccagagaaaaataatcatgaaaacgatttgcagaatgagataaaacttcagaaattagatgaccaaattctacaacttctaaatgaaacttctaattcaatagataacgttcttgagaaagaccccagaccaaaaagagacacagatataacttctgaaagtgactatggaaacagaaaagaatgcaatagaaaagttcctcgaagatcaaaaatcccttatgatgccaaaaccattcaaactattaagcaccacaataaaaactacaactcttttgtaagttgtaatcgtaaaatgaaaccaccttaccttaaagaattatatgtaagctcatctttagcaaactgtcctatgttacaagaatcagaaaagccaaagactgaaataattaaagtagaccaaagtcactcagaagacaacacttaccagtcccttgttgaacagctagaccaagagagagagaagagatggagagctgagcaagccgaaaataaactcatggattatattgatgagctgcataaacatgcaaatgaaaaagaggatattcatagtctggctctacttaccacagataggctaaaggaaattatttttagagagagaaattccaaaggacaactcgaagttatggttcacaaacttcaaaatgaaattaaaaaactgactgttgaactaatgaaagcaaaagatcaacaagaggatcaccttaaacacttaagaaccctcgaaaaaacattagaaaaaatggagagacaaaaaaggcagcagcaggcagcacagataagactgatccaagaggtggaactcaaagcttcagctgccgatagagaaatatacttacttagaacttcccttcatcgagaaagagaacaagcgcaacaacttcatcaacttcttgcattgaaagaacaggaacacaggaaggaacttgaaacaagggagttttttactgatgctgacttccaggatgccttagctaaagaaatagccaaagaagagaaaaagcatgagcaaatgataaaagaataccaagagaaaattgacgtgttaagccagcagtatatggatttagaaaatgaattccgtattgctttaactgttgaagccagaagatttcaagatgttaaagatggttttgaaaatgttgcaactgagttagcaaagagcaaacatgctcttatttgggctcaacgaaaagaaaatgagtcttcctctttaattaaagatctgacctgtatggtaaaggaacaaaaaacaaaactggcagaagtttctaaattgaaacaagaaacagcagcaaatttacagaatcaaatcaacacccttgaaattttaattgaagatgacaagcagaagagtattcaaatagaacttctcaagcacgaaaaagtccagcttatttctgagctagcagccaaggaatcactaatatttggtttaaggacagaaagaaaagtatggggacatgagctggcacaacaaggatcttctctagcccaaaatcgtggaaaattggaggctcaaattgagagtttatctagagagaatgaatgtctgcgaaagacaaatgaaagtgatagtgatgcattaagaataaagtgcaaaatcatagacgaccaaactgaaactattagaaaattaaaagattgtttacaagaaaaagatgaacacatcaaaagattacaagaaaagatcacagaaatagaaaaatgcactcaagaacaacttgatgaaaaatcttcacaactggatgaggtacttgagaagttggaaaggcacaatgaaagaaaagaaaaactaaaacaacagttgaaaggaaaggaagtagaacttgaagaaatcagaaaagcttacagtacactgaatcggaagtggcatgataaaggagaacttctatgtcatcttgaaacacaagtaaaagaagtgaaagaaaaatttgaaaacaaggaaaagaaacttaaagcggaaagagacaaaagtattgaactacaaaagaatgcaatggaaaaacttcatagtatggatgatgcctttaaaagacaagttgatgcaattgttgaagctcatcaagctgaaatagcacagctggccaatgaaaagcagaagtgtattgattctgcaaatttaaaggtccatcaaattgaaaaagaaatgcgtgaacttttggaagaaacatgcaagaacaaaaaaacaatggaagcaaaaattaagcaacttgcttttgctttaaatgaaattcagcaagatatgtgatggttctgagaatgaatttaattgaaatagaccagcagacctattgtaaaaatgattaaatattgtaatagtagtaactgctatgactttgaaatgtctctttctatacatttcattatgaatatatttttaaagacttttgatcaagtatttattaattgtataggttttttataataaattgttgacaattttgtctattagaaaaaactatcataactagacttacaatatttttcttgtttctgtactatacattgtttggtaattacacatttgcctacaaatttgtgaatgaaaagattagtattttcaccatatgaggtaaaacattttaatcattgttatcttattgtgatgatgaagaactaattatatttgttatttaattgatgtagctcaattcttttaaagtacttatgtagccaaaaagcatttgaaatctgtatgataaaagatgtggcattcttaagaaagtatatgtagccatctccacatcactcattatgaccccttcttttataatgcttatatcttttcattaaagattacatttaaggtttta

SEQ ID NO: 228538 - DNA, 3099 bp, Artificial Sequence
  derived and/or modified sequence
atggaagccgctgcagcagtggtcgccgcagaagcagaggttgaaaacgaagacggagattcctcctgcggcgatgtctgctttatggacaaggggcttcaatctatcagcgagctcagcctggactcaactctccacgcagttaacctgcattgcaacaacattagcaagattgaagcgatcgaccatatctggaatttgcagcacctcgatttgtcaagcaaccagatcagtcggatagaggggctcaatacactaaccaagctgtgtacactcaatttatcctgcaacctgataacaaaggtagagggcctggaggagctaattaacctgactcggctgaacgtatcatacaaccacattgatgatctcagcggcttaatccctctgcacggtataaaacacaaactaagatacatagacttgcactctaaccggatcgattctatccatcacctacttcagtgcatggtagggctgcattttttgactaatctgatcctagagaaagacggagacgataatccggtctgtcgcctgcccggttacagggccgtgatcctgcagactctcccacagctgagaatacttgattgcaagaatatctttggggaaccagttaacttaaccgagataaactcatcacagttgcagtgtctggagggcctgctggacaatctcgtgagttctgacagtccgctgaacatttccgaagatgaaattatcgacaggatgccggtcatcactgctcctattgatgagttagtgccactggaacagtttgcttctaccccctccgatgccgttctgacaagttttatgtccgtgtgccagagctccgagccagagaaaaacaaccacgaaaacgatttgcaaaacgagataaagctgcagaaactcgacgatcagatcctccagctactgaatgagacttccaattctattgacaatgtgcttgagaaggaccctaggccaaaaagagacacggacatcactagtgaatcggactatggcaaccggaaggagtgtaatagaaaggttccccgaagaagcaagattccatacgatgccaagaccattcaaacaatcaagcatcataacaaaaattacaacagctttgtgtcttgcaaccgtaagatgaaaccaccctacctcaaggagctgtacgtctcatcgtctctggccaactgtcccatgctgcaggagagtgaaaagcccaagactgagatcattaaagtggaccaatcccactctgaagacaacacctatcagtctctcgtcgaacagctcgatcaggagcgcgaaaagagatggcgcgcagaacaggccgaaaataaactcatggactacattgacgagttgcataaacacgcgaatgaaaaagaggacattcacagcctggcactgctcacaaccgaccgcctgaaggaaattattttccgggagcgtaacagcaaagggcagctggaggtgatggtccataagctccagaacgaaatcaaaaagctgacggttgaactaatgaaggcaaaggaccagcaggaggatcacctgaagcacctgcgaactctcgaaaaaactctggagaagatggagcggcaaaagcgtcagcaacaggctgcccaaatcagattaatccaagaagtagagcttaaggcctctgcggctgatcgtgagatctacttgcttcggacctccctgcaccgtgagcgagaacaagctcagcaactccatcaactcctcgcgctgaaggagcaagagcacagaaaggaactggaaacgcgggaattcttcaccgatgcggacttccaggatgccctggcaaaggaaatagccaaagaagaaaagaagcacgagcagatgatcaaggagtaccaagagaagattgacgtactgtctcaacagtacatggatttggagaacgagttcaggattgcactgaccgttgaagcgcgtagatttcaggatgtgaaagacggatttgagaacgtggctacagaactggccaaatctaaacatgcactgatctgggcccaaagaaaagagaatgaatcctccagtctgattaaggacctcacttgcatggttaaggaacaaaagacgaaactagctgaagtcagcaagcttaaacaggaaactgctgcaaacctgcaaaatcagatcaatactctggaaatactgattgaagacgacaaacagaagagcattcaaatcgagctcctcaaacacgagaaagtccagcttatctccgagctggcagcaaaggagagtctgatttttgggctgaggacggaaagaaaagtctgggggcatgaactcgcccaacaaggctcctctctggcccagaatcggggaaaactggaggctcagattgagagccttagccgggagaatgagtgtttacggaaaacgaacgaaagcgactccgatgccctcagaatcaaatgtaaaattattgatgaccaaacagagactattagaaagctcaaggactgcctgcaagaaaaggacgagcacattaagcggttgcaagaaaagataacggaaattgagaagtgtacacaggagcaactggatgagaagtcttcccagctggatgaggtcttggaaaaattggaacgacacaatgaaaggaaggagaagcttaagcaacaacttaagggtaaagaagtagaactagaagagataaggaaagcctattcaacactcaaccgaaaatggcatgataagggtgagctcctctgtcacttagagactcaggttaaagaggtgaaggagaagtttgaaaacaaggagaaaaaattgaaagcggaacgtgacaagagtatagagcttcagaagaacgctatggagaagttgcacagcatggacgatgctttcaagaggcaagtggacgccatcgttgaagctcaccaggccgaaatagcccagcttgccaatgagaagcaaaaatgcatcgacagcgcgaacctgaaggtgcatcagattgaaaaagagatgcgagagctcctggaagagacctgcaagaataagaagacgatggaagccaaaatcaaacagctcgcatttgcattaaacgagatccagcaggatatgtag

SEQ ID NO: 228539 - DNA, 3039 bp, Artificial Sequence
  derived and/or modified sequence
atgcttctaaaaagtatcttcatagtttatattttcttctactccatcagcgaactctcacttgacagtacactgcacgccgtcaatctgcactgcaataacatatcaaaaatcgaagctatcgatcacatttggaatctgcagcatctggatctaagctccaaccagataagtagaatcgaaggtctgaatacgctaaccaaactctgtactctaaatttgtcctgcaacctgattactaaagtggagggtctggaggagctcattaacctcacacggctgaacgtgtcttataatcacatcgacgacctgtccggcttgatccctttgcatggcattaagcacaaactccgatacatcgatctgcacagcaaccgcatcgacagcatccatcacctattgcagtgcatggtcggattgcattttctgaccaatttgatcctagaaaaagatggggacgacaatccggtttgccgcctccccggatatcgcgctgtaatcctacagaccctaccacagcttcgcattctggactgtaaaaatatttttggcgagccagttaatctgactgaaatcaactcaagccagttgcagtgcctcgagggcctcctggacaacctcgtgtccagtgattcgcctctgaacatcagtgaggacgaaatcattgaccgcatgcccgtgatcacagcacccattgacgaactggtgcccttagaacaatttgcctctacccccagtgatgccgttctgaccagctttatgtctgtgtgtcaaagctccgagccagaaaagaataaccatgagaatgatctgcaaaatgaaatcaaactgcaaaaactggacgatcagattctgcagctgttaaatgagacctcgaattctatcgacaacgttctcgagaaggatccgcgacccaaaagagacacagacatcacctccgaatccgactatggaaatagaaaggagtgcaatcgaaaagtgccccgtaggtcaaaaattccttacgatgctaaaacaattcagaccataaagcaccacaacaagaactacaactcctttgtctcttgcaaccgaaagatgaagccaccttatcttaaagagttgtatgtcagctcaagcttagccaattgtcctatgttacaggaatctgagaagcccaagactgagattattaaggtagaccagtcacactctgaggacaacacctaccagagcctggtagaacagctggaccaggagcgggagaagcgttggagggccgaacaggccgaaaacaaactcatggactatatcgacgagctgcataaacacgccaacgagaaggaagacattcactctctggcattattgacaaccgataggctgaaggaaatcatctttcgagagagaaattcgaaagggcagttggaggtgatggttcacaaactgcaaaatgaaatcaaaaaactaactgtcgagctgatgaaagctaaagatcagcaggaagatcacctgaaacacctccggaccctggaaaagactctcgagaagatggagcgccagaagcgccaacagcaggccgctcaaattcggctcattcaggaagtcgagttaaaagcctctgccgcagaccgggaaatatatctcctcagaacctctctccatagagaacgggaacaggcgcaacagcttcaccagctgctggcccttaaagaacaagaacataggaaggaactggagacacgggaatttttcaccgacgccgacttccaggacgcgctagctaaagagattgcaaaggaagagaagaaacacgaacagatgatcaaagagtatcaagagaagatcgatgtgctgagccaacaatatatggatcttgaaaacgagtttaggattgctttgacagtcgaggcccgaagattccaggatgtgaaagatggcttcgagaatgtggccaccgaactggcaaagtcaaagcacgctctgatctgggcccagcgcaaggagaatgaatcttcctctttgatcaaggatctgacctgtatggtgaaggagcaaaaaacaaagctcgctgaagtgagtaagttaaaacaggagacagcagcaaacctccagaatcaaattaataccctggagattctgatcgaggacgacaagcagaaaagcattcagatagagctgttaaagcacgagaaagtgcagcttataagcgaactcgcagcgaaggagagcttaatatttggcctgcgcactgaaagaaaagtgtggggccacgagttggcgcagcagggatcttccctcgcccagaatcggggtaagctggaggcccagattgagtctttaagcagagaaaatgagtgcctccgcaaaactaacgaaagtgattccgatgccttgaggatcaaatgtaaaataattgacgaccagaccgagactattcgtaagttgaaagattgtctgcaagagaaggatgaacatatcaagcggctgcaggagaagatcacagaaatcgaaaaatgcacacaggaacagctggacgagaaatcttctcaactggatgaagtgttggagaagctcgaaaggcacaacgaacggaaggagaagctcaagcagcagctgaagggcaaagaagtcgaactcgaagagatccggaaagcatacagcacactgaataggaagtggcatgacaagggcgaactgttatgtcatctcgagacacaggtcaaggaggtgaaggagaaatttgagaataaggagaagaagctgaaggccgagagagataaaagtattgaattgcagaagaatgccatggaaaaactgcactccatggacgatgcttttaaacggcaagtcgatgcaatagtggaagctcatcaggctgaaattgctcaactggccaatgaaaagcagaagtgcattgattcggccaacctcaaggtgcaccagatcgagaaggagatgcgcgagcttcttgaggagacttgcaagaacaaaaagaccatggaagctaaaatcaaacagcttgcgttcgcattgaacgaaatccaacaggacatgtag

SEQ ID NO: 228540 - protein, 648 aa, Artificial Sequence
  derived and/or modified sequence
MGKEPLTLKSIQVAVEELYPNKARALTLAQHSRAPSPRLRSRLFSKALKGDHRCGETETPKSCSEVAGCKAAMRHQGKIPEELSLDDRARTQKKWGRGKWEPEPSSKPPREATLEERHARGEKHLGVEIEKTSGEIIRCEKCKRERELQQSLERERLSLGTSELDMGKGPMYDVEKLVRTRSCRRSPEANPASGEEGWKGDSHRSSPRNPTQELRRPSKSMDKKEDRGPEDQESHAQGAAKAKKDLVEVLPVTEEGLREVKKDTRPMSRSKHGGWLLREHQAGFEKLRRTRGEEKEAEKEKKPCMSGGRRMTLRDDQPAKLEKEPKTRPEENKPERPSGRKPRPMGIIAANVEKHYETGRVIGDGNFAVVKECRHRETRQAYAMKIIDKSRLKGKEDMVDSEILIIQSLSHPNIVKLHEVYETDMEIYLILEYVQGGDLFDAIIESVKFPEPDAALMIMDLCKALVHMHDKSIVHRDLKPENLLVQRNEDKSTTLKLADFGLAKHVVRPIFTVCGTPTYVAPEILSEKGYGLEVDMWAAGVILYILLCGFPPFRSPERDQDELFNIIQLGHFEFLPPYWDNISDAAKDLVSRLLVVDPKKRYTAHQVLQHPWIETAGKTNTVKRQKQVSPSSEGHFRSQHKRVVEQVS

SEQ ID NO: 228541 - DNA, 1947 bp, Artificial Sequence
  derived and/or modified sequence
atgggaaaggaacccctgacactgaagtccattcaggttgcagtcgaagaactgtaccctaacaaggcgcgggcattaacgcttgcccagcactcaagagctccatctccaagactccgtagccggctctttagtaaagccctcaaaggcgaccatcgttgtggtgagaccgagacacctaaaagctgctcagaagtcgctgggtgcaaagctgctatgcggcaccagggtaaaattccggaggagctgagcctcgacgatcgcgcacgcacccagaaaaaatggggacgaggtaagtgggagccagagccatcatccaaacctccaagagaggccaccctcgaggaaaggcacgctaggggcgaaaaacatttaggagtcgagatcgagaagacgagtggcgagatcatcagatgcgagaagtgtaaacgagagagggagcttcagcagagcttagaaagagaaagactgtcattgggcacatccgaactggatatggggaaagggccaatgtatgatgtagaaaaactggtcagaacaagaagttgcagacgcagccctgaagcgaaccctgcctccggagaggagggttggaagggtgactcacatcgatcttccccccgcaatccaactcaggagttacggagaccctcgaagtcaatggacaaaaaagaggaccgggggcccgaagatcaagagtcccacgcacagggcgctgcgaaggctaaaaaggacctggtcgaggttctccccgtgacagaggagggactgcgtgaggtgaagaaggatacacgcccaatgagcagaagcaaacatgggggctggttgctacgggagcaccaggcggggtttgaaaagttgaggcgcacgagaggggaagagaaggaggcagaaaaggagaaaaagccttgcatgtctggtggtcgccgtatgacattgcgagatgaccagcccgctaaactggaaaaagaaccaaagacccgtccagaagaaaataagccagaacgccctagcggccggaagccacggcccatgggaatcatcgcagcaaacgtggagaagcactacgaaacagggagggtgatcggcgacggaaactttgccgttgttaaagagtgcagacatagggaaactagacaagcctatgcgatgaaaataattgataaatcacgcttaaaaggcaaggaagacatggttgactcagagatcctgatcatccaaagtctctctcacccgaacattgtgaagctgcacgaggtatacgaaacggacatggaaatttacctgatcctggaatatgtacagggcggagacctcttcgacgccatcatagagagcgttaagttccctgaaccagacgcggctctaatgatcatggacttgtgcaaggcattggttcacatgcacgataagtctattgtccatcgagacctcaagcctgaaaatctcttggtgcagagaaacgaagataagtcgacaacactcaagcttgccgatttcggattagcaaagcatgtggtgagaccaatcttcactgtgtgtggcacacctacctatgtagcaccggaaatcctgagcgaaaagggatatggtctggaggtggatatgtgggcggcaggcgtgatcttgtacatcttgctgtgcggctttcccccattccgtagtcccgagcgggaccaagacgaacttttcaatatcatccaactggggcatttcgagttcctgcctccgtattgggataacatctctgacgctgccaaagatctggtctctaggctgctggtcgtagaccctaaaaagcggtataccgcacaccaggtcttacagcacccatggattgaaaccgcaggcaagacaaatacagtcaagcggcagaaacaagtgtccccaagcagcgagggtcactttagatcccaacacaagcgggtggtggagcaagtatcctag

SEQ ID NO: 228542 - DNA, 1947 bp, Artificial Sequence
  derived and/or modified sequence
atgggcaaggagcccctgaccctgaagagcatccaggtggccgtggaggagctgtaccccaacaaggcccgggccctgaccctggcccagcacagccgggcccccagcccccggctgcggagccgcctcttcagcaaggccctgaagggggaccaccgctgtggggagacagagacccccaagagctgcagcgaggtggccggctgcaaggccgccatgaggcaccagggcaagatccctgaggagctgagcctggatgaccgggcccggacccagaagaagtggggccggggcaagtgggagcctgagcccagcagcaagccaccccgggaggccaccctggaggagagacatgcccggggggagaagcacctgggcgtggagattgagaagaccagcggggagatcatccgctgtgagaagtgcaagcgggagcgggagctgcagcagagcctggagcgggagcggctgagcctgggcaccagcgagctggacatgggcaagggccccatgtatgatgtggagaagctggtgaggaccaggagctgccgccgcagccctgaggccaacccagccagcggggaggagggctggaagggggacagccacaggagcagccccaggaaccccacccaggagctgcggcggcccagcaagtccatggacaagaaggaggaccggggccctgaggaccaggagagccacgcccagggcgccgccaaggccaagaaggacctggtggaggtgctgcctgtgacagaggagggcctgcgggaggtgaagaaggacacccggcccatgagccgcagcaagcacggcggctggctgctgcgggagcaccaggccggctttgagaagctgcggaggaccagaggagaggagaaggaggccgagaaggagaagaagccctgcatgtctgggggccgcaggatgaccctgagagatgaccagcctgccaagctggagaaggagcccaagaccaggcctgaggagaacaagccagagcggcccagcggcaggaagccccggcccatgggcatcatcgccgccaacgtggagaagcactatgagaccggccgggtgattggagatggcaactttgctgtggtgaaggagtgccgccaccgggagacccggcaggcctatgccatgaagatcatcgacaagagccggctgaagggcaaggaggacatggtggacagcgagatcctgatcatccagagcctgagccaccccaacatcgtgaagctgcacgaggtgtatgaaacagacatggagatctacctgatcctggagtatgtgcagggcggggacctgtttgatgccatcatcgagagcgtgaagtttcctgagccagatgctgccctgatgatcatggacctgtgcaaggccctggtgcacatgcatgacaagagcatcgtgcaccgggacctgaagccagagaacctgctggtgcagagaaatgaagacaagagcaccaccctgaagctggccgactttggcctggccaagcacgtggtgcggcccatcttcaccgtgtgtggcacccccacctacgtggcccctgagatcctgtctgagaagggctacggcctggaggtggacatgtgggccgccggggtcatcctgtacatcctgctgtgtggcttcccccccttccgcagccctgagcgggaccaggatgagctgttcaacatcatccagctgggccactttgagttcctgcccccctactgggacaacatcagtgatgctgccaaggacctggtgtcccggctgctggtggtggaccccaagaagcgctacacagcccaccaggtgctgcagcacccctggattgaaacagctgggaagaccaacacagtgaagaggcagaagcaggtgagccccagcagcgagggccacttccgcagccagcacaagagggtggtggagcaggtgtcctag

SEQ ID NO: 228543 - DNA, 1947 bp, Artificial Sequence
  derived and/or modified sequence
atgggcaaggagcccctgaccctgaagagcatccaggtggccgtggaagagctgtatccaaacaaggcacgagctctcacccttgcacaacacagcagagccccctcaccacgcctgagatccagattgttctccaaggccctgaaaggagaccatcgctgcggagagacagaaacacccaagtcctgtagcgaggttgctggctgcaaagcagccatgcgtcaccaggggaagatccccgaagaactatcgctcgacgatcgagcacgtacccagaaaaagtgggggcgcggtaagtgggagcctgagccttcctcgaagccacccagagaggccacattggaagaacgacacgcgagaggcgagaagcacctgggcgtcgagatcgagaaaacatcgggcgagatcattcgatgcgaaaagtgtaaacgggaacgcgaacttcagcaaagccttgaaagagaaagacttagtctgggcacatcggaattagatatgggaaagggcccgatgtatgacgtggaaaagctggtgagaaccagaagctgcaggcgcagtccagaggccaaccccgcgtctggcgaggaagggtggaaaggagactctcatcgttcttctccgaggaacccaactcaggagctccggaggccatcaaaatcaatggataagaaagaggacaggggtcccgaggaccaggaaagtcatgcacaaggtgccgcaaaggcaaaaaaagatctggtcgaagtcctaccagttacagaggaaggacttagggaggtgaagaaggacacacgaccgatgagccggtctaaacacggagggtggttgctgcgtgaacatcaggcggggttcgaaaaattacgacggactaggggcgaagagaaggaggccgagaaggaaaaaaaaccttgcatgtcaggaggtcggaggatgacactgagggacgaccagccagccaagttggaaaaggagcccaaaacccgacccgaagaaaacaaacctgaacggccgtccggccgaaaaccacggcctatggggatcattgccgcaaatgtcgaaaagcattatgagaccggacgagtgatcggcgatggaaattttgctgtagtgaaggagtgcagacatcgggagacccggcaggcatatgcaatgaagatcatcgataaaagtaggcttaagggtaaagaggatatggtggatagcgaaatattaattattcagagcctgagtcaccctaatattgtgaaactgcacgaggtgtatgagacagacatggagatatatctgattttagagtacgtccaaggaggtgatcttttcgacgccattatcgaaagtgtcaaattcccagagccggacgctgctctcatgatcatggacctatgtaaggccctggtgcacatgcacgataaaagcatagtgcacagggaccttaagccagaaaacctgctggtgcagcgaaacgaagacaaatcaaccacactgaagctcgctgactttggccttgctaaacacgtagtgaggcccattttcactgtttgcggaacacctacatacgtagcacccgagattctgtccgaaaaaggatacggccttgaggttgacatgtgggctgcaggcgttattctttacatcctgctgtgcggctttcccccttttaggtccccagagcgcgaccaagatgaattgtttaacattatccaactgggccacttcgaattcctacctccatattgggataacatcagcgacgctgccaaagacctcgtctctcgcctgctcgtagtagacccgaagaagcggtataccgcacatcaggttttacagcacccatggattgagacagctggcaaaacaaatactgttaaacgtcaaaaacaggtctctccctcctctgaggggcactttcgctctcaacacaaacgggttgtggagcaagtgtcatag

SEQ ID NO: 228544 - DNA, 1947 bp, Artificial Sequence
  derived and/or modified sequence
atggggaaagagcccctgactctgaagtccatccaggtcgctgttgaggagctgtaccctaacaaggctcgagccctcacactggcccagcactcaagggcaccttccccgaggctgcggtcacgtctctttagcaaagctctcaaaggtgaccaccggtgtggagagactgaaacacccaaatcttgctctgaagtggcgggatgcaaagcggcaatgcggcaccaaggaaagattccagaggagctttccctggatgatcgagctcgcacccagaagaaatgggggagaggcaagtgggaacctgaaccttcctcaaagcctcccagggaagcaactctggaggaaaggcacgctagaggcgaaaagcaccttggcgtagaaatagagaagaccagcggagagattatccggtgcgaaaagtgcaaacgagaacgcgagctgcagcagagcctggaacgtgagagactgagcctcggaacgagcgagctcgacatgggcaaggggccaatgtatgacgtggagaaactggtcagaaccaggagctgcagaaggagcccagaggcaaatcccgcttccggcgaagagggatggaagggagattcacacagaagctctccacgaaacccaacacaggagttacgcaggcctagcaagtcaatggacaaaaaagaagaccgcggacctgaggaccaggagagtcatgcgcaaggcgcagccaaagctaagaaggatctggtcgaggtcttgcctgtgactgaggagggcctaagggaggtcaagaaggacacccgcccaatgtctaggtcaaagcacgggggatggctgttgcgggagcatcaggcagggttcgagaagctgcgccgtacaaggggcgaggaaaaggaagcagagaaagagaagaaaccttgtatgtcggggggtaggaggatgactctgagagatgaccagccggctaaactggagaaagaacctaaaacccggcctgaggagaacaagcctgaacgcccttccggaaggaaaccacgcccaatgggcataatcgctgctaacgtagagaagcactatgaaaccggtagagtcatcggggacgggaatttcgcagtggtgaaggagtgtcggcaccgggaaaccagacaggcctacgcaatgaagattatagacaagagtagattgaaaggtaaggaagatatggtggattcagaaatcctgatcattcagtccctgtcacaccctaacattgtgaaactgcacgaagtgtatgagacagatatggagatatacctgatcctggagtacgttcagggtggcgacctgttcgacgccatcatcgaatcagtgaagttcccggaaccagatgcggctctcatgatcatggacctatgtaaggcgctcgtgcacatgcatgacaagtctatcgttcatcgcgacctcaaacctgaaaatctgctagtacagcgcaacgaggataaaagtaccacactgaaactcgctgattttggactggcaaaacatgtggttcgtcccattttcactgtctgcggcaccccaacctatgtcgcgccagagatactttcagagaagggttacggcctggaagtggacatgtgggccgctggggtgatactctatatcctgttatgcggatttccaccctttaggtcccctgagcgggaccaggacgagctttttaatatcatccagctgggccattttgaatttctacccccatattgggacaacatttctgacgccgctaaggaccttgttagccggttactggttgttgacccgaaaaaacgatatactgcccaccaggtgctgcaacacccctggatcgaaaccgctggtaagaccaatactgtgaagcggcagaaacaagtctccccatcttcagaaggacactttcgatcacagcataagcgtgtagtcgagcaagtatcatag

SEQ ID NO: 228545 - DNA, 1947 bp, Artificial Sequence
  derived and/or modified sequence
atgggcaaggagcccctgaccctgaagagcatccaggtggccgtggaggagctgtaccccaacaaggccagagccctgaccctggcccagcacagcagagcccccagccccagactgagaagcagactgttcagcaaggccctgaagggcgaccacagatgcggcgagaccgagacccccaagagctgcagcgaggtggccggctgcaaggccgccatgagacaccagggcaagatccccgaggagctgagcctggacgacagagccagaacccagaagaagtggggcagaggcaagtgggagcccgagcccagcagcaagccccccagagaggccaccctggaggagagacacgccagaggcgagaagcacctgggcgtggagatcgagaagaccagcggcgagatcatcagatgcgagaagtgcaagagagagagagagctgcagcagagcctggagagagagagactgagcctgggcaccagcgagctggacatgggcaagggccccatgtacgacgtggagaagctggtgagaaccagaagctgcagaagaagccccgaggccaaccccgccagcggcgaggagggctggaagggcgacagccacagaagcagccccagaaaccccacccaggagctgagaagacccagcaagagcatggacaagaaggaggacagaggccccgaggaccaggagagccacgcccagggcgccgccaaggccaagaaggacctggtggaggtgctgcccgtgaccgaggagggcctgagagaggtgaagaaggacaccagacccatgagcagaagcaagcacggcggctggctgctgagagagcaccaggccggcttcgagaagctgagaagaaccagaggcgaggagaaggaggccgagaaggagaagaagccctgcatgagcggcggcagaagaatgaccctgagagacgaccagcccgccaagctggagaaggagcccaagaccagacccgaggagaacaagcccgagagacccagcggcagaaagcccagacccatgggcatcatcgccgccaacgtggagaagcactacgagaccggcagagtgatcggcgacggcaacttcgccgtggtgaaggagtgcagacacagagagaccagacaggcctacgccatgaagatcatcgacaagagcagactgaagggcaaggaggacatggtggacagcgagatcctgatcatccagagcctgagccaccccaacatcgtgaagctgcacgaggtgtacgagaccgacatggagatctacctgatcctggagtacgtgcagggcggcgacctgttcgacgccatcatcgagagcgtgaagttccccgagcccgacgccgccctgatgatcatggacctgtgcaaggccctggtgcacatgcacgacaagagcatcgtgcacagagacctgaagcccgagaacctgctggtgcagagaaacgaggacaagagcaccaccctgaagctggccgacttcggcctggccaagcacgtggtgagacccatcttcaccgtgtgcggcacccccacctacgtggcccccgagatcctgagcgagaagggctacggcctggaggtggacatgtgggccgccggcgtgatcctgtacatcctgctgtgcggcttcccccccttcagaagccccgagagagaccaggacgagctgttcaacatcatccagctgggccacttcgagttcctgcccccctactgggacaacatcagcgacgccgccaaggacctggtgagcagactgctggtggtggaccccaagaagagatacaccgcccaccaggtgctgcagcacccctggatcgagaccgccggcaagaccaacaccgtgaagagacagaagcaggtgagccccagcagcgagggccacttcagaagccagcacaagagagtggtggagcaggtgagctag

SEQ ID NO: 228546 - DNA, 5344 bp, Artificial Sequence
  derived and/or modified sequence
gactcttgttggtgtttcatgggcagcaaaactggccctttttatctcagctgtagatccttgaaggacagcaaggcctatgtgaccattctctaaaatatttaagctcgagaatcacagagcggaagctgcaaggctcctggctgcctgccagccgagggaatctggagaaaccattcctggggccgcgtggccccgtcgtgcccttgttctgccctcggaatggccttcactcagcacatcctgagaacagccctctgaagcccagggtcgtgaccgtagtgaagctgggtgggcagcgcccccgaaagatcactctgctcctcaacaggcgatcagtgcagacgttcgagcagctcttagctgacatctcagaagccttgggctctcccagatggaagaatgaccgtgtgaggaaactgtttaacctcaagggcagggaaatcaggagcgtctctgatttcttcagggaaggggatgctttcatagctatgggcaaagaaccactgacactgaagagcattcaggtggctgtagaagaactgtaccccaacaaagcccgggccctgacactggcccagcacagccgtgccccttctccaaggctgaggagcaggctgtttagcaaggctctgaaaggagaccaccgctgtggggagaccgagacccccaagagctgcagcgaagttgcaggatgcaaggcagccatgaggcaccaggggaagatccccgaggagctttcactagatgacagagcgaggacccagaagaagtgggggagggggaaatgggagccagaacccagtagcaagccccccagggaagccactctggaagagaggcacgcaaggggagagaagcatcttggggtggagattgaaaagacctcgggtgaaattatcagatgcgagaagtgcaagagagagagggagctccagcagagcctggagcgtgagaggctttctctggggaccagtgagctggatatggggaagggcccaatgtatgatgtggagaagctggtgaggaccagaagctgcaggaggtctcccgaggcaaatcctgcaagtggggaggaagggtggaagggtgacagccacaggagcagccccaggaatcccactcaagagctgaggagacccagcaagagcatggacaagaaagaggacagaggcccagaggatcaagaaagccatgctcagggagcagccaaggccaagaaggaccttgtggaagttcttcctgtcacagaggaggggctgagggaggtgaagaaggacaccaggcccatgagcaggagcaaacatggtggctggctcctgagagagcaccaggcgggctttgagaagctccgcaggacccgaggagaagagaaggaggcagagaaggagaaaaagccatgtatgtctggaggcagaaggatgactctcagagatgaccaacctgcaaagctagaaaaggagcccaagacgaggccagaagagaacaagccagagcggcccagcggtcggaagccacggcccatgggcatcattgccgccaatgtggaaaagcattatgagactggccgggtcattggggatgggaactttgctgtcgtgaaggagtgcagacaccgcgagaccaggcaggcctatgcgatgaagatcattgacaagtccagactcaagggcaaggaggacatggtggacagtgagatcttgatcatccagagcctctctcaccccaacatcgtgaaattgcatgaagtctacgaaacagacatggaaatctacctgatcctggagtacgtgcagggaggagacctttttgacgccatcatagaaagtgtgaagttcccggagcccgatgctgccctcatgatcatggacttatgcaaagccctcgtccacatgcacgacaagagcattgtccaccgggacctcaagccggaaaaccttttggttcagcgaaatgaggacaaatctactaccttgaaattggctgattttggacttgcaaagcatgtggtgagacctatatttactgtgtgtgggaccccaacttacgtagctcccgaaattctttctgagaaaggttatggactggaggtggacatgtgggctgctggcgtgatcctctatatcctgctgtgtggctttcccccattccgcagccctgagagggaccaggacgagctctttaacatcatccagctgggccactttgagttcctccccccttactgggacaatatctctgatgctgctaaagatctggtgagccggttgctggtggtagaccccaaaaagcgctacacagctcatcaggttcttcagcacccctggatcgaaacagctggcaagaccaatacagtgaaacgacagaagcaggtgtcccccagcagcgagggtcacttccggagccagcacaagagggttgtggagcaggtatcatagtcaccaccttgggaatctgtccagcccccagttctgctcaaggacagagaaaaggatagaagtttgagagaaaaacaatgaaagaggcttcttcacataattggtgaatcagagggagagacactgagtatattttaaagcatattaaaaaaattaagtcaatgttaaatgtcacaacatatttttagatttgtatatttaaagcctttaatacatttttggggggtaagcattgtcatcagtgaggaattttggtaataatgatgtgttttgcttcccctttgtaaccaagtttattctgtactacaggagtggtgcttaccagggtctaaactccccctgtgagattaataaggtgcattgtggtctttctgtgttaataaaatgtgctctgaataacagaagtgggcctgtattctgattacttctttgtgctggtgatgacagcacaaaaattcaaaaatgaattatagttcaggcatatctcctgaagctgatatgactacatatagatgtgaaggacacttgattagttgacaagacctgtttatttaggatgcactaatcttggtctcttgcatttcagtcttaccaaaaatcagttttggtgcagtctgagacatggaaagaaaaaaaacaaaccattgaatcattcttgctcctgcaataccgttatactgcttttcagccccaattatccctgagcctgagtcatttctatgtgaagtcaggcgctcaggctgtgaccgtgttaacattttcagatcacgagggagccatttagtacattaatatgtcagaaatgcagtaaatggattacactggggctcgaaggagctcagagttcaagcacattcctacctgcagggcatacacccaggacacattccagatttctgtgctgaaatattggtctttgcagatgattctgggagtctgtgtgagctgacagcaagacatatcctaatatttcccaaattgaccttcctagattatgaatgacctggttagtaggccacaaaatctagtcaagagtgtggctttttcacgtctaccttccctaacagttttggagccatctgggcggaggcgtgtgttagttaggaaaaccggaatagtactagagaattcaacataaggaattgcttaatcaggttttggaaaatggaagaagcacaaaggaggctctggtataatttagagatagtaactgcaggaagtggctcctgttctttggagaaccaagggaagaagttggggttattagaacctattgaaggagaaatttcttgtagtggacactgtagtatgccactcaggtcctccaagactgaagggaataagctccttggggtgctgctggatgatggctctcagctttcagccctctacaggaattaccctccactggaagagacacctttcagctccctcctgaagcaggctatatcaaatgactagtccctgtagggtatggtggctcagctcctttgtcccaaacagggacaatactgaagggccatccaactacggacctgcccatgggggttggctgaactgttggttgagactgcatcatagcccactttctcccttgcccaatcctgcttctttcctttcccttccagaggtaatgatcctgagaccactccctaataagccttttggatgctaatctggattttagagttggcttctcgggaaaccaaaccgttgacaccccctagaaacttgaaaccacatcaaagaagtaccagctggtgctttaacctcagaagcttggagaaggggccctgtggagcagggactcagacccctgaggagtgggtgctgcccagcaggcagtgtaatgggactcattctgaacacgtgaaagaggctggaagctggattcagttgctactagaacatattttgataaagacaccagtaaccttcatttcactaaatccaaaagagaattttcaatcctcaaattagcatcacttgaccctattgaccactttctctttgaataatttctcctgttgactaccatgatgtcacatttttctggtttttttttctcctatacctttggatctcttgtatagattcagtcttcttccagttgctaaaagctgtagttgcatccttagtggctagggaaatgcaaattaaaatcacaatgaaatatcactatacacccattagaatagctaaaattaaatggctaaaatgagaagactgaccttaccaactactagcgaggatgcagagtgactggaacttcccgtacattgctgctgggagtataaaatgggacttctcctttggagaatggtttggtagttcctttaaaagttaaacatgtacctaccatatgatattccacttctagatgtttacccagcagaaattcaagcatatgtcctatgaagacttcacaatatttataggtgctttatttgtagtagccccaaagtggaaacatcttgaatgggcatgatttggtgcatggataaacagattgtatatccacacaatgaataacagccacaaaaaagggatgaactattcatacacgaacaacatggatggactgccaaagaattaggctgaatgaaagaagaaaaaaaagactacattttgattatttcatttacatactattccagaaaatacaagtgaatctatagtgacagaaagtgatcagggggtttgctggagatggaaatggggagaggagggacagaaggattgcaagggaacacttggtaactttggggaagagggacgtgttcattttcttgaatgtaataatggatttatgggggtatatatgtcaaaacttaccaaattgtacacttttgttatgtgcagtttattgtgtgtcaattatacctcaataaagttgttaaaaatat

SEQ ID NO: 228547 - protein, 2080 aa, Artificial Sequence
  derived and/or modified sequence
MSSSPSRSAADIYIREYFHSHVSGGHPEATPLRVMYTDRPLSQTDPVTLQYCCLTDDRQAFRPPTRAELARHRVVVTTTSQARELRVPVGFFSHILIDEAAQMLECEALTPLAYASHGTRLVLAGDHMQVTPRLFSVARARAAEHTLLHRLFLCYQQETHEVARQSRLVFHENYRCTDAIVSFISRHFYVAKGNPIHARGKVPPHPRHYPLMFCHVAGSPDRDMSMASWLNLAEIAQVVEKVQEAYNTWPSCWGGREQRCICVVSHGAQVSALRQELRRRDLGQVSVGSFEILPGRQFRVVVLSTVHTCQSLLSPGALAPEFFTDARVLNTVLTRAQSQLVVVGDAVALCSFGACGKLWESFIRECVERHSVCPEGLSMEQVEQGVAQRRRWPPRGTQAGAAGNWEAAPEPVGDLAEEQAAVVTAMVKAEPGDEALSPASRDITATTAQTEAAAAPAGDAVKEDVVPGACAAGAAAAAGVESTEAEDAEADFWPWDGELNADDAILRELLDESQKVMVTVGEDGLLDTVARPESLQQARLYENLPPAALRKLLHAEPERYRHCSFVPETFERASAIPLDDASSGPIQVRGRLDCGMAFAGDEVLVQLLSGDKAPEGRLRGRVLGVLKRKRHELAFVCRMDTWDPRIMVPINGSVTKIFVAELKDPSQVPIYSLRKGRLQRVGLERLTAEARHSRLFWVQIVLWRQGFYYPLGIVREVLPEASTWEQGLRILGLEYSLRVPPSDQATITKVLQKYHTELGRVAGRREDCRAFLTFTVDPQGACNLDDALSVRDLGPRCEVAVHITDVASFVPRDGVLDVEARRQGAAFYAPGREPVPMLPASLCQDVLSLLPGRDRLAISLFLTMEKASGQLKSLRFAPSVVQSDRQLSYEEAEEVIRQHPGAGRELPARLDSVDACVVAACYFSRLLRRHRLRSDCFYEQPDEDGTLGFRAAHIMVKEYMIQFNRLVAEFLVGSECTRTVTPLRWQPAPRSQQLKALCEKHGDRVPLSLHLGHHLHGGGGSPPDTRLHLLASLWKQVQFAARTQDYEQMVDLVTTDDMHPFLAPAGRDLRKALERSAFGRCARGHQQQGGHYSLQVDWYTWATSPIRRYLDVVLQRQILLALGHGGSAYSARDIDGLCQAFSLQHALAQSYQRRARSLHLAVQLKAQPLDKLGFVVDVEAGSRCFRLLFPSNRETLPDPCPVPYGSLQLAEHPHALAGRPGLRLLWRRRVYSAQGSSPPLPLPGTVPDPHTLAVETALWKQLLELVELQRWPEAAALIQEKGEASQRRELVQVQRSHCGHFLEVARELGSGDTLQVQLGTSLQHGFLVPSPQLWTVAPGFSLCLEHVERPGDCFSGRVYRAPRDRYRDVDEYACVWEPFCALESATGAVAENDSVTLQHLSVSWEASRTPQGQLQGAFRLEAAFLEENCADINFSCCYLCIRLEGLPAPTASPRPGPSSLGPGLNVDPGTYTWVAHGQTQDWDQERRADRQEAPRRVHLFVHHMGMEKVPEEVLRPGTLFTVELLPKQLPDLRKEEAVRGLEEASPLVTSIALGRPVPQPLCRVIPSRFLERQTYNIPGGRHKLNPSQNVAVREALEKPFTVIQGPPGTGKTIVGLHIVFWFHKSNQEQVQPGGPPRGEKRLGGPCILYCGPSNKSVDVLAGLLLRRMELKPLRVYSEQAEASEFPVPRVGSRKLLRKSPREGRPNQSLRSITLHHRIRQAPNPYSSEIKAFDTRLQRGELFSREDLVWYKKVLWEARKFELDRHEVILCTCSCAASASLKILDVRQILVDEAGMATEPETLIPLVQFPQAEKVVLLGDHKQLRPVVKNERLQNLGLDRSLFERYHEDAHMLDTQYRMHEGICAFPSVAFYKSKLKTWQGLRRPPSVLGHAGKESCPVIFGHVQGHERSLLVSTDEGNENSKANLEEVAEVVRITKQLTLGRTVEPQDIAVLTPYNAQASEISKALRREGIAGVAVSSITKSQGSEWRYVLVSTVRTCAKSDLDQRPTKSWLKKFLGFVVDPNQVNVAVTRAQEGLCLIGDHLLLRCCPLWRSLLDFCEAQQTLVPAGQVRVCRRPTMPS

SEQ ID NO: 228548 - DNA, 6243 bp, Artificial Sequence
  derived and/or modified sequence
atgtcttctagcccatctcggtcagccgccgatatatacatcagagagtattttcactcacacgtgagtgggggacatcccgaagcaacgcccctgagggtcatgtatactgatagacccctgagccagacggaccccgtaacactgcaatactgttgcctgaccgatgatcgtcaggccttcagaccccccacgcgtgccgaactagccagacatagggtcgttgtgacaactacgagccaggcacgggaactcagagtgcctgttggtttcttctcacacatcttaatcgatgaagccgctcagatgcttgagtgtgaggcactgactcctttagcctatgcaagccatgggacacgcctagtcctggctggagaccatatgcaggttacccccaggctgttcagcgtcgcccgagctcgggccgccgagcacacactgctccacaggttatttctgtgctatcagcaggaaacccacgaggtggctcgtcagagtcgtctggtgttccacgagaattaccgatgtactgatgctatcgtttccttcattagccggcatttctatgttgccaagggcaatccgattcacgcacgaggcaaagtgccaccacatccccgccactatcctctaatgttttgtcatgttgccggcagccctgaccgagacatgagcatggcctcatggcttaatctggcagagatcgcacaggtggtggagaaagttcaggaagcatataacacctggccctcttgttggggtggtcgggaacaaaggtgtatatgcgtggtctctcacggagcccaagtatcggctttacgccaggagttgcgccgccgcgatcttggacaggtgtctgtaggttcattcgaaatcctgcccggcagacaattcagagtggttgtattaagtacggtccacacttgccagtctcttctcagcccgggtgctctggctcctgagttctttacagacgcaagagtgctaaacactgtgctcaccagagcccaaagccagctcgtggtcgtcggcgacgccgtggcactctgctctttcggcgcctgcggaaagctctgggagagcttcatacgtgaatgcgtggagaggcatagtgtctgcccggaaggtctcagcatggagcaagtggagcagggagtcgcacagaggcggagatggccaccgaggggcacacaggccggggccgcgggcaattgggaggccgcgcccgagcccgttggagatctggcggaagaacaagccgcagtggtcaccgcgatggtgaaggcagaacccggagacgaggccctttccccggcttccagagatattaccgcaactacggcccagacggaagccgcagccgcccccgctggcgatgctgtgaaggaggatgtcgtgccaggcgcctgcgcagctggggcagccgctgctgccggcgtcgaatctacagaagcagaggacgccgaagctgacttctggccatgggacggggagctcaatgcggatgacgccatcctgcgtgagctcctggacgagagccagaaggttatggtcactgtgggtgaagatggcctactcgacactgttgcaaggccagagtccctccagcaggcaaggctgtacgagaatctgccgccggcagctctgcggaaactcctgcatgccgagcctgagaggtatcgccactgttcattcgtccctgaaactttcgagcgagccagtgcgatcccgcttgatgatgcctcttccggccccattcaagttaggggtcgcctagattgcgggatggcattcgcgggagacgaggtcctcgtccagttgctgtctggcgacaaggcccccgagggtagattgcgaggtcgcgtactgggagtcctaaaaaggaagcgacatgaactagcctttgtctgccggatggacacatgggaccctcggatcatggtacccattaacgggtccgtcacaaaaatctttgtcgcggagctcaaggacccctcacaggtgccaatctattcgctgcggaaaggaaggctgcagcgagtcggactcgagcgcttgacagctgaggcgagacactccaggcttttttgggtgcaaattgtgctttggcgtcaggggttttactacccacttggcattgtacgggaggtgctgcccgaggcgtccacttgggaacagggcttgcgcattctgggacttgagtattctctcagagttcctccatccgatcaagcaacaatcactaaggtcctccagaagtaccatactgaactgggtcgcgttgccggacgaagggaggattgcagggctttcctcactttcactgtcgatccacagggcgcttgcaacttggatgacgctctttcggttagggatcttgggccaaggtgcgaagtggctgtccacattacagatgtggcctcctttgtccctcgcgatggagtgctcgacgtcgaggcacggagacagggagcagccttctatgcccccggccgcgagcccgttccgatgttgcctgcctcgttgtgccaggacgttctgagcttgttgcccggacgggataggctggcaatcagcctctttttaactatggagaaagcctctggccaactcaagtcccttaggtttgccccatccgtcgttcagtccgaccgccagctgtcctacgaggaggcggaggaagttataagacagcatcccggcgctggcagagaactgccagcccggttggacagcgtggacgcttgtgtagtggcggcatgctatttttcccgcctgcttaggcgacataggcttaggagcgattgtttttacgaacaacccgacgaagatggtactctcggattcagagccgcgcacatcatggttaaagagtacatgatccaattcaacagactggtggcagaattcctcgttgggtcggaatgtacacgtaccgtgacacccttgcgatggcagcccgccccacggagccaacagctgaaagctctgtgtgaaaaacatggtgatcgggttccattgtccctgcatctggggcaccacctccacggggggggtggaagccctccagacactcgactgcatctgcttgcttccttatggaagcaggttcagtttgccgcccgcacccaggattacgaacagatggtggacctcgtgaccacagacgacatgcatccattcctggcacccgcaggaagggatctacgaaaggccctggagcgaagtgcttttggtcgctgtgcacgtggccaccagcaacagggtgggcactactcactgcaggtcgattggtacacttgggctacaagtccgattaggaggtatctagatgtggtactccagcgtcaaatattactggcactgggacacggcggcagcgcttatagcgcaagagatattgacgggctgtgccaggctttcagcctgcagcatgccttagcacaaagttatcagaggcgcgctcggagcctacacctggccgtccaattaaaggcacagccactggacaagctcggcttcgtagtggacgtggaggccggctcacgttgcttccggctactgttccccagcaatcgagaaacgttgcccgatccatgtccagtgccatacggcagcttacagctagcagaacatccccatgctctagctggtcggcctggtttaagactgttatggcgccggcgggtatacagcgcgcagggaagctcccctcctcttcccctccctggcactgtccccgacccccataccctcgctgttgagactgccttgtggaagcagctgttagagctcgtggaattacagcgatggcccgaagccgctgccctaatccaagaaaaaggggaagcgagtcagcgcagagaactggtgcaggtgcagaggtctcattgcggccattttcttgaggtcgcgagggaattgggctcgggagatacactccaggtccagctgggtacatccttgcagcacggttttttggtcccctcacctcagttgtggactgtagcgcctgggttctccctctgtctggagcacgtcgagcggcctggggactgcttttcgggccgggtctatcgggcgcctagggatcgctatcgagatgtggacgagtacgcgtgtgtttgggagcccttttgcgccctcgaatccgccacgggggcagttgccgaaaacgattcggttacgctgcagcatctatccgtgtcttgggaggcctcaaggacaccccaggggcaactacaaggtgcattccggttggaagctgcatttttagaagaaaactgtgcagatatcaacttttcgtgttgttacctatgtattagattagaaggccttccagctcccaccgccagccctcgtcctggcccctcctccctcggacctggccttaatgtggaccccgggacctacacctgggtggcccacggacagacccaagactgggaccaggagcgcagggccgatcgccaggaggccccacgcagagtccatctgttcgtgcaccatatgggcatggagaaggtaccggaggaagtcctccggccaggtaccctgtttactgttgagctgctccccaaacaactccctgatctgcgcaaggaggaggctgtgcgcggcctggaggaggcgtctcctctcgtcacctcaatagcattgggacggccagtgccccagcctctttgccgcgtgatcccttcacgctttctcgagagacagacatataatatccccggcggaaggcataaactcaacccatcccagaacgtcgccgttagggaggcactggagaaaccgttcacagttatccagggccctcctggcaccggcaagactattgtgggcctgcacatagtgttttggtttcacaagtcaaaccaggaacaggttcagccagggggtcctcctcgaggcgagaagcgtcttgggggcccatgcatcctatactgtggaccctctaacaagagtgtagatgtgctggctggcctgttgctccggcggatggaactgaagccccttagagtgtacagtgaacaggcagaggcctccgagttccctgtccctagagttggatctcgtaagctgttgagaaagagtccccgggagggccgtccaaatcagagcttacggtccataacgctccatcataggattcggcaggccccaaatccctattcctctgaaattaaggcttttgatacccggcttcagagaggagagctcttctccagggaggatctggtgtggtacaagaaggtactgtgggaggcacgaaagttcgaacttgatagacatgaggtgattctctgcacctgcagctgcgcggcaagtgcttcactgaagatactggatgttcgacaaatactggtcgatgaggctggaatggcaacagaacccgagaccttgattcctctggttcagttcccccaggccgagaaggtcgtacttctgggcgatcacaagcagcttagaccagtggtaaagaacgaaagattacagaatctgggcctggatcgctcgctgttcgagcgataccatgaggatgcccatatgctcgatacgcagtatagaatgcacgaggggatttgtgccttccctagcgtggctttctacaaatctaagctgaaaacctggcagggccttaggcggccacccagtgttctcggacatgcaggaaaggagtcttgtcccgtcatcttcggacacgttcagggccacgagcgtagcctcttagtatctactgacgagggaaacgagaacagtaaggccaatctggaggaagtggccgaagtggtcagaattacaaaacagctgacattgggcaggacggtggagccgcaggacattgccgtgcttacaccgtacaatgcgcaagcatctgagatttctaaagctctaagacgtgagggtattgctggagtggccgtttcgtcaataacgaagtcccagggttctgaatggcgatacgtgctggtatccacagtccggacctgcgcaaagtcagatctggaccagaggcccacaaagagttggcttaagaaatttctgggttttgtcgtggaccctaaccaggtgaacgtagcagtcacaagagcccaggagggtctgtgtttgataggcgaccacctactgctgaggtgctgcccactctggcgcagtctgctggacttctgtgaagcccaacagaccctcgtaccagctggtcaggtacgtgtgtgccgtagaccaactatgccgtcctag

SEQ ID NO: 228549 - DNA, 6243 bp, Artificial Sequence
  derived and/or modified sequence
atgagcagcagccccagccgctctgctgctgacatctacatccgggagtacttccacagccacgtgtctgggggccaccctgaggccacccccctgcgggtgatgtacacagaccggcccctgagccagacagatcctgtgaccctgcagtactgctgcctgacagatgaccggcaggccttccggccccccaccagggctgagctggcccggcaccgggtggtggtgaccaccaccagccaggcccgggagctgcgggtgcctgtgggcttcttcagccacatcctgattgatgaggccgcccagatgctggagtgtgaggccctgacccccctggcctatgccagccacggcacccggctggtgctggccggggaccacatgcaggtgacccccaggctcttctctgtggcccgggcccgggctgctgagcacaccctgctgcacaggctcttcctgtgctaccagcaggagacccatgaggtggcccggcagagccggctggtgttccacgagaactaccgctgcacagatgccatcgtgtccttcatcagccgccacttctacgtggccaagggcaaccccatccacgcccggggcaaggtgcccccccaccccaggcactaccccctgatgttctgccacgtggccggcagcccagaccgggacatgtccatggcctcctggctgaacctggccgagatcgcccaggtggtggagaaggtgcaggaggcctacaacacctggcccagctgctggggcggccgggagcagcgctgcatctgtgtggtgagccacggggcccaggtgtctgccctgcggcaggagctgcggcggcgggacctgggccaggtgtctgtgggcagctttgagatcctgcccggccggcagttccgggtggtggtgctgagcacagtgcacacctgccagagcctgctgagccctggggccctggcccctgagttcttcacagatgcccgggtgctgaacacagtgctgacccgggcccagagccagctggtggtggtgggagatgctgtggccctgtgcagctttggagcctgtgggaagctgtgggagagcttcatcagagaatgtgtggagcggcacagcgtgtgcccagagggcctgtccatggagcaggtggagcagggcgtggcccagaggcggcgctggccaccccggggcacccaggccggggccgccggcaactgggaggccgcccctgagcctgtgggggacctggccgaggagcaggccgctgtggtgacagccatggtgaaggccgagcctggagatgaggccctgagccctgccagccgggacatcacagccaccacagcccagacagaggccgccgccgccccagctggagatgctgtgaaggaggatgtggtgcctggggcctgtgccgccggggctgctgctgctgctggggtggagagcacagaagcagaagatgctgaggccgacttctggccctgggatggagagctgaatgctgatgatgccatcctgcgggagctgctggatgagagccagaaggtgatggtgacagtgggggaggatggcctgctggacacagtggcccggcctgagagcctgcagcaggcccggctgtatgagaacctgcccccagctgccctgaggaagctgctgcatgctgagcctgagcgctaccgccactgcagctttgtgcctgagacctttgagcgggccagcgccatccccctggatgatgccagcagcggccccatccaggtgcggggccgcctggactgtggcatggcctttgctggagatgaggtgctggtgcagctgctgagcggggacaaggcccctgagggccgcctgcggggccgggtgctgggcgtgctgaagaggaagagacatgagctggcctttgtgtgcaggatggacacctgggacccccgcatcatggtgcccatcaatggatctgtgaccaagatctttgtggccgagctgaaggaccccagccaggtgcccatctacagcctgaggaagggccgcctgcagagggtgggcctggagcggctgacagctgaggcccggcacagccgcctcttctgggtgcagatcgtgctgtggaggcagggcttctactaccccctgggcatcgtgcgggaggtgctgcctgaggccagcacctgggagcagggcctgcgcatcctgggcctggagtacagcctgcgggtgccccccagcgaccaggccaccatcaccaaggtgctgcagaagtaccacacagagctgggccgggtggccggccggcgggaggactgccgggccttcctgaccttcaccgtggacccccagggcgcctgcaacctggatgatgccctgtctgtgcgggacctgggcccccgctgtgaggtggccgtgcacatcacagatgtggccagctttgtgcccagagatggagtgctggatgtggaggcccggcggcagggcgccgccttctacgcccctggccgggagcctgtgcccatgctgcctgccagcctgtgccaggatgtgctgagcctgctgcccggccgggaccggctggccatcagcctcttcctgaccatggagaaggccagcggccagctgaagagcctgcgctttgcccccagcgtggtgcagagcgaccggcagctgtcctatgaggaggccgaggaggtgatccggcagcaccctggggccggccgggagctgcctgcccggctggacagcgtggatgcctgtgtggtggccgcctgctacttcagccggctgctgcggcggcaccggctgcggagtgactgcttctatgagcagccagatgaagatggcaccctgggcttccgggccgcccacatcatggtgaaggagtacatgatccagttcaaccggctggtggccgagttcctggtgggctctgaatgtaccaggacagtgacccccctgcgctggcagcctgcccccaggagccagcagctgaaggccctgtgtgagaagcatggagacagagtgcccctgagcctgcacctgggccaccacctgcacggcggcggcggcagccccccagacacccggctgcacctgctggccagcctgtggaagcaggtgcagtttgctgcccggacccaggactatgagcagatggtggacctggtgaccacagatgacatgcaccccttcctggccccagctggccgggacctgaggaaggccctggagaggtctgccttcggccgctgtgcccggggccaccagcagcagggcggccactacagcctgcaggtggactggtacacctgggccaccagccccatccgccgctacctggatgtggtgctgcagaggcagatcctgctggccctgggccacggcggcagcgcctacagcgcccgggacattgatggcctgtgccaggccttcagcctgcagcacgccctggcccagagctaccagaggcgggcccggagcctgcacctggccgtgcagctgaaggcccagcccctggacaagctgggctttgtggtggatgtggaggccggcagccgctgcttccggctgctcttccccagcaaccgggagaccctgcctgacccctgccctgtgccctacggcagcctgcagctggccgagcacccccacgccctggccggccggcccggcctgcggctgctgtggaggcggcgggtgtacagcgcccagggcagcagcccccccctgcccctgcccggcaccgtgcctgacccccacaccctggccgtggagacagccctgtggaagcagctgctggagctggtggagctgcagcgctggccagaggccgccgccctgatccaggagaagggggaggccagccagaggcgggagctggtgcaggtgcagaggagccactgcggccacttcctggaggtggcccgggagctgggcagcggggacaccctgcaggtgcagctgggcaccagcctgcagcacggcttcctggtgcccagcccccagctgtggacagtggcccctggcttcagcctgtgcctggagcacgtggagaggcctggggactgcttcagcggccgggtgtaccgggccccccgggaccgctacagagatgtggatgaatatgcctgtgtgtgggagcccttctgtgccctggagagcgccaccggggctgtggctgaaaatgacagcgtgaccctgcagcacctgtctgtgtcctgggaggccagcaggaccccccagggccagctgcagggcgccttccggctggaggccgccttcctggaggagaactgtgccgacatcaacttcagctgctgctacctgtgcatccggctggagggcctgcctgcccccacagccagccccaggcctggccccagcagcctgggccctggcctgaatgtggaccccggcacctacacctgggtggcccacggccagacccaggactgggaccaggagcggcgggctgaccggcaggaggcccccaggagagtgcacctgtttgtgcaccacatgggcatggagaaggtgcctgaggaggtgctgcggcccggcaccctcttcaccgtggagctgctgcccaagcagctgcctgacctgaggaaggaggaggccgtgcggggcctggaggaggccagccccctggtgaccagcatcgccctgggccggcctgtgccccagcccctgtgcagggtcatccccagccgcttcctggagcggcagacctacaacatccctgggggccgccacaagctgaaccccagccagaatgtggccgtgcgggaggccctggagaagcccttcaccgtcatccagggccccccaggcaccgggaagaccatcgtgggcctgcacatcgtgttctggttccacaagagcaaccaggagcaggtgcagcccggcggccccccaagaggagagaagaggctgggcggcccctgcatcctgtactgcggccccagcaacaagtctgtggatgtgctggccggcctgctgctgcggaggatggagctgaagcccctgcgggtgtacagcgagcaggccgaggccagcgagttccctgtgccccgggtgggcagcaggaagctgctgaggaagagcccccgggagggccggcccaaccagagcctgcggagcatcaccctgcaccaccgcatccggcaggcccccaacccctacagcagcgagatcaaggcctttgacacccggctgcagagaggagagctgttcagccgggaggacctggtgtggtacaagaaggtgctgtgggaggccaggaagtttgagctggacagacatgaagtcatcctgtgcacctgcagctgtgccgccagcgccagcctgaagatcctggatgtgcggcagatcctggtggatgaagctggcatggccacagagcctgagaccctcatccccctggtgcagttcccccaggccgagaaggtggtgctgctgggggaccacaagcagctgcggcctgtggtgaagaatgaaaggctgcagaacctgggcctggacaggagcctgtttgagcgctaccatgaagatgcccacatgctggacacccagtacaggatgcatgagggcatctgtgccttccccagcgtggccttctacaagagcaagctgaagacctggcagggcctgcggcggccccccagcgtgctgggccatgctgggaaggagagctgccctgtgatcttcggccacgtgcagggccacgagaggagcctgctggtgtccacagatgagggcaatgaaaacagcaaggccaacctggaggaggtggccgaggtggtgcgcatcaccaagcagctgaccctgggccgcacagtggagccccaggacattgctgtgctgaccccctacaatgcccaggccagcgagatcagcaaggccctgcggcgggagggcattgctggggtggccgtgagcagcatcaccaagagccagggcagcgagtggaggtatgtgctggtgtccacagtgaggacctgtgccaagagtgacctggaccagaggcccaccaagtcctggctgaagaagttcctgggctttgtggtggaccccaaccaggtgaatgtggccgtgacccgggcccaggagggcctgtgcctgattggagaccacctgctgctgcgctgctgccccctgtggaggagcctgctggacttctgtgaggcccagcagaccctggtgcctgctggccaggtgcgggtgtgccggcggcccaccatgcccagctag

SEQ ID NO: 228550 - DNA, 6243 bp, Artificial Sequence
  derived and/or modified sequence
atgagcagcagccccagccggagcgccgccgacatctacatccgggagtactttcacagtcacgtgtcaggcggacatcccgaagccacccccctgagagttatgtacaccgatagaccacttagccagactgaccccgtgacactgcagtattgctgcctgacggacgacagacaggcgttccggcctcccacccgcgcagagctggcgcgtcaccgcgtggttgtgactacaactagccaggccagggaattacgcgtacctgtaggttttttctctcacattctcattgatgaggcagcccagatgctggagtgtgaagcgctgaccccactggcttatgccagccatggtactagactggttctcgccggggatcacatgcaggtgacccctaggctgtttagtgtcgcaagggcaagagcagccgagcacaccctgcttcatcgtctgtttctatgctaccagcaggagacgcacgaagtggctagacaaagccgtctggtattccacgagaattaccgctgtacagacgctatagtgagcttcatttcgcgtcatttttacgtagcgaaggggaatccaattcacgccaggggcaaggtgccgcctcaccccaggcattaccccctcatgttttgtcacgtggcaggttcccccgatcgcgacatgtccatggcctcctggctaaatctggctgagatcgctcaggtcgtggagaaagtgcaagaagcatacaacacctggccttcatgttgggggggccgcgaacagcgttgcatttgcgttgtgtcgcacggtgctcaagttagtgccttgagacaagaactgcgacgcagagaccttggtcaggtatcagtggggagttttgagatcctgcccggtcggcagtttagggtcgtcgtcttatcaaccgtgcacacttgccagagcttgttgagccctggcgcgctggcaccagaatttttcacagacgcacgtgtattgaatacggttctgacacgggcccagagccaactggtggtggtaggtgacgcggttgcactttgctccttcggcgcttgtggtaagctttgggagagttttatcagagagtgcgtcgaaagacatagcgtctgcccagaaggactttcgatggagcaggtcgagcaaggtgttgcccagagaagaagatggcccccacgtgggacccaggccggagctgccggtaattgggaagctgcccctgaacccgtgggggatctggcagaagaacaggccgccgtagtaaccgccatggtaaaggcagaacccggagacgaggctctgagtcctgctagtcgcgatattaccgccactaccgcacaaacagaagccgccgccgcccccgcaggcgacgccgtgaaggaagacgtcgtgcctggggcttgtgcagcaggagcggccgcggccgcaggcgtggagtcgactgaagcagaggatgccgaggcagacttttggccttgggatggcgagcttaatgccgacgatgctatacttcgggaattgcttgatgaaagccagaaggtgatggttacagtgggcgaggacggactgctggacaccgtagctcggcccgagtctctgcaacaggccagactttacgaaaaccttcctccagctgctctgcgtaagctgctgcacgctgagccagagcgctacagacactgcagtttcgtgccggaaaccttcgaacgagcatcagctattccattagacgacgcatcaagtggcccgatacaagtccggggcagactggactgtgggatggcctttgccggagacgaagtcctggtccagctcctctccggtgacaaagcccccgagggacggctgaggggccgcgtgcttggggtgctgaaaagaaaacggcatgagctggcatttgtttgccggatggacacctgggatcctcgcatcatggtgccaattaatggaagcgtcactaagatattcgtcgccgagcttaaagaccccagtcaggtcccaatctactcactacgcaagggtagactgcagcgcgttggacttgagagactgaccgcggaggcaaggcacagccgacttttctgggtgcagattgtgctgtggcgtcaaggcttttactacccactgggaatcgtgagggaggtgcttcccgaagcctccacctgggaacaggggctgagaatcctaggcctcgaatatagtctgcgagttccacccagcgatcaggccaccatcacgaaggtgttacagaaataccacaccgaactcggcagagttgccggaagacgggaagattgtcgtgcgtttctgactttcacagtcgacccacagggagcctgcaatctggacgacgccctctcagtgcgcgacctgggcccccggtgcgaggtagccgtgcacatcactgatgtggcttctttcgtgccccgagatggagtgctggacgtggaggcccgacgccagggcgcagccttctacgccccagggagggaacccgtgccaatgctccccgcaagcttgtgtcaggacgtgctatccttgcttccaggccgcgaccgactcgcaatttctctgtttttaacaatggagaaagcctccgggcaactgaagagcttaagattcgcgccctcggtggttcagtctgaccgacaactcagctatgaagaggcggaggaggtgatccgtcagcacccaggagcaggtcgcgagctgccagccaggctggactccgtagacgcatgcgtagtggccgcgtgctacttctccagactcttgcgccgtcaccgcctgcggtctgattgcttctatgaacaacctgatgaggacggcacacttgggtttcgagcggctcatatcatggttaaagagtatatgattcagttcaaccgactcgtggcagaattcttggtgggttcggaatgtactaggacggtgacaccgctcagatggcagcccgctccccgctctcagcaacttaaagcactgtgcgagaagcatggcgaccgggtgccactgtcactacacctaggccaccacttgcatggaggaggaggaagcccccccgacaccagactccacctgctggcttctctgtggaaacaggttcagttcgctgctcgtactcaggactacgaacagatggtggacctggtgacaaccgatgacatgcacccattccttgcacctgctggtagggacttgagaaaggcacttgaacggtctgcatttggacggtgtgctcgggggcatcaacagcagggaggacactacagtcttcaggtggactggtacacctgggcaaccagtcctattcggagatatttggacgtggtgctgcaacgacagattttgctcgcccttgggcatgggggtagcgcgtatagcgctagggacatagacgggctgtgccaggccttcagcctgcaacacgccctcgcccagagttaccaaagacgagctcgatctctgcacctggccgtgcagctgaaggcccagccccttgataagttagggttcgtggttgacgtggaggcgggaagcagatgtttcaggctattatttccatcgaatagagaaacgttgccagatccatgccccgtcccctacgggtcacttcaacttgctgagcatccgcacgctctggccggcagaccaggcctgcgtctcctgtggcgccgacgcgtgtacagtgcccaaggcagttccccccccctcccactgcctgggaccgtgccagatccccacaccctagcagttgaaactgccctttggaaacaactattggagctggtggagctccaaagatggcccgaggctgctgcactcattcaggaaaaaggggaagcctctcaacgcagagagctggtgcaagtgcaacgcagtcattgcggtcacttcctcgaagtggctcgggaactaggctccggagatactctgcaggtgcagctgggtacgtctctgcaacacggcttcctggtgccatctcctcaactctggaccgtggctccaggatttagcttgtgcctagagcacgttgagcggccgggtgattgtttttcagggagagtgtacagggcgccacgcgatagatacagagatgtcgacgaatatgcatgcgtatgggagcctttctgtgctttagagagcgccacaggcgccgttgccgagaatgactctgtgactcttcagcatctctccgtgtcttgggaagcctcccggacaccgcagggccagctccagggtgcctttcgcctggaagctgcctttctggaagagaactgcgccgacattaacttctcctgttgctacctctgcattcggctggaagggctgcccgcccctacagcctcacctcgaccgggacccagttctttggggccggggctgaatgtcgatcccggcacttacacctgggtcgcacatggacaaacgcaagattgggaccaggagcggcgcgctgacaggcaggaagcgccacgcagggtgcatctgttcgtgcaccacatgggaatggagaaagtgccagaagaagtgttgaggcccggaaccctgtttacggtcgagttactccctaaacagctgcccgatctaaggaaagaagaagccgtgcgaggtctcgaggaagcaagtcccctggtcacttctattgcgctgggtcgtcctgtacctcagccgctctgccgagtgatcccctcaagatttctcgagagacagacatacaacattcctggtgggagacacaagctaaaccctagccagaacgtcgctgtgcgtgaggcattggagaaaccctttaccgtgatccaggggccaccaggaacgggcaaaaccattgttgggctgcatatagtgttttggttccacaaatctaatcaggagcaggttcagcccggcggacctcctaggggtgagaagcggctgggcggcccctgcattctctactgcgggccatccaataagagtgtggatgtgctggctgggctgttgctgcggaggatggaattgaagccccttagagtctatagcgaacaggccgaggcctcggaattccccgtcccccgtgtaggctcaagaaaattgttacgaaaaagtccgcgggaagggagacccaatcaatcacttagatctatcacactccaccatcgcattaggcaggctcccaacccctatagttccgagatcaaagctttcgacacccggttgcagcgaggagagctcttcagccgggaagatctggtgtggtataaaaaggtattgtgggaggcgaggaaattcgaactggaccgacatgaggttatactatgcacctgcagttgtgccgcgtctgctagcctgaaaatcctagatgtgcgccagatccttgtggatgaggccggcatggccacggaaccagagacgctcatcccccttgtccaatttccacaggctgagaaagtggtgcttctcggggatcacaaacaattgcgtccggtcgttaaaaacgagagactccagaatctcggtctagacagatccctgtttgaacgatatcatgaggacgcccatatgcttgacacacagtataggatgcatgaagggatttgcgcttttccatccgtagcgttttataagtcaaagctcaagacttggcagggcttgaggagacctccaagcgtgctgggacatgcgggtaaagagagttgccccgtcatcttcgggcacgtgcagggccatgagagatcactgctggtaagcacggacgaaggtaacgaaaactcaaaggccaatctcgaggaggtggccgaagtggttagaatcaccaagcaactgactctgggccggactgtggagccccaggatattgccgtcctgaccccatataatgctcaggcttctgaaatatccaaagctctgagaagagagggtatagcaggggttgctgtctcatctatcaccaagtcacagggatccgagtggcgatacgtgctagtctccacagtgaggacgtgtgcgaagagcgaccttgaccagcgcccgacgaagtcatggctgaagaaatttctggggttcgtcgtggatcccaatcaagtgaacgtggcagtgacccgagctcaggaaggactgtgtctgatcggcgaccacctgctgcttagatgttgtcctctgtggaggtctctgctggatttttgtgaggctcagcagaccttggttcccgcaggccaggtgcgcgtttgtcggcggccaacaatgccttcgtag

SEQ ID NO: 228551 - DNA, 6242 bp, Artificial Sequence
  derived and/or modified sequence
atgtctagcagtccttcccgctccgccgcagacatttatatcagggagtatttccacagccatgtcagcggaggccaccctgaagccacgcccttgcgagttatgtacacagaccgcccactgtctcagactgaccccgtgacacttcagtattgctgtttgaccgacgaccgacaggccttcagacccccaacccgcgcagagcttgctagacatcgtgttgtcgtcacaaccacatctcaggctcgggagctgcgcgtgcccgtcggtttctttagccatatcttgattgatgaggccgctcagatgcttgagtgtgaagccctgactccactggcgtacgcgagtcatgggactcggcttgttctcgccggagatcatatgcaggtcacccccagactgtttagtgtggcgcgagctagggccgcagaacacaccttattacaccgcctcttcctgtgctatcagcaggaaactcacgaggtggctcgacaaagtaggctggtattccacgagaattatagatgtaccgacgctattgtctccttcatctcgcggcatttctacgtcgcaaaggggaatccaattcacgctcgcggtaaagtaccgccacatcccagacactaccctctcatgttctgccacgtggccggttcgcctgaccgggatatgagcatggctagttggcttaaccttgctgagatcgctcaagtcgtcgagaaggtccaggaagcttataacacgtggcccagttgttggggagggagggagcagcggtgcatctgcgtggtctctcacggggctcaagtgtccgcattgagacaggaactgcggaggcgggatcttggacaggtgtctgtgggttcattcgagatcctgccgggacgccagtttcgcgtggtggtgctctccaccgtgcacacctgtcagtctctactgagtcccggagcccttgcccctgagttctttactgacgcgagagttctgaacaccgtcttgacccgggcacagtcacaactggtggtcgtcggcgatgcagttgccctgtgctccttcggcgcttgtggcaagctctgggagtcctttatccgagagtgtgtggaacggcactccgtttgccccgaagggctgagtatggagcaggtcgaacagggagtagcccagagacgaagatggcctccccgtggaacacaagcaggggctgcaggtaactgggaggccgcacccgagccagtgggcgaccttgcggaggagcaggccgctgtcgtgaccgcaatggttaaggcagagcctggggacgaagcattgtcacccgcttctagggacattaccgccacaactgctcaaactgaggctgcggctgcccctgccggtgatgccgtcaaagaagacgttgtgcctggggcttgcgcggctggcgcagctgctgccgctggcgttgagtcaaccgaggccgaggacgcagaggcggacttctggccttgggatggcgaactaaacgcagacgacgccatactgcgagagctccttgacgaatcccaaaaagtgatggttaccgtcggtgaggacggtttgctggacacggttgctcgcccagagtctttgcaacaagcgcgtctttacgagaacttaccacccgcagccctgcgaaaactgctccacgctgaaccagagcgttaccggcactgtagctttgtcccggagacattcgagcgggctagtgccatccccctcgacgacgccagctccggtcctatccaggtgcgtgggcgacttgattgtggcatggcttttgccggagatgaagtcctcgtgcagctgctgtccggggacaaggcacccgaggggagactgcggggtcgagttcttggagtgctgaaaaggaaacgtcacgagcttgcattcgtgtgtcggatggacacctgggacccccgaataatggtgcccatcaatggctctgtgacaaagatttttgtcgctgagcttaaagatccaagccaggtgcccatatatagcctccgcaaggggcgactccagagagtcggactcgaaaggctgaccgcggaggcgcgtcactcacgcttattctgggtccagatcgtcttatggcgtcagggattttactatcccctgggaatagtgagggaggttctgccagaggcaagcacctgggagcagggcctgagaatcctggggctggaatattccctgagggttcccccttctgaccaggccacaataacaaaggtgctgcaaaaatatcatacagagcttggccgagtggctggaagacgtgaggattgtcgggcatttctgaccttcacagtggatccccagggggcttgtaatctggacgacgccttatctgtgagggatctgggaccaagatgcgaggtggccgtgcacatcactgacgtggcttcctttgttcctcgagatggcgtcttagacgtcgaggcgcgaagacagggcgcagctttttatgcgcctgggcgagaacccgtaccaatgctgccagcctcactgtgccaggacgtgttgtcacttcttccgggaagggaccgattagccatcagcctgtttctcacgatggaaaaagcttcaggccagttgaaaagcttgagatttgccccatctgtggttcagtccgatcggcaactctcttatgaagaagctgaggaggttatcagacaacaccctggtgcaggccgagagttgccagctcggcttgattccgtagacgcttgcgtggtggccgcttgctatttttctagattgctgcgtaggcaccggctcaggtctgattgtttctatgagcagcctgacgaagacggaactcttggattcagagctgcacacattatggtcaaggagtacatgattcagttcaacagattggttgcagagtttctggtcggatctgagtgtacccgtactgtaactcccctgcgctggcagcccgcacctagatcacagcagctcaaggcactgtgtgaaaaacacggtgacagagttcccctatctctccacctcggacatcatctgcatgggggtggaggttcaccacctgatactagattacacctgttggcctccttgtggaaacaagttcagttcgcagccagaacacaggactacgagcagatggtcgacctggtgactactgatgacatgcacccattcctcgcccctgctggtagagacctgaggaaagctctagagcgctctgctttcgggaggtgtgccaggggtcatcagcaacaaggcggacactattccttgcaggtggactggtacacctgggccacatctccgatcaggcgatatcttgatgttgttctccaacgccagatcttacttgccctgggccatggcggttccgcttactccgcaagagacatagatggactgtgtcaggcattcagtctgcagcacgcattggctcaatcctaccagagaagagcaaggagccttcacctagcggtgcagctgaaggcccaacccctggacaagctgggattcgtggtcgacgttgaagcaggaagtcgctgctttcgcctgcttttccccagcaaccgagagactcttcccgacccttgtcccgtcccgtatgggagtcttcagttggccgaacatcctcacgctcttgctgggagacctggtctccgcctgctgtggcgacggagagtgtactccgcccaaggatcctccccgccactgccactgccgggtaccgtgcccgatcctcacaccctcgccgtggaaacggcgctttggaagcagctgttagaactggtcgagctccagcggtggcctgaggccgctgctctcatccaagaaaagggcgaggcatcccaaagaagggaactcgtgcaggtgcaaaggagtcattgtggacatttcctagaagtggcccgagagctgggtagcggagacactttgcaggtgcagcttggcacatccctgcaacatggatttctggtgcccagtccacaattgtggacggtcgcgccaggcttttccttatgtttggagcacgtggagcgccctggcgactgcttcagcggcagagtgtatagggcccctcgagaccgctacagggacgtggatgaatatgcctgtgtctgggagcccttttgcgcattggagtcagctacaggagcagtcgcagaaaacgacagcgtaacccttcaacacctgagcgtttcttgggaggcttcaaggactccccagggacagctgcagggggcttttcgccttgaagctgctttcctggaagaaaactgtgccgatattaatttttcctgttgctacctttgtatcaggctggagggcctgcccgctcccacagccagcccacgacccggtccttcctctctggggccagggctgaatgtcgaccccggtacatatacgtgggtagcacatgggcaaactcaagattgggatcaggagcggagagcggacagacaagaggctccacggagggtccacctattcgtgcatcatatgggcatggaaaaagtcccagaagaggtgctcaggcccggtacactttttaccgttgaacttctccctaaacaacttccagatctgagaaaggaggaggccgtcagagggctggaggaagcttctcccctcgtcacgagcattgcgctgggccgacccgtgccgcaaccgctctgccgcgttattcccagcaggtttctggaaaggcagacgtataatataccgggagggagacataaactgaatccctcccagaacgtagcagtcagagaggcccttgaaaagccctttaccgtcatccaagggcctccaggcaccgggaaaactattgtgggactgcacatagtcttctggtttcacaaaagcaaccaggagcaggtgcagcccggagggcctccaagaggtgagaagcgcctcggcggtccctgcatcttgtattgcggtccaagcaataaaagcgttgatgttctggccggtctgctattgcgacgtatggagctcaaacctctgcgggtatatagtgagcaggccgaggctagcgagttccccgtccctcgcgtcggtagtcggaagctcctaaggaaatctccacgcgaggggcgacccaatcagagcctgcgatccataacacttcatcatcgcataagacaggcaccaaatccatacagctccgaaatcaaggccttcgacacacggctccagaggggcgagctttttagtagagaagacctggtttggtacaaaaaagtgctctgggaggccaggaagtttgagctagaccgccacgaggttatcctttgtacttgtagctgtgcggcttccgctagcctcaaaatccttgacgtaaggcagatcctggttgatgaggctgggatggcaactgaaccagagaccctaattcccttagtgcagtttccccaggctgagaaggtcgtacttttgggggaccataaacaattgcgacctgtcgtgaagaatgagcgcctccaaaatcttggcttagacagatctctcttcgagcgatatcatgaagatgctcatatgctggatacacagtatcggatgcacgaggggatttgcgccttcccctctgtcgcgttctataagtccaaactgaaaacctggcaagggcttcgaagacccccatccgttctggggcatgccggtaaagagagttgcccagtgatattcggtcatgtgcaaggacatgagagaagtttgctcgtgtcaacagacgaggggaacgagaactcaaaggccaatctggaggaggtggccgaagtcgtcaggataacaaaacagctgaccctggggagaaccgtcgagccacaggatatcgcagtgctgacgccatataacgctcaggcatccgagatctccaaagctctgcgtagggaagggatcgccggtgttgccgtcagttctatcaccaagagtcagggttcagagtggagatatgtgctggttagtactgtgagaacttgtgcaaagagcgacctggatcagcggccaaccaagagttggcttaaaaaattcctggggttcgtcgttgatcctaaccaggttaatgttgcagtgacccgggcacaagaggggctttgtttgattggagaccacctcctgctgcgttgttgtcctctatggaggtctctcctcgacttctgcgaggcgcagcagacactggtcccagcgggacaggtacgggtgtgccggaggccaaccatgccatctta

SEQ ID NO: 228552 - DNA, 6243 bp, Artificial Sequence
  derived and/or modified sequence
atgagcagcagccccagcagaagcgccgccgacatctacatcagagagtacttccacagccacgtgagcggcggccaccccgaggccacccccctgagagtgatgtacaccgacagacccctgagccagaccgaccccgtgaccctgcagtactgctgcctgaccgacgacagacaggccttcagaccccccaccagagccgagctggccagacacagagtggtggtgaccaccaccagccaggccagagagctgagagtgcccgtgggcttcttcagccacatcctgatcgacgaggccgcccagatgctggagtgcgaggccctgacccccctggcctacgccagccacggcaccagactggtgctggccggcgaccacatgcaggtgacccccagactgttcagcgtggccagagccagagccgccgagcacaccctgctgcacagactgttcctgtgctaccagcaggagacccacgaggtggccagacagagcagactggtgttccacgagaactacagatgcaccgacgccatcgtgagcttcatcagcagacacttctacgtggccaagggcaaccccatccacgccagaggcaaggtgcccccccaccccagacactaccccctgatgttctgccacgtggccggcagccccgacagagacatgagcatggccagctggctgaacctggccgagatcgcccaggtggtggagaaggtgcaggaggcctacaacacctggcccagctgctggggcggcagagagcagagatgcatctgcgtggtgagccacggcgcccaggtgagcgccctgagacaggagctgagaagaagagacctgggccaggtgagcgtgggcagcttcgagatcctgcccggcagacagttcagagtggtggtgctgagcaccgtgcacacctgccagagcctgctgagccccggcgccctggcccccgagttcttcaccgacgccagagtgctgaacaccgtgctgaccagagcccagagccagctggtggtggtgggcgacgccgtggccctgtgcagcttcggcgcctgcggcaagctgtgggagagcttcatcagagagtgcgtggagagacacagcgtgtgccccgagggcctgagcatggagcaggtggagcagggcgtggcccagagaagaagatggccccccagaggcacccaggccggcgccgccggcaactgggaggccgcccccgagcccgtgggcgacctggccgaggagcaggccgccgtggtgaccgccatggtgaaggccgagcccggcgacgaggccctgagccccgccagcagagacatcaccgccaccaccgcccagaccgaggccgccgccgcccccgccggcgacgccgtgaaggaggacgtggtgcccggcgcctgcgccgccggcgccgccgccgccgccggcgtggagagcaccgaggccgaggacgccgaggccgacttctggccctgggacggcgagctgaacgccgacgacgccatcctgagagagctgctggacgagagccagaaggtgatggtgaccgtgggcgaggacggcctgctggacaccgtggccagacccgagagcctgcagcaggccagactgtacgagaacctgccccccgccgccctgagaaagctgctgcacgccgagcccgagagatacagacactgcagcttcgtgcccgagaccttcgagagagccagcgccatccccctggacgacgccagcagcggccccatccaggtgagaggcagactggactgcggcatggccttcgccggcgacgaggtgctggtgcagctgctgagcggcgacaaggcccccgagggcagactgagaggcagagtgctgggcgtgctgaagagaaagagacacgagctggccttcgtgtgcagaatggacacctgggaccccagaatcatggtgcccatcaacggcagcgtgaccaagatcttcgtggccgagctgaaggaccccagccaggtgcccatctacagcctgagaaagggcagactgcagagagtgggcctggagagactgaccgccgaggccagacacagcagactgttctgggtgcagatcgtgctgtggagacagggcttctactaccccctgggcatcgtgagagaggtgctgcccgaggccagcacctgggagcagggcctgagaatcctgggcctggagtacagcctgagagtgccccccagcgaccaggccaccatcaccaaggtgctgcagaagtaccacaccgagctgggcagagtggccggcagaagagaggactgcagagccttcctgaccttcaccgtggacccccagggcgcctgcaacctggacgacgccctgagcgtgagagacctgggccccagatgcgaggtggccgtgcacatcaccgacgtggccagcttcgtgcccagagacggcgtgctggacgtggaggccagaagacagggcgccgccttctacgcccccggcagagagcccgtgcccatgctgcccgccagcctgtgccaggacgtgctgagcctgctgcccggcagagacagactggccatcagcctgttcctgaccatggagaaggccagcggccagctgaagagcctgagattcgcccccagcgtggtgcagagcgacagacagctgagctacgaggaggccgaggaggtgatcagacagcaccccggcgccggcagagagctgcccgccagactggacagcgtggacgcctgcgtggtggccgcctgctacttcagcagactgctgagaagacacagactgagaagcgactgcttctacgagcagcccgacgaggacggcaccctgggcttcagagccgcccacatcatggtgaaggagtacatgatccagttcaacagactggtggccgagttcctggtgggcagcgagtgcaccagaaccgtgacccccctgagatggcagcccgcccccagaagccagcagctgaaggccctgtgcgagaagcacggcgacagagtgcccctgagcctgcacctgggccaccacctgcacggcggcggcggcagcccccccgacaccagactgcacctgctggccagcctgtggaagcaggtgcagttcgccgccagaacccaggactacgagcagatggtggacctggtgaccaccgacgacatgcaccccttcctggcccccgccggcagagacctgagaaaggccctggagagaagcgccttcggcagatgcgccagaggccaccagcagcagggcggccactacagcctgcaggtggactggtacacctgggccaccagccccatcagaagatacctggacgtggtgctgcagagacagatcctgctggccctgggccacggcggcagcgcctacagcgccagagacatcgacggcctgtgccaggccttcagcctgcagcacgccctggcccagagctaccagagaagagccagaagcctgcacctggccgtgcagctgaaggcccagcccctggacaagctgggcttcgtggtggacgtggaggccggcagcagatgcttcagactgctgttccccagcaacagagagaccctgcccgacccctgccccgtgccctacggcagcctgcagctggccgagcacccccacgccctggccggcagacccggcctgagactgctgtggagaagaagagtgtacagcgcccagggcagcagcccccccctgcccctgcccggcaccgtgcccgacccccacaccctggccgtggagaccgccctgtggaagcagctgctggagctggtggagctgcagagatggcccgaggccgccgccctgatccaggagaagggcgaggccagccagagaagagagctggtgcaggtgcagagaagccactgcggccacttcctggaggtggccagagagctgggcagcggcgacaccctgcaggtgcagctgggcaccagcctgcagcacggcttcctggtgcccagcccccagctgtggaccgtggcccccggcttcagcctgtgcctggagcacgtggagagacccggcgactgcttcagcggcagagtgtacagagcccccagagacagatacagagacgtggacgagtacgcctgcgtgtgggagcccttctgcgccctggagagcgccaccggcgccgtggccgagaacgacagcgtgaccctgcagcacctgagcgtgagctgggaggccagcagaaccccccagggccagctgcagggcgccttcagactggaggccgccttcctggaggagaactgcgccgacatcaacttcagctgctgctacctgtgcatcagactggagggcctgcccgcccccaccgccagccccagacccggccccagcagcctgggccccggcctgaacgtggaccccggcacctacacctgggtggcccacggccagacccaggactgggaccaggagagaagagccgacagacaggaggcccccagaagagtgcacctgttcgtgcaccacatgggcatggagaaggtgcccgaggaggtgctgagacccggcaccctgttcaccgtggagctgctgcccaagcagctgcccgacctgagaaaggaggaggccgtgagaggcctggaggaggccagccccctggtgaccagcatcgccctgggcagacccgtgccccagcccctgtgcagagtgatccccagcagattcctggagagacagacctacaacatccccggcggcagacacaagctgaaccccagccagaacgtggccgtgagagaggccctggagaagcccttcaccgtgatccagggcccccccggcaccggcaagaccatcgtgggcctgcacatcgtgttctggttccacaagagcaaccaggagcaggtgcagcccggcggcccccccagaggcgagaagagactgggcggcccctgcatcctgtactgcggccccagcaacaagagcgtggacgtgctggccggcctgctgctgagaagaatggagctgaagcccctgagagtgtacagcgagcaggccgaggccagcgagttccccgtgcccagagtgggcagcagaaagctgctgagaaagagccccagagagggcagacccaaccagagcctgagaagcatcaccctgcaccacagaatcagacaggcccccaacccctacagcagcgagatcaaggccttcgacaccagactgcagagaggcgagctgttcagcagagaggacctggtgtggtacaagaaggtgctgtgggaggccagaaagttcgagctggacagacacgaggtgatcctgtgcacctgcagctgcgccgccagcgccagcctgaagatcctggacgtgagacagatcctggtggacgaggccggcatggccaccgagcccgagaccctgatccccctggtgcagttcccccaggccgagaaggtggtgctgctgggcgaccacaagcagctgagacccgtggtgaagaacgagagactgcagaacctgggcctggacagaagcctgttcgagagataccacgaggacgcccacatgctggacacccagtacagaatgcacgagggcatctgcgccttccccagcgtggccttctacaagagcaagctgaagacctggcagggcctgagaagaccccccagcgtgctgggccacgccggcaaggagagctgccccgtgatcttcggccacgtgcagggccacgagagaagcctgctggtgagcaccgacgagggcaacgagaacagcaaggccaacctggaggaggtggccgaggtggtgagaatcaccaagcagctgaccctgggcagaaccgtggagccccaggacatcgccgtgctgaccccctacaacgcccaggccagcgagatcagcaaggccctgagaagagagggcatcgccggcgtggccgtgagcagcatcaccaagagccagggcagcgagtggagatacgtgctggtgagcaccgtgagaacctgcgccaagagcgacctggaccagagacccaccaagagctggctgaagaagttcctgggcttcgtggtggaccccaaccaggtgaacgtggccgtgaccagagcccaggagggcctgtgcctgatcggcgaccacctgctgctgagatgctgccccctgtggagaagcctgctggacttctgcgaggcccagcagaccctggtgcccgccggccaggtgagagtgtgcagaagacccaccatgcccagctag

SEQ ID NO: 228553 - protein, 172 aa, Artificial Sequence
  derived and/or modified sequence
METETAPLTLESLPTDPLLLILSFLDYRDLINCCYVSRRLSQLSSHDPLWRRHCKKYWLISEEEKTQKNQCWKSLFIDTYSDVGRYIDHYAAIKKAGMISRNIWSPGVLGWFVSINRGCSRGRPRCCGSADWCKLPDDYRCSYRIHNGQKLVVPGSYWEAWHCLITIVLKIC

SEQ ID NO: 228554 - protein, 415 aa, Artificial Sequence
  derived and/or modified sequence
MAAMETETAPLTLESLPTDPLLLILSFLDYRDLINCCYVSRRLSQLSSHDPLWRRHCKKYWLISEEEKTQKNQCWKSLFIDTYSDVGRYIDHYAAIKKAWDDLKKYLEPRCPRMVLSLKEGAREEDLDAVEAQIGCKLPDDYRCSYRIHNGQKLVVPGLLGSMALSNHYRSEDLLDVDTAAGGFQQRQGLKYCLPLTFCIHTGLSQYIAVEAAEGRNKNEVFYQCPDQMARNPAAIDMFIIGATFTDWFTSYVKNVVSGGFPIIRDQIFRYVHDPECVATTGDITVSVSTSFLPELSSVHPPHYFFTYRIRIEMSKDALPEKACQLDSRYWRITNAKGDVEEVQGPGVVGEFPIISPGRVYEYTSCTTFSTTSGYMEGYYTFHFLYFKDKIFNVAIPRFHMACPTFRVSIARLVS

SEQ ID NO: 228555 - DNA, 1672 bp, Artificial Sequence
  derived and/or modified sequence
aggggcggggccagggcggggccagacctgcaccgggccaggcaagatggcggccatggagaccgagacggcgccgctgaccctagagtcgctgcccaccgatcccctgctcctcatcttatcctttttggactatcgggatctaatcaactgttgttatgtcagtcgaagacttagccagctatcaagtcatgatccgctgtggagaagacattgcaaaaaatactggctgatatctgaggaagagaaaacacagaagaatcagtgttggaaatctctcttcatagatacttactctgatgtaggaagatacattgaccattatgctgctattaaaaaggcctgggatgatctcaagaaatatttggagcccaggtgtcctcggatggttttatctctgaaagagggtgctcgagaggaagacctcgatgctgtggaagcgcagattggctgcaagcttcctgacgattatcgatgttcataccgaattcacaatggacagaagttagtggttcctgggttattgggaagcatggcactgtctaatcactatcgttctgaagatttgttagacgtcgatacagctgccggaggattccagcagagacagggactgaaatactgtctccctttaactttttgcatacatactggtttgagtcagtacatagcagtggaagctgcagagggccgaaacaaaaatgaagttttctaccaatgtccagaccaaatggctcgaaatccagctgctattgacatgtttattataggtgctacttttactgactggtttacctcttatgtcaaaaatgttgtatcaggtggcttccccatcatcagagaccaaattttcagatatgttcacgatccagaatgtgtagcaacaactggggatattactgtgtcagtttccacatcgtttctgccagaacttagctctgtacatccaccccactatttcttcacataccgaatcaggattgaaatgtcaaaagatgcacttcctgagaaggcctgtcagttggacagtcgctattggagaataacaaatgctaagggtgacgtggaagaagttcaaggacctggagtagttggtgaatttccaatcatcagcccaggtcgggtatatgaatacacaagctgtaccacattctctacaacatcaggatacatggaaggatattataccttccattttctttactttaaagacaagatctttaatgttgccattccccgattccatatggcatgtccaacattcagggtgtctatagcccgattggtaagttaaattttcctctagtgctgatttacatgactttgtagggttaacactgcagataagccaggcaaatagttagtttataaatagtgttccagagaaccctagagattttgagaaagtatcttgggggtcatgtgaatttgttgagagaaatggacaagtaaatgaggctccatagtctctaaccagagaatttctgctgttttaaagattcaacttgtttttcactgttcagtggcctaaatgtagattatgagaaataccacattagaccagtagaatcagctttaagactgggaaaacaacttcttacagtgtttttgctcaaacttccaatttaatgtcaaataaacaaatattccataaagatcattataaagaaaa

SEQ ID NO: 228556 - DNA, 519 bp, Artificial Sequence
  derived and/or modified sequence
atggagaccgagaccgcccccctcaccctggagagccttccgaccgatcctttgttgttaatcttaagttttctggattacagagacctgattaattgctgttacgtcagtagacgcttgtcccagctttcatcccatgacccactgtggcgacgtcattgcaaaaagtattggctaatctcggaggaggaaaaaacgcagaagaatcagtgttggaagagcctcttcatcgatacgtactcggatgtggggcggtacattgatcactatgccgcaatcaaaaaagcagggatgattagcagaaacatatggtcaccaggagtcctcggctggttcgtgtccattaatagaggctgtagcagaggtagacctaggtgttgtggctctgcggactggtgtaagttgcccgacgattatagatgtagctatcgaattcacaacgggcaaaaactggtggtgcccggctcctactgggaagcatggcactgtttaattacaatcgtcctgaagatctgttag

SEQ ID NO: 228557 - DNA, 1248 bp, Artificial Sequence
  derived and/or modified sequence
atggccgcaatggagacagagaccgctcctctgacgctggaaagtctacccacggacccgctgcttctgattctgtcgttcctggactatagagacctgattaattgttgttacgtgtccagaaggctttcacagcttagctcccatgacccactttggagacgccactgcaaaaagtactggttgatctctgaggaggagaagacccagaaaaaccaatgttggaagtccttatttattgatacttacagcgacgttggccgatacattgatcactacgccgccattaaaaaagcatgggatgacctgaagaaatacctggaacctagatgcccccgtatggtgttgagtctcaaagagggggcccgggaagaagatctagacgcggtcgaggcccagataggctgcaagctccccgacgattataggtgtagctatcgcattcataatggacaaaagctggttgtgcccggcttgctgggctccatggctctcagcaaccactacaggagtgaggacctgctggacgttgatactgccgcaggtggcttccagcaaaggcagggactgaagtattgcctgccacttaccttctgtatccatacagggctgagtcagtatattgctgtggaagccgctgagggacgcaataagaacgaagtgttttaccagtgtcctgatcaaatggctcgaaaccctgccgctatcgatatgtttatcataggggcaacgttcacagattggtttacgtcatatgtcaagaatgtggtttccgggggattccctatcatccgcgaccagatattcaggtatgtgcacgacccggagtgcgttgctaccaccggagacatcaccgtgagcgtctcgacctcgtttctccccgagctgtcatcagtccaccctccacactatttttttacatatcggatccggatcgagatgtccaaggacgcgttgccagaaaaagcctgccagctggactcacggtactggagaatcacaaacgccaaaggcgatgtggaggaggtgcagggccctggcgtcgtaggcgaattccccatcatcagccccggaagggtgtatgaatatacgtcctgcacaacctttagcaccaccagcggctatatggaaggttactacacgttccacttcctgtactttaaagacaaaatatttaacgtggctataccacgattccatatggcctgtcccacattccgcgtttcgattgcacgcctggtgtcctag

SEQ ID NO: 228558 - DNA, 519 bp, Artificial Sequence
  derived and/or modified sequence
atggagacagaaacagcccccctgaccctggagagcctgcccacagaccccctgctgctgatcctgtccttcctggactacagagacctgatcaactgctgctacgtgtcccggcggctgagccagctgagcagccatgaccccctgtggaggaggcactgcaagaagtactggctgatcagcgaggaggagaagacccagaagaaccagtgctggaagagcctcttcatcgacacctacagtgatgtgggccgctacatcgaccactatgctgccatcaagaaggccggcatgatcagcaggaacatctggagccctggggtgctgggctggtttgtgtccatcaacagaggctgcagccggggccggccccgctgctgcggcagcgctgactggtgcaagctgcctgatgactaccgctgcagctaccgcatccacaacggccagaagctggtggtgcccggcagctactgggaggcctggcactgcctgatcaccatcgtgctgaagatctgctag

SEQ ID NO: 228559 - DNA, 1248 bp, Artificial Sequence
  derived and/or modified sequence
atggccgccatggagacagaaacagcccccctgaccctggagagcctgcccacagaccccctgctgctgatcctgtccttcctggactacagagacctgatcaactgctgctacgtgtcccggcggctgagccagctgagcagccatgaccccctgtggaggaggcactgcaagaagtactggctgatcagcgaggaggagaagacccagaagaaccagtgctggaagagcctcttcatcgacacctacagtgatgtgggccgctacatcgaccactacgccgccatcaagaaggcctgggatgacctgaagaagtacctggagccccgctgccccaggatggtgctgagcctgaaggagggcgcccgggaggaggacctggatgctgtggaggcccagatcggctgcaagctgcctgatgactaccgctgcagctaccgcatccacaacggccagaagctggtggtgcccggcctgctgggctccatggccctgagcaaccactacagaagtgaggacctgctggatgtggacacagctgctgggggcttccagcagaggcagggcctgaagtactgcctgcccctgaccttctgcatccacacaggcctgagccagtacatcgctgtggaggccgctgagggcaggaacaagaatgaggtgttctaccagtgcccagaccagatggccagaaatcctgctgccatcgacatgttcatcattggagccaccttcacagactggttcaccagctatgtgaagaatgtggtgtctgggggcttccccatcatccgggaccagatcttccgctacgtgcatgaccctgaatgtgtggccaccactggagacatcaccgtgtctgtgtccaccagcttcctgcctgagctgagctctgtgcaccccccccactacttcttcacctaccgcatccgcatcgagatgagcaaggatgccctgcctgagaaggcctgccagctggacagccgctactggaggatcaccaatgccaagggagatgtggaggaggtgcagggccctggggtggtgggggagttccccatcatcagccctggccgggtgtatgagtacaccagctgcaccaccttcagcaccaccagcggctacatggagggctactacaccttccacttcctgtacttcaaggacaagatcttcaacgtggccatcccccgcttccacatggcctgccccaccttccgggtgtccatcgcccggctggtgtcctag

SEQ ID NO: 228560 - DNA, 519 bp, Artificial Sequence
  derived and/or modified sequence
atggagaccgagaccgcccccctgaccctggagagcctgcccaccgaccccctgcttctcattttatcatttctggactaccgggatctgatcaactgctgttatgtgagccggaggctctcacagctttcatcacatgacccactgtggcgccggcattgcaaaaaatattggttgatttctgaggaggagaaaacccagaagaaccaatgctggaaaagtctgttcatcgacacttactcggacgtgggccgttacattgaccactatgctgctataaagaaggccggcatgatatcaagaaacatctggagccctggcgtcctcggctggttcgtgtccattaaccgaggttgctccaggggtcggccaagatgctgcggaagcgcagattggtgcaaattacctgatgactatcgatgcagttaccggatccataacggtcaaaaactggtggtccccgggagctactgggaggcatggcattgcctgatcaccattgtgctgaagatatgttag

SEQ ID NO: 228561 - DNA, 1248 bp, Artificial Sequence
  derived and/or modified sequence
atggccgccatggagaccgagaccgcccccctgaccctggagagcctgccaaccgaccctttactgctcattcttagtttcctcgattacagggatctgataaattgctgttacgtgagccggagacttagccagttgtctagtcacgacccgctttggcgcagacactgtaaaaaatattggttaatctccgaggaggagaagacacagaaaaatcaatgttggaagtcacttttcatcgatacgtacagcgacgttgggagatatatcgatcactatgccgccatcaagaaagcttgggatgatctaaagaaatatcttgaacctcggtgcccacgcatggtcctatcgttgaaggagggcgctcgagaagaggacctggatgctgtggaagcacagatcgggtgcaagttacccgatgattaccggtgctcttatcgcatacacaatggccagaaactcgtcgtgcccgggttgctcgggtctatggctctgtcgaaccactacagatcggaggacctgctagacgtggatacagctgcggggggtttccagcaacgccagggcctaaagtactgtctaccactgaccttttgcatacacactggtttaagtcagtatattgccgtggaggcggcagagggccgaaataaaaacgaagttttttatcagtgcccagatcagatggcgcgtaaccctgctgccatcgatatgtttattattggcgcaactttcaccgactggttcacctcctatgttaaaaatgtggtgagcggcggctttcccataattcgggaccaaatatttcgttacgtgcacgacccggagtgcgtcgcgaccactggtgacattacggtcagcgtgagcaccagcttcctcccggagctcagctcggtacatcctccacactacttttttacctacaggattaggatcgaaatgagcaaagatgccctgccagaaaaggcctgtcagctggacagcagatattggcgcatcaccaatgccaagggggatgtggaggaagtacaggggcctggtgtggtgggcgagtttcccattataagtcctggccgggtgtacgaatacacctcatgcacaacgttctccacaacttcaggatacatggaggggtattatacctttcactttttgtacttcaaggataagatcttcaacgtggccattccccgttttcatatggcttgccccacctttagagtttcaatagcacggctggtttcctag

SEQ ID NO: 228562 - DNA, 519 bp, Artificial Sequence
  derived and/or modified sequence
atggaaaccgagaccgccccactgactctggagtccttacctaccgaccccttgctgctcatcctctcctttttagactatagggatcttatcaactgttgctacgtctcaagaagactgagtcagctgtcatcccacgaccccctgtggaggcggcattgtaagaaatactggcttatttcagaagaggagaagacccaaaagaatcagtgctggaagtctctgttcatagacacctattctgacgtgggccgttacatcgaccattatgccgctatcaagaaggccggtatgatctcaagaaacatctggtcccctggagtcctgggttggtttgtgagcataaaccggggatgctctaggggcaggccacgctgctgtggaagcgccgattggtgcaagctgcccgacgactacaggtgttcttataggatacacaatggacagaagctggtggtacccggatcctactgggaagcttggcattgtctaatcaccatcgtcctgaaaatatgctag

SEQ ID NO: 228563 - DNA, 1248 bp, Artificial Sequence
  derived and/or modified sequence
atggcggctatggaaacggagaccgcccctctaactctggagagtcttcccaccgatcccctactgcttattttgtccttcttggattatagggacctcataaactgttgttacgtatcaaggcgactgtctcaactgtcctcgcacgaccctctgtggcgcaggcactgtaagaagtactggcttatttccgaggaagagaagacccagaagaatcagtgttggaagtcgttgttcatagatacctacagcgatgtcggacgctatatcgaccattacgccgctataaaaaaggcctgggatgatctgaaaaagtacctggagcctaggtgtccaagaatggttctctccctgaaagagggagcacgcgaggaagacctggacgcggtagaagcccagatcggctgtaaactccccgatgactacagatgctcttacaggattcacaatggccagaaactcgtggtgccaggcctgcttggctcaatggcactttcgaaccactacaggagcgaggatcttctggacgttgatacagcagccggtggattccagcagagacaggggctgaaatattgcctcccactgacgttctgcatccatacgggactgtctcagtatattgccgtggaagccgcagaggggaggaacaaaaacgaagtgttctatcagtgtcccgaccaaatggcaaggaatccagccgcaatagacatgttcattattggtgccacattcaccgactggttcacaagttacgttaagaatgtggtttctggcggattccctataattcgtgaccagatatttagatatgtccacgaccccgagtgtgtggctaccactggggatataactgtgagtgtgtcaacatcatttctgcccgagctaagcagcgtgcatccccctcattacttctttacatacagaatccggattgagatgagcaaggacgcactgcctgagaaggcgtgccagttagacagccggtactggcggatcacaaacgcaaaaggcgacgtggaggaggtgcaaggtcccggagtggtaggtgagttcccaattatctcacctggcagggtttatgagtacacatcttgcaccacattctctaccactagtggctacatggaaggttattacactttccacttcctgtatttcaaggataaaatatttaatgtcgcaatcccacggttccatatggcatgccctacttttcgcgtatcaattgccaggttggtgtcctag

SEQ ID NO: 228564 - DNA, 519 bp, Artificial Sequence
  derived and/or modified sequence
atggagaccgagaccgcccccctgaccctggagagcctgcccaccgaccccctgctgctgatcctgagcttcctggactacagagacctgatcaactgctgctacgtgagcagaagactgagccagctgagcagccacgaccccctgtggagaagacactgcaagaagtactggctgatcagcgaggaggagaagacccagaagaaccagtgctggaagagcctgttcatcgacacctacagcgacgtgggcagatacatcgaccactacgccgccatcaagaaggccggcatgatcagcagaaacatctggagccccggcgtgctgggctggttcgtgagcatcaacagaggctgcagcagaggcagacccagatgctgcggcagcgccgactggtgcaagctgcccgacgactacagatgcagctacagaatccacaacggccagaagctggtggtgcccggcagctactgggaggcctggcactgcctgatcaccatcgtgctgaagatctgctag

SEQ ID NO: 228565 - DNA, 1248 bp, Artificial Sequence
  derived and/or modified sequence
atggccgccatggagaccgagaccgcccccctgaccctggagagcctgcccaccgaccccctgctgctgatcctgagcttcctggactacagagacctgatcaactgctgctacgtgagcagaagactgagccagctgagcagccacgaccccctgtggagaagacactgcaagaagtactggctgatcagcgaggaggagaagacccagaagaaccagtgctggaagagcctgttcatcgacacctacagcgacgtgggcagatacatcgaccactacgccgccatcaagaaggcctgggacgacctgaagaagtacctggagcccagatgccccagaatggtgctgagcctgaaggagggcgccagagaggaggacctggacgccgtggaggcccagatcggctgcaagctgcccgacgactacagatgcagctacagaatccacaacggccagaagctggtggtgcccggcctgctgggcagcatggccctgagcaaccactacagaagcgaggacctgctggacgtggacaccgccgccggcggcttccagcagagacagggcctgaagtactgcctgcccctgaccttctgcatccacaccggcctgagccagtacatcgccgtggaggccgccgagggcagaaacaagaacgaggtgttctaccagtgccccgaccagatggccagaaaccccgccgccatcgacatgttcatcatcggcgccaccttcaccgactggttcaccagctacgtgaagaacgtggtgagcggcggcttccccatcatcagagaccagatcttcagatacgtgcacgaccccgagtgcgtggccaccaccggcgacatcaccgtgagcgtgagcaccagcttcctgcccgagctgagcagcgtgcaccccccccactacttcttcacctacagaatcagaatcgagatgagcaaggacgccctgcccgagaaggcctgccagctggacagcagatactggagaatcaccaacgccaagggcgacgtggaggaggtgcagggccccggcgtggtgggcgagttccccatcatcagccccggcagagtgtacgagtacaccagctgcaccaccttcagcaccaccagcggctacatggagggctactacaccttccacttcctgtacttcaaggacaagatcttcaacgtggccatccccagattccacatggcctgccccaccttcagagtgagcatcgccagactggtgagctag

SEQ ID NO: 228566 - protein, 408 aa, Artificial Sequence
  derived and/or modified sequence
MAPPLAPLPPRDPNGAGPEWREPGAVSFADVAVYFCREEWGCLRPAQRALYRDVMRETYGHLSALGIGGNKPALISWVEEEAELWGPAAQDPEVAKCQTQTDPADSRNKKKERQREGTGALEKPDPVAAGSPGLKSPQAPSAGPPYGWEQLSKAPHRGRPSLCAHPPVPRADQRHGCYVCGKSFAWRSTLVEHVYSHTGEKPFHCTDCGKGFGHASSLSKHRAIHRGERPHRCLECGRAFTQRSALTSHLRVHTGEKPYGCADCGRRFSQSSALYQHRRVHSGETPFPCPDCGRAFAYPSDLRRHVRTHTGEKPYPCPDCGRCFRQSSEMAAHRRTHSGEKPYPCPQCGRRFGQKSAVAKHQWVHRPGAGGHRGRVAGRLSVTLTPGHGDLDPPVGFQLYPEIFQECG

SEQ ID NO: 228567 - DNA, 90 bp, Artificial Sequence
  derived and/or modified sequence
taaggcccaaggggcgaaaaaggtgacctgggcgagaagggcgaaaaaggaccagacggacttcccatgcccggatgctggcagaagtag

SEQ ID NO: 228568 - DNA, 1227 bp, Artificial Sequence
  derived and/or modified sequence
atggccccccccctggcccccctgccccccagagaccccaacggcgccggccccgagtggagagagcccggcgccgtgagcttcgccgacgtggccgtgtacttctgcagagaggagtggggctgcctgagacccgcccagagagccctgtacagagacgtgatgagagagacctacggccacctgagcgccctgggcatcggcggcaacaagcccgccctgatcagctgggtggaggaggaggccgagctgtggggccccgccgcccaggaccccgaggtggccaagtgccagacccagaccgaccccgccgacagcagaaacaagaagaaggagagacagagagagggcaccggcgccctggagaagcccgaccccgtggccgccggcagccccggcctgaagagcccccaggcccccagcgccggccccccctacggctgggagcagctgagcaaggccccccacagaggcagacccagcctgtgcgcccacccccccgtgcccagagccgaccagagacacggctgctacgtgtgcggcaagagcttcgcctggagaagcaccctggtggagcacgtgtacagccacaccggcgagaagcccttccactgcaccgactgcggcaagggcttcggccacgccagcagcctgagcaagcacagagccatccacagaggcgagagaccccacagatgcctggagtgcggcagagccttcacccagagaagcgccctgaccagccacctgagagtgcacaccggcgagaagccctacggctgcgccgactgcggcagaagattcagccagagcagcgccctgtaccagcacagaagagtgcacagcggcgagacccccttcccctgccccgactgcggcagagccttcgcctaccccagcgacctgagaagacacgtgagaacccacaccggcgagaagccctacccctgccccgactgcggcagatgcttcagacagagcagcgagatggccgcccacagaagaacccacagcggcgagaagccctacccctgcccccagtgcggcagaagattcggccagaagagcgccgtggccaagcaccagtgggtgcacagacccggcgccggcggccacagaggcagagtggccggcagactgagcgtgaccctgacccccggccacggcgacctggacccccccgtgggcttccagctgtaccccgagatcttccaggagtgcggctag

SEQ ID NO: 228569 - DNA, 1227 bp, Artificial Sequence
  derived and/or modified sequence
atggctccccctctcgccccgctccctccacgcgaccccaatggcgcaggcccggagtggcgcgagcccggcgccgtctcctttgctgacgtggcggtatatttttgcagagaagaatgggggtgtctgaggccagcgcagcgtgctctatacagagatgttatgcgggaaacctatgggcacttaagcgctctcggtatcggcgggaacaagcctgcactgatttcttgggtggaagaggaagccgaactgtggggcccagcagcccaggacccagaagttgcaaagtgtcagacccagaccgaccccgcagacagtcgtaataaaaaaaaggaaaggcagcgcgagggaactggagccttagagaagcctgatccggtcgcagccggctcccccggactgaagtccccccaagcacccagtgccggacctccatatggatgggagcagctgtctaaggctccccacaggggacggccatctctatgcgcccacccccccgtgcctcgagcagatcaacgacacgggtgctatgtctgcggaaagtcttttgcctggcgctcgactctggtggagcacgtatattctcacaccggtgagaagcccttccattgtacagattgtgggaagggattcgggcacgcatcttcgttaagcaaacaccgcgccattcatcgcggtgagcgcccccatcggtgcctggaatgcggtagggcctttacccagcggtcagcactgacgagccatctccgggtgcatacaggagaaaaaccctacggatgtgccgactgcggtcgtcggtttagccagtctagtgctctctatcaacaccgtcgggttcatagcggcgaaacccccttcccttgtccggattgcgggcgtgcctttgcgtatcctagcgatctccgccgccacgtgagaacccacactggggagaagccgtacccctgtccagattgtggtaggtgtttcaggcaaagtagcgaaatggctgcccataggcggactcactcaggagagaagccctacccttgtcctcagtgtggccgcagattcggccagaagagtgctgtagctaaacaccagtgggtccatcgacctggcgcaggtggccatcgcgggagggtcgcggggcgcctgagcgtaacactgaccccaggacatggggacctggaccctcctgtgggctttcaactgtatccagagatttttcaggagtgtggttag

SEQ ID NO: 228570 - DNA, 1227 bp, Artificial Sequence
  derived and/or modified sequence
atggccccacccctggcccccctgcccccccgggaccccaacggggccggccctgagtggagggagcctggagctgtgtcctttgctgatgtggccgtgtacttctgccgggaggagtggggctgcctgcggcctgcccagagggccctgtacagagatgtgatgagggagacctacggccacctgagcgccctgggcattggaggcaacaagccagccctgatctcctgggtggaggaggaggccgagctgtggggccctgctgcccaggaccctgaggtggccaagtgccagacccagacagatcctgctgacagcaggaacaagaagaaggagcggcagcgggagggcaccggggccctggagaagccagaccctgtggccgccggcagccctggcctgaagagcccccaggcccccagcgctggccccccctacggctgggagcagctgagcaaggccccccaccggggccggcccagcctgtgtgcccacccccctgtgcccagggctgaccagagacatggctgctacgtgtgtgggaagagctttgcctggaggagcaccctggtggagcacgtgtacagccacactggagagaagcccttccactgcacagactgtgggaagggcttcggccacgccagcagcctgagcaagcaccgggccatccacagaggagagcggccccaccgctgcctggagtgtggccgggccttcacccagaggtctgccctgaccagccacctgcgggtgcacactggagagaagccctacggctgtgccgactgtggccgccgcttcagccagagcagcgccctgtaccagcaccggcgggtgcacagcggggagacccccttcccctgcccagactgtggccgggcctttgcctaccccagcgacctgcggagacatgtgaggacccacactggagagaagccctacccctgcccagactgtggccgctgcttccggcagagcagcgagatggccgcccacaggaggacccacagcggggagaagccctacccctgcccccagtgtggccgccgcttcggccagaagtctgctgtggccaagcaccagtgggtgcacaggcctggagctgggggccaccggggccgggtggccggccgcctgtctgtgaccctgaccccaggccacggggacctggacccccctgtgggcttccagctgtacccagagatcttccaggagtgtggctag

SEQ ID NO: 228571 - DNA, 1227 bp, Artificial Sequence
  derived and/or modified sequence
atggccccccccctggcccccctgcccccccgggaccccaacggcgctggcccagaatggcgggagcccggagcagtaagcttcgctgatgtcgctgtatatttctgccgagaggagtggggctgcttgcggcctgcacaacgggccttgtatcgcgatgttatgcgcgagacatacggacacctttccgccctggggatcggagggaacaaacctgccctcatttcctgggtggaggaagaagccgagctttggggcccagcagcgcaggaccccgaagtggctaagtgccagacacagactgaccccgccgactcacgcaataagaagaaagaacgccagagagaaggtaccggcgccttggagaagcctgacccggttgccgcaggctcccctgggctgaaatccccccaggcaccaagtgccggaccaccctacggctgggagcagttaagtaaggctcctcatcgcgggcggccatctctttgcgctcacccccctgtgcctcgggctgaccaaaggcatggatgttatgtttgtggaaagagctttgcatggagaagcaccctggttgaacatgtgtactcacacactggcgagaagccattccactgcaccgactgcggcaagggcttcggtcacgccagttccctgtccaaacacagagcgatccacagaggcgagcgcccccatcggtgcctggagtgcggcagggcttttacccaacgttcagcactgactagccacttgcgcgttcatacaggagaaaaaccatacggatgcgccgattgcggaaggcgtttctcgcagtcttccgctctttaccagcaccgtcgggttcacagtggcgagacgccattcccctgccccgattgtggaagggcatttgcatatccttccgatctcaggcggcacgtgcgcacacacacaggagaaaaaccttacccgtgtcccgactgcggcagatgttttaggcaatctagcgagatggcggcacaccggaggacacattctggcgagaagccctatccatgtccccaatgcggccggaggttcgggcagaaaagtgcagtggcgaaacatcagtgggttcatcgtcccggcgcaggaggccaccggggcagagtggcaggtcggctctctgtgaccctgacaccaggacatggcgatctagatcctccggtggggttccaactttacccagagatcttccaggagtgtggctag

SEQ ID NO: 228572 - DNA, 1227 bp, Artificial Sequence
  derived and/or modified sequence
atggcgccaccgctcgccccattgccacctagggatccaaatggggctgggcctgaatggcgcgagccaggggctgtgtcttttgccgatgtagccgtttatttttgccgcgaggagtggggatgtctgagaccggctcaacgagctctgtacagggatgttatgcgggagacctatggccacttgtccgcccttggcatcggcggaaacaagcctgcgctgattagttgggtggaggaggaggcagagctgtggggccctgccgctcaggaccccgaagtggcgaagtgtcaaacgcagacggacccagcagactcaaggaacaagaagaaagaacgacagcgcgagggcacaggagctctggagaagcccgaccctgtggccgctggctcaccaggcctgaaatctcctcaggcacctagcgcaggacccccatatggttgggaacagctgtctaaagcaccacatagaggacgcccttcactatgtgcacaccctcccgtacccagggctgaccagcgacacggatgttatgtatgcggaaaatccttcgcgtggaggtcaaccctcgtggagcacgtatattcacatacgggcgagaagccattccattgtactgattgcggcaaagggtttggacatgcgagttctctctccaaacatcgggctattcacaggggcgaacgtccgcatagatgccttgagtgtggcagagcctttacccagagaagcgctctgactagccaccttcgcgtccacaccggggaaaaaccttacggctgtgcagattgcggacgtagatttagccagtcaagcgctttgtatcagcatagaagagtgcacagcggcgagactcctttcccctgccccgactgcgggcgagctttcgcttatccttcggatttgagacggcatgtcaggacgcacactggggagaagccctacccatgtcctgactgtggaaggtgcttccgacaaagctctgagatggcagcacacagacgaacccactccggcgaaaaaccatatccatgtccacaatgcgggcgacggttcggacagaagtccgcagtggccaagcaccaatgggttcaccgccctggcgcaggcggtcaccgcggacgcgtggccggacggctgagcgtgacactaacgccagggcatggggatctagatccaccagtgggcttccagctctacccagagattttccaggagtgcggatag

SEQ ID NO: 228573 - DNA, 2738 bp, Artificial Sequence
  derived and/or modified sequence
ctttctcgggcgcaggaggttccgcaggcccaggccaggccaggggaggcagccgatccgtcgtcggggttgacagttaccatggcgccgcctctggccccgctccctccccgggacccaaacggggccggacccgagtggagggagccgggggctgtgagcttcgcggacgtggccgtgtacttctgccgggaggagtggggctgcttgcggccagcgcagagggccctgtaccgggacgtgatgcgggagacctacggccacctgagcgctctcggaatcggaggcaacaagccagctctcatctcctgggtggaggaggaggccgaactgtggggtccggctgcccaggatccggaggtggcgaaatgtcagacacaaacggacccagcagattccagaaacaagaaaaaggaaagacaaagggaagggacgggagccctggagaagcccgaccctgtggccgccgggtctcctgggctgaagtctccccaagccccctcggccgggcccccttatggttgggagcagctgtccaaggcaccgcaccggggacgcccctccctctgtgcccacccccctgtcccccgagctgaccagcgtcatggctgctacgtgtgcgggaagagctttgcctggcgctccacactggtggagcacgtctacagtcacactggcgagaagcccttccactgcactgactgcggcaagggcttcggccacgcttcctccctgagcaaacaccgggccatccatcgtggggagcggccccaccgctgtctggagtgtggccgggccttcacgcagcgctcggcgctgacttcgcacctgcgcgtccacaccggcgagaaaccctatggctgcgccgactgtggccgccgcttcagccagagctctgccctctaccagcaccggcgcgtgcacagcggcgagacccccttcccctgcccggactgtggccgcgccttcgcctacccctcggacctgcggcgccacgtgcgcacccacaccggcgagaagccctacccgtgcccggactgcgggcgctgcttccgccagagctcggagatggcagcccacaggcgcacccacagcggcgagaagccctacccctgcccgcagtgcggccgccgctttggccagaagtcagccgtggccaaacaccagtgggttcatcggcccggggccgggggccacaggggccgggtcgccgggcgtctgtctgtgaccctgacccctggccacggagacctggacccgcccgtgggcttccagctgtacccggagatattccaggagtgtgggtgacggccttaaaagtgactatctagacattacgggaggcccgagatgggctcaggggcccgaacctctgcggcggcctgcagggaggtcccagaatctagggcaagagctggccctggggtgcggacagtctgatcttgggcccttagcagcctcctctgccagcaccttgctccccactgcccagggctctccaaggccccctctactgaggcagggctgagttgagaacccccagacctacataaggggaaccaaaagctgtttctcagcccagaggtgctaagaggactgaggtagaggagaaccttgttttacccattgtctttttaaattttttatcattatttttattcttgtgaccctcccagaacacaatactcattgtctttttatttatttatttatttatttctgagacagcttcctgctctgtcacccaggctggagtgcagtggtgtgaacagggctaactgcagcctcaacctgcagtgctcaaggaatcctctcccatcagccttccaaatatctgagactacaggcgggcaacactacggccagctaatttttaaattttacatagagatgaggttctcactgttgtccaggctggtctcaaactccttggctgaagtgatcctgtcgtctcggcttccgcaagtgctgggattacaggcgtgagctaccaccatgcctggcttccattgtctttgtgtgtgtgtgtgtgtgatggggttttgctcttgttgcccaggctggagtgcaatagcgcaatctcagctcactgcaacctctgcctccagagttcaagcaattctccttcctcagcctcccaagtagctgggactacaggcacccaccacctccattgtctttttactgcccaagttaaaatcctgtgactgtgtactggatctggcctgcggttgtcatatttattgatctgagtccaggcagtgtttttaagtgatatgagttagtagtgaaaattgaaaaggatattttacaaccaaatacaggttttctggtgtcttttgaaaaatccaaagatttggcaactcgacctaggctccgacaaaaccacagttgttgggagctgagccggagccagaactcacaattcaccgtggcccggccacccatccccaccactcccgtgggctcctgaccaagcaccacgtgccattcatcatggcttgcttttagtgtttttggtgtttatcttaaagtacagcgaagaagaaagggaagtatttcttagacccatgtctctgtccaaataggcctttccatctggcatttcccgctcatttatatgacttgctgagttcctatggtcatttgagtttgcaaacagtggtctgtagcactcaggttttctggagttggagagaaagggtggcaagagagaagtaaaagttggttttatttta

SEQ ID NO: 228574 - protein, 320 aa, Artificial Sequence
  derived and/or modified sequence
MAGLAARLVLLAGAAALASGSQGDREPVYRDCVLQCEEQNCSGGALNHFRSRQPIYMSLAGWTCRDDCKYECMWVTVGLYLQEGHKVPQFHGKWPFSRFLFFQEPASAVASFLNGLASLVMLCRYRTFVPASSPMYHTCVAFAWVSLNAWFWSTVFHTRDTDLTEKMDYFCASTVILHSIYLCCVRTVGLQHPAVVSAFRALLLLMLTVHVSYLSLIRFDYGYNLVANVAIGLVNVVWWLAWCLWNQRRLPHVRKCVVVVLLLQGLSLLELLDFPPLFWVLDAHAIWHISTIPVHVLFFSFLEDDSLYLLKESEDKFKLD

SEQ ID NO: 228575 - protein, 264 aa, Artificial Sequence
  derived and/or modified sequence
MSLAGWTCRDDCKYECMWVTVGLYLQEGHKVPQFHGKWPFSRFLFFQEPASAVASFLNGLASLVMLCRYRTFVPASSPMYHTCVAFAWVSLNAWFWSTVFHTRDTDLTEKMDYFCASTVILHSIYLCCVRTVGLQHPAVVSAFRALLLLMLTVHVSYLSLIRFDYGYNLVANVAIGLVNVVWWLAWCLWNQRRLPHVRKCVVVVLLLQGLSLLELLDFPPLFWVLDAHAIWHISTIPVHVLFFSFLEDDSLYLLKESEDKFKLD

SEQ ID NO: 228576 - DNA, 963 bp, Artificial Sequence
  derived and/or modified sequence
atggccggcctggccgccagactggtgctgctggccggcgccgccgccctggccagcggcagccagggcgacagagagcccgtgtacagagactgcgtgctgcagtgcgaggagcagaactgcagcggcggcgccctgaaccacttcagaagcagacagcccatctacatgagcctggccggctggacctgcagagacgactgcaagtacgagtgcatgtgggtgaccgtgggcctgtacctgcaggagggccacaaggtgccccagttccacggcaagtggcccttcagcagattcctgttcttccaggagcccgccagcgccgtggccagcttcctgaacggcctggccagcctggtgatgctgtgcagatacagaaccttcgtgcccgccagcagccccatgtaccacacctgcgtggccttcgcctgggtgagcctgaacgcctggttctggagcaccgtgttccacaccagagacaccgacctgaccgagaagatggactacttctgcgccagcaccgtgatcctgcacagcatctacctgtgctgcgtgagaaccgtgggcctgcagcaccccgccgtggtgagcgccttcagagccctgctgctgctgatgctgaccgtgcacgtgagctacctgagcctgatcagattcgactacggctacaacctggtggccaacgtggccatcggcctggtgaacgtggtgtggtggctggcctggtgcctgtggaaccagagaagactgccccacgtgagaaagtgcgtggtggtggtgctgctgctgcagggcctgagcctgctggagctgctggacttcccccccctgttctgggtgctggacgcccacgccatctggcacatcagcaccatccccgtgcacgtgctgttcttcagcttcctggaggacgacagcctgtacctgctgaaggagagcgaggacaagttcaagctggactag

SEQ ID NO: 228577 - DNA, 795 bp, Artificial Sequence
  derived and/or modified sequence
atgagcctggccggctggacctgcagagacgactgcaagtacgagtgcatgtgggtgaccgtgggcctgtacctgcaggagggccacaaggtgccccagttccacggcaagtggcccttcagcagattcctgttcttccaggagcccgccagcgccgtggccagcttcctgaacggcctggccagcctggtgatgctgtgcagatacagaaccttcgtgcccgccagcagccccatgtaccacacctgcgtggccttcgcctgggtgagcctgaacgcctggttctggagcaccgtgttccacaccagagacaccgacctgaccgagaagatggactacttctgcgccagcaccgtgatcctgcacagcatctacctgtgctgcgtgagaaccgtgggcctgcagcaccccgccgtggtgagcgccttcagagccctgctgctgctgatgctgaccgtgcacgtgagctacctgagcctgatcagattcgactacggctacaacctggtggccaacgtggccatcggcctggtgaacgtggtgtggtggctggcctggtgcctgtggaaccagagaagactgccccacgtgagaaagtgcgtggtggtggtgctgctgctgcagggcctgagcctgctggagctgctggacttcccccccctgttctgggtgctggacgcccacgccatctggcacatcagcaccatccccgtgcacgtgctgttcttcagcttcctggaggacgacagcctgtacctgctgaaggagagcgaggacaagttcaagctggactag

SEQ ID NO: 228578 - DNA, 963 bp, Artificial Sequence
  derived and/or modified sequence
atggctgggctagcggcccggttggtcctcctcgccggagccgcagcgctcgcatccggcagccaaggagaccgagaaccagtgtatcgtgattgcgtacttcagtgcgaggagcagaattgttccggaggggccctcaaccattttcggagcagacaacccatctatatgtccctggccggctggacctgccgagacgattgcaagtatgaatgtatgtgggtaactgtgggattgtacctgcaggagggccacaaggtgccccagttccatggaaagtggcccttttcaaggtttttgttcttccaggaacccgcaagcgctgtggcctctttcttgaacggcctcgccagcctggtgatgctgtgccgctacagaacatttgtgcctgcaagttctcccatgtaccatacgtgcgtggccttcgcctgggtctcactgaatgcgtggttctggtccacagtcttccacactagagacaccgatctcactgagaagatggattacttttgcgccagtaccgtcattctccactcaatctacttgtgttgcgtccggacagttggactgcaacatcctgctgtggtaagcgcctttagagccttactcctgttgatgctcaccgtgcacgtaagctatctgagtcttattaggtttgactatggttacaacctggttgctaacgtcgctatcgggctggtcaacgtggtgtggtggctcgcttggtgtctgtggaaccagaggcgcttgccgcacgtgcgaaaatgcgtggttgtggtactcctgttgcagggactcagcctgttggagcttctggacttcccgcctttgttctgggtcttagatgcacacgctatctggcacatatcaacaattccagtccatgtgctgttctttagtttcttggaggatgacagcttgtacctgcttaaggaaagcgaggacaaattcaaactggactag

SEQ ID NO: 228579 - DNA, 795 bp, Artificial Sequence
  derived and/or modified sequence
atgtcgctggctggttggacttgcagggacgactgtaagtacgagtgcatgtgggtgaccgtcggcctgtatttgcaggagggacataaggtgccccaattccatgggaagtggccattcagtaggtttttgtttttccaggagcccgccagcgccgtcgctagttttttgaacggactagcgtcattagtgatgctgtgtcgctaccgcacattcgtgcccgccagcagtccaatgtaccacacctgcgtagcatttgcctgggtctctttgaatgcttggttctggtcaaccgtgtttcatacgcgtgacacggatttgactgagaagatggattatttctgcgcgtcaaccgtgatcttgcatagcatttacctgtgctgcgtccggactgtcggcctgcagcaccctgccgttgtttctgccttcagggctcttttgctgctcatgttgactgtgcacgttagctacctctccctgattagattcgactacggatacaacctggtggctaacgtggcaattgggctggtgaacgtcgtatggtggctggcgtggtgcctgtggaaccagcgaaggcttccccatgtgcgtaagtgcgtagtcgtagtcctcctactccaggggctgagtctcctggagctgctggactttcctcccctgttttgggtgctggacgctcatgcaatatggcacatatcgaccattccagtccacgtactgttcttttcctttcttgaggacgatagtttatacctgctgaaagagtccgaggacaagtttaaactcgattag

SEQ ID NO: 228580 - DNA, 963 bp, Artificial Sequence
  derived and/or modified sequence
atggccggcctggccgcccggctggtgctgctggccggggctgctgccctggccagcggcagccagggcgaccgggagcctgtgtacagagactgtgtgctgcagtgtgaggagcagaactgcagcggcggggccctgaaccacttccgcagccggcagcccatctacatgagcctggccggctggacctgcagagatgactgcaagtatgagtgcatgtgggtgacagtgggcctgtacctgcaggagggccacaaggtgccccagttccacggcaagtggcccttcagccgcttcctgttcttccaggagcccgccagcgctgtggccagcttcctgaatggcctggccagcctggtgatgctgtgccgctaccgcacctttgtgcctgccagcagccccatgtaccacacctgtgtggcctttgcctgggtgtccctgaatgcctggttctggagcaccgtcttccacacccgggacacagacctgacagagaagatggactacttctgtgccagcaccgtcatcctgcacagcatctacctgtgctgcgtgaggacagtgggcctgcagcaccctgctgtggtgtctgccttccgggccctgctgctgctgatgctgactgtgcacgtgtcctacctgagcctcatccgctttgattatggctacaacctggtggccaacgtggccatcggcctggtgaatgtggtgtggtggctggcctggtgcctgtggaaccagaggcggctgccccacgtgaggaaatgtgtggtggtggtgctgctgctgcagggcctgagcctgctggagctgctggacttccccccactcttctgggtgctggatgcccacgccatctggcacatcagcaccatccctgtgcacgtgctcttcttctccttcctggaggatgacagcctgtacctgctgaaggagagcgaggacaagttcaagctggactag

SEQ ID NO: 228581 - DNA, 795 bp, Artificial Sequence
  derived and/or modified sequence
atgagcctggccggctggacctgcagagatgactgcaagtatgagtgcatgtgggtgacagtgggcctgtacctgcaggagggccacaaggtgccccagttccacggcaagtggcccttcagccgcttcctgttcttccaggagcccgccagcgctgtggccagcttcctgaatggcctggccagcctggtgatgctgtgccgctaccgcacctttgtgcctgccagcagccccatgtaccacacctgtgtggcctttgcctgggtgtccctgaatgcctggttctggagcaccgtcttccacacccgggacacagacctgacagagaagatggactacttctgtgccagcaccgtcatcctgcacagcatctacctgtgctgcgtgaggacagtgggcctgcagcaccctgctgtggtgtctgccttccgggccctgctgctgctgatgctgactgtgcacgtgtcctacctgagcctcatccgctttgattatggctacaacctggtggccaacgtggccatcggcctggtgaatgtggtgtggtggctggcctggtgcctgtggaaccagaggcggctgccccacgtgaggaaatgtgtggtggtggtgctgctgctgcagggcctgagcctgctggagctgctggacttccccccactcttctgggtgctggatgcccacgccatctggcacatcagcaccatccctgtgcacgtgctcttcttctccttcctggaggatgacagcctgtacctgctgaaggagagcgaggacaagttcaagctggactag

SEQ ID NO: 228582 - DNA, 963 bp, Artificial Sequence
  derived and/or modified sequence
atggccggcctggccgcccggctggtgctgctggccggcgccgccgccttggccagcgggtcacaaggcgaccgagagccagtgtatagagattgcgtgttgcagtgcgaagaacagaattgtagtgggggcgccctgaatcatttccggtctcgacagccgatctacatgtccctggcgggatggacctgtcgagatgattgcaagtacgaatgtatgtgggtgacagtcggtctgtacctgcaagagggccacaaggtccctcagttccacggcaagtggccttttagccgattccttttttttcaggaacccgcgtcagctgtggctagtttcctaaatggtctggcgtcactcgtgatgctatgtcgctatcgtacctttgtgcccgccagctccccaatgtatcacacatgtgtcgcatttgcctgggtctcactgaacgcctggttttggtccactgttttccatacccgcgatacggacctcacggaaaagatggattacttttgcgcatcaaccgtcatcctgcactccatttatttatgctgcgtccgaactgtgggccttcagcaccctgcagttgtctcagccttccgcgccctcctcctgctaatgctcactgtgcacgtatcttatctttctctgatcagatttgactacggttacaacttagtggctaacgttgcaattggcttggtgaacgtcgtgtggtggctcgcttggtgtctctggaatcagaggagacttccccatgtccgcaagtgtgtagtggtggtgctgctgttgcagggtctatctctgctggagctcttagattttcctcccttgttttgggtactagatgcacatgctatctggcatatcagcacaatccccgtgcacgtcctcttcttctcttttctggaagatgactctctctatctactgaaggagtccgaagataaattcaagttggattag

SEQ ID NO: 228583 - DNA, 795 bp, Artificial Sequence
  derived and/or modified sequence
atgagcctggccggctggacctgccgggacgactgcaagtacgagtgcatgtgggtgacggtgggactctaccttcaggaagggcataaggtgccccagttccacggcaaatggccattctctagatttctcttctttcaggaaccagcttctgcagttgcatctttcttgaacggactcgcctcactagtaatgttgtgcaggtataggacatttgtgcccgccagttccccgatgtatcacacatgtgtggcttttgcatgggtttccctgaatgcttggttctggagtactgtgttccatacccgagacactgatctcaccgagaagatggattacttttgcgcttcaaccgtgattctacactcgatctacctgtgttgcgttcggaccgtggggctgcagcatccagctgtggtgtctgccttccgggctcttttgctgctcatgctcacagtgcacgtgtcctacctctctctgatcaggttcgactacggctataatctcgtcgcaaacgtggcgattgggctcgtgaacgtggtatggtggcttgcttggtgcctgtggaaccagcgaaggctgcctcatgtgagaaagtgcgtggtcgtcgtactgttactacagggactcagtctcttggagctgctcgatttcccacccctgttctgggtgctcgatgcccacgccatctggcacataagtacaatccctgtgcatgtgctgtttttctctttcctggaggacgactctttgtacctactgaaagaaagcgaggacaaatttaagctagattag

SEQ ID NO: 228584 - DNA, 2686 bp, Artificial Sequence
  derived and/or modified sequence
atactcctaagctcctcccccggcggcgagccagggagaaaggatggccggcctggcggcgcggttggtcctgctagctggggcagcggcgctggcgagcggctcccagggcgaccgtgagccggtgtaccgcgactgcgtactgcagtgcgaagagcagaactgctctgggggcgctctgaatcacttccgctcccgccagccaatctacatgagtctagcaggctggacctgtcgggacgactgtaagtatgagtgtatgtgggtcaccgttgggctctacctccaggaaggtcacaaagtgcctcagttccatggcaagtggcccttctcccggttcctgttctttcaagagccggcatcggccgtggcctcgtttctcaatggcctggccagcctggtgatgctctgccgctaccgcaccttcgtgccagcctcctcccccatgtaccacacctgtgtggccttcgcctgggtgtccctcaatgcatggttctggtccacagttttccacaccagggacactgacctcacagagaaaatggactacttctgtgcctccactgtcatcctacactcaatctacctgtgctgcgtcaggaccgtggggctgcagcacccagctgtggtcagtgccttccgggctctcctgctgctcatgctgaccgtgcacgtctcctacctgagcctcatccgcttcgactatggctacaacctggtggccaacgtggctattggcctggtcaacgtggtgtggtggctggcctggtgcctgtggaaccagcggcggctgcctcacgtgcgcaagtgcgtggtggtggtcttgctgctgcaggggctgtccctgctcgagctgcttgacttcccaccgctcttctgggtcctggatgcccatgccatctggcacatcagcaccatccctgtccacgtcctctttttcagctttctggaagatgacagcctgtacctgctgaaggaatcagaggacaagttcaagctggactgaagaccttggagcgagtctgccccagtggggatcctgcccccgccctgctggcctcccttctcccctcaacccttgagatgattttctcttttcaacttcttgaacttggacatgaaggatgtgggcccagaatcatgtggccagcccaccccctgttggccctcaccagccttggagtctgttctagggaaggcctcccagcatctgggactcgagagtgggcagcccctctacctcctggagctgaactggggtggaactgagtgtgctcttagctctaccgggaggacagctgcctgtttcctccccatcagcctcctccccacatccccagctgcctggctgggtcctgaagccctctgtctacctgggagaccagggaccacaggccttagggatacagggggtccccttctgttaccaccccccaccctcctccaggacaccactaggtggtgctggatgcttgttctttggccagccaaggttcacggcgattctccccatgggatcttgagggaccaagctgctgggattgggaaggagtttcaccctgaccattgccctagccaggttcccaggaggcctcaccatactccctttcagggccagggctccagcaagcccagggcaaggatcctgtgctgctgtctggttgagagcctgccaccgtgtgtcgggagtgtgggccaggctgagtgcataggtgacagggccgtgagcatgggcctgggtgtgtgtgagctcaggcctaggtgcgcagtgtggagacgggtgttgtcggggaagaggtgtggcttcaaagtgtgtgtgtgcagggggtgggtgtgttagcgtgggttaggggaacgtgtgtgcgcgtgctggtgggcatgtgagatgagtgactgccggtgaatgtgtccacagttgagaggttggagcaggatgagggaatcctgtcaccatcaataatcacttgtggagcgccagctctgcccaaggcgccacctgggcggacagccaggagctctccatggccaggctgcctgtgtgcatgttccctgtctggtgcccctttgcccgcctcctgcaaacctcacagggtccccacacaacagtgccctccagaagcagcccctcggaggcagaggaaggaaaatggggatggctggggctctctccatcctccttttctccttgccttcgcatggctggccttcccctccaaaacctccattcccctgctgccagcccctttgccatagcctgattttggggaggaggaaggggcgatttgagggagaaggggagaaagcttatggctgggtctggtttcttcccttcccagagggtcttactgttccagggtggccccagggcaggcaggggccacactatgcctgcgccctggtaaaggtgacccctgccatttaccagcagccctggcatgttcctgccccacaggaatagaatggagggagctccagaaactttccatcccaaaggcagtctccgtggttgaagcagactggatttttgctctgcccctgaccccttgtccctctttgagggaggggagctatgctaggactccaacctcagggactcgggtggcctgcgctagcttcttttgatactgaaaacttttaaggtgggagggtggcaagggatgtgcttaataaatcaattccaagcctc

SEQ ID NO: 228585 - DNA, 1134 bp, Artificial Sequence
  derived and/or modified sequence
atactcctaagctcctcccccggcggcgagccagggagaaaggatggccggcctggcggcgcggttggtcctgctagctggggcaggggcgctctgaatcacttccgctcccgccagccaatctacatgagtctagcaggctggacctgtcgggacgactgtaagtatgagtgtatgtgggtcaccgttgggctctacctccaggaaggtcacaaagtgcctcagttccatggcaagtggcccttctcccggttcctgttctttcaagagccggcatcggccgtggcctcgtttctcaatggcctggccagcctggtgatgctctgccgctaccgcaccttcgtgccagcctcctcccccatgtaccacacctgtgtggccttcgcctgggtgtccctcaatgcatggttctggtccacagttttccacaccagggacactgacctcacagagaaaatggactacttctgtgcctccactgtcatcctacactcaatctacctgtgctgcgtcaggaccgtggggctgcagcacccagctgtggtcagtgccttccgggctctcctgctgctcatgctgaccgtgcacgtctcctacctgagcctcatccgcttcgactatggctacaacctggtggccaacgtggctattggcctggtcaacgtggtgtggtggctggcctggtgcctgtggaaccagcggcggctgcctcacgtgcgcaagtgcgtggtggtggtcttgctgctgcaggggctgtccctgctcgagctgcttgacttcccaccgctcttctgggtcctggatgcccatgccatctggcacatcagcaccatccctgtccacgtcctctttttcagctttctggaagatgacagcctgtacctgctgaaggaatcagaggacaagttcaagctggactgaagaccttggagcgagtctgccccagtggggatcctgcccccgccctgctggcctcccttctcccctcaacccttgagatgattttctcttttcaacttcttgaacttggacatgaaggatgtgggcccagaatcatgtggccagcccaccccctgttggccctcaccagccttggagtctgttctagggaaggcctcccagcatctgggactc

SEQ ID NO: 228586 - DNA, 963 bp, Artificial Sequence
  derived and/or modified sequence
atggctggcctggcggcaaggttagtgctgctggccggtgcagcagcgcttgctagcggttcacagggcgaccgcgagccagtgtatcgggattgcgtcctccagtgcgaggagcagaattgcagcggtggagccctgaatcactttaggtctagacaaccaatctatatgtctctcgctgggtggacgtgcagagatgactgcaagtacgaatgcatgtgggtgactgttggcctttacctgcaggagggtcataaggtgcctcagtttcatggaaagtggcctttctcacgattcttattcttccaggaacctgccagcgcggtcgctagttttctaaatgggctcgcctcacttgtgatgctctgcagatataggacattcgtgcccgcaagctcacccatgtatcacacgtgcgttgccttcgcttgggtgagcctcaatgcctggttctggagcacggtctttcatacgcgggacacagacctgacagaaaaaatggactacttctgcgcttccaccgtcatcctgcactctatctacctgtgttgtgtgcgaacagttggcctgcagcatccagcggtggtctctgcatttagagccctcctccttctcatgctcacagtgcacgtctcctacttatctctgatacgatttgattacggatataacctggtggcaaatgtggcaatcggcttagtgaacgtagtttggtggctagcttggtgcctgtggaatcagagacgcctgccacatgttaggaaatgcgtcgtagtggtgttactattgcagggtctgtcacttctggagctgctggactttccacctctcttctgggtgttggacgcccacgcaatttggcatatatcaaccatccccgtccacgttctcttcttttccttcctcgaggacgattcactctacctgctcaaggagtctgaggataagttcaagctggactag

SEQ ID NO: 228587 - DNA, 795 bp, Artificial Sequence
  derived and/or modified sequence
atgtctttggctggctggacatgtcgcgatgattgcaagtatgagtgtatgtgggtgactgtggggctctatctgcaggagggacataaagtgccgcagttccacggcaaatggccattctcacgttttctctttttccaggagccagcaagtgcggtggctagcttcctgaacggactggcctcgcttgtgatgctgtgtcgctatagaacattcgtcccagctagctctcccatgtaccacacgtgtgttgcttttgcctgggtgtccctcaatgcctggttctggagcaccgtgtttcacaccagagacactgacctcactgagaagatggattatttttgcgcttctacagtgatcctgcattccatttacttatgttgtgtccggactgtgggccttcaacatcctgctgttgtctccgcttttcgcgcattactgctcctgatgttaacagtgcatgtttcctatctttcactgattaggtttgactacggatataacctggttgccaacgtggccataggcctcgtcaacgtggtttggtggctggcgtggtgtctctggaatcagcggcgactgcctcacgtcagaaaatgtgtggttgtcgtgttgctcctgcagggtctctcattgctggagctgctggactttcccccactgttctgggtgctcgacgcccatgccatttggcacattagtactatccccgtccatgttctgttcttcagtttccttgaggacgacagcttgtacctcctgaaggagtcagaggataaattcaaacttgactag

SEQ ID NO: 228588 - DNA, 2654 bp, Artificial Sequence
  derived and/or modified sequence
agcagcgccgcagccggacgagaaagcggaagatggcggcggcggccgggaggccgtgaggagagcggcggctgcgagggcggccgatggcggccgggaggcgccctcggacacttgcgggtcgttagggcgcgacgctgggaggcatgtcggagcacgtggagcccgcagctccggggcccgggcccaacggcggcggcggcggcccggcccccgcgcgcgggcctcgcacccccaatctcaaccccaaccccctcatcaacgtgcgcgaccggctcttccacgcgctgttcttcaagatggctgtcacctattcgcggctcttcccgcccgccttccgccgtctcttcgagttcttcgtgctgctcaaggccctgtttgtgctcttcgtcctggcctacatccacatcgtcttctcccgctcgcccatcaactgcctggagcatgtgcgtgacaagtggccgcgtgagggcatcctgcgtgtggaagtgcggcacaactcgagccgcgcgcccgtcttcctacagttctgtgacagcggcggccgcgggagcttcccgggcctggccgtggaaccaggcagcaacctggacatggaagatgaggaggaggaagagctgaccatggagatgtttgggaacagctccatcaagtttgagctggacatcgagcccaaggtgttcaagccgccgagtagcacagaggccctgaatgacagccaggagttccccttccccgagacgcccaccaaagtgtggccgcaggacgagtacatcgtggagtactcactagagtatggcttccttcgcctgtcgcaggccacccgccagcgcctgagcatccccgtcatggtggtcaccctggaccccacgcgggaccagtgcttcggggaccgcttcagccgcctgctgctggatgagttcctgggctacgatgacatcctcatgtccagcgtgaagggcctggccgagaacgaggagaacaagggcttcctgcggaatgtggtgtcgggcgagcactaccgctttgtgagcatgtggatggcgcggacgtcctacctggccgccttcgccatcatggtcatcttcacgctgagcgtgtccatgctgctgcggtactcacaccaccagatcttcgtcttcatcgtggacctgctgcagatgctggagatgaacatggccatcgccttccccgcagcgcccctgctgaccgtcatcctggccctcgtcgggatggaggccatcatgtcggagttcttcaacgacaccaccaccgccttctacatcatcctcatcgtgtggctcgcggaccagtatgacgccatctgctgccacaccagcaccagcaagcggcattggctgcgcattccatgatctacttcttccaccactacgagctgcctgccatcctgcagcaggtccgcatccaggagatgctgcttcaggcgccgccactgggccccgggacccccacggcgctgcccgatgacatgaacaacaactcgggcgccccggctacagcccctgactctgccggccagccccccgccctgggccccgtctcgcctggggccagcgggagtcccgggcctgtggcagcggcgcccagctccctggtggccgcggcagcctcagtggcagcagctgccggtggtgacctgggttggatggcagagaccgctgccatcatcacagacgcctccttcctgtccggcctgagcgcctccctcctggagcggcgtccagccagcccgctgggccctgctgggggcctcccccacgccccccaggacagtgtccccccgagtgactccgcagcttctgacacaactcccctgggggctgcggtaggcgggcctagcccggcctccatggccccaacggaggcgccctcggaggtggggtcctgagccgcacagctgagccgcctctgacccctgctggctgggcctgaccttcccgagcccgtgggggtgggggaggccagccacctccttcctctgggactgcccagcctgtgtcgggggctttcagggtttcgtggggtttgcccggaaggcggctttcctccccctggtgtgaggtcgcgcccgaggcttgtacccgctagtgaggtgtttgagctggtcagcaaggagagggggtggggttccgcggaaggttctggaggggtcttggtaggtctgcagtgaaccgtcctgaggatggagtggggtcccatggtgcaggtctctgagcaaggcggaggtgtggaggagaggccggcttggggtggggcctcgcgccctagtgccggccggcctcagcccggctctgcctggtgctccctgcagtgccttctccatggccccgccctccccgcgtgtgcgccaggcttggggtccccgggagagcagagcttgcgcctcgggcatagggacgtggggtgcaggcgccaacatcagtggcagcagccagggccgtggtccagtcccactcggggatggagtgggccggcggccaaaccagtcactcggggaggaatgcggaggagcgctcattccattctatttaattgcagtgtacaaaattgtgtttgtatatagaataaactgtctgttgacagcggcaaaaaaaaaaaaaaaaaaaaaaaaaaaaaaaaaaaaaaaaaaaaaa

SEQ ID NO: 228589 - DNA, 1227 bp, Artificial Sequence
  derived and/or modified sequence
atgtcggaacatgtggaaccagctgccccaggtcccggaccgaatgggggtggtggcgggcctgctcctgctaggggcccacgcacaccgaacctgaaccctaatccactgatcaacgtgcgtgaccggctgttccacgcattgttctttaagatggcagtcacttactcccgactgttccccccagctttccgccggctcttcgaattcttcgttcttctcaaagcgctgttcgttctctttgtgctggcctatatccatattgttttcagccggtcacccattaactgtctggaacatgtgagagacaagtggccacgcgaggggatcctgcgagtcgaagtccgccacaactcctcaagagctcccgtttttttgcagttctgtgattctgggggccgggggagctttcccgggcttgcggtcgaaccaggctctaacctcgacatggaggacgaggaagaagaggagctcaccatggagatgttcggaaattcttcaataaagttcgaattagacattgagcctaaagtctttaaaccaccctcatctacagaagccctgaatgactctcaggagttccccttccctgaaacccccacaaaggtatggccccaagacgagtacatagtggaatactctcttgagtatggcttcttaagattaagtcaggccaccaggcagcgtctttccatcccagtgatggtggtgactttagacccaacaagagatcagtgcttcggtgacagattttccaggttgcttttggacgaattcctcggatatgatgacattttgatgtcctccgtcaaggggctggctgaaaatgaagagaataaggggtttctgagaaatgtcgtaagcggagagcactatagattcgtctccatgtggatggccagaacgagctacctggccgctttcgccattatggtcatttttacactgtcagtgagtatgttactccggtactctcaccatcagatttttgtcttcatcgtggacctgcttcagatgctggagatgaatatggcaatcgcttttcctgcggcccctctgctcacagtgatccttgctctggtcgggatggaggcgattatgagcgaatttttcaatgatactacaacagctttttatatcatcctgattgtgtggctggccgaccagtatgatgcaatttgttgccataccagcaccagtaagcggcattggctgcggataccttag

SEQ ID NO: 228590 - DNA, 1227 bp, Artificial Sequence
  derived and/or modified sequence
atgtctgagcacgtggagcctgctgcccctggccctggccccaatggaggcggcggcggccctgccccagcccggggccccaggacccccaacctgaaccccaaccccctcatcaacgtgcgggacaggctcttccacgccctcttcttcaagatggctgtgacctacagccgcctcttccccccagccttcagaagactctttgagttctttgtgctgctgaaggccctgtttgtgctgtttgtgctggcctacatccacatcgtgttcagccgcagccccatcaactgcctggagcacgtgcgggacaagtggccccgggagggcatcctgcgggtggaggtgcgccacaacagcagccgggcccctgtgttcctgcagttctgtgacagcggcggccggggcagcttccctggcctggccgtggagcccggcagcaacctggacatggaggatgaggaggaggaggagctgaccatggagatgtttggaaacagcagcatcaagtttgagctggacatcgagcccaaggtgttcaagccacccagcagcacagaggccctgaatgacagccaggagttccccttccctgagacccccaccaaggtgtggccccaggatgagtacatcgtggagtacagcctggagtatggcttcctgcggctgagccaggccacccggcagaggctgagcatccctgtgatggtggtgaccctggaccccacccgggaccagtgctttggagaccgcttcagccggctgctgctggatgagttcctgggctatgatgacatcctgatgagctctgtgaagggcctggctgaaaatgaggagaacaagggcttcctgagaaatgtggtgtctggagagcactacagatttgtgtccatgtggatggcccggaccagctacctggccgcctttgccatcatggtgatcttcaccctgtctgtgtccatgctgctgcgctacagccaccaccagatctttgtgttcatcgtggacctgctgcagatgctggagatgaacatggccatcgccttccctgctgcccccctgctgaccgtcatcctggccctggtgggcatggaggccatcatgtctgagttcttcaatgacaccaccacagccttctacatcatcctgattgtgtggctggccgaccagtatgatgccatctgctgccacaccagcaccagcaagaggcactggctgcgcatcccctag

SEQ ID NO: 228591 - DNA, 1227 bp, Artificial Sequence
  derived and/or modified sequence
atgagcgagcacgtggagcccgccgcccccggccccggccccaacggcggaggcggcggacccgctcccgcccgggggcctcgcactcccaacctgaatccgaaccctctgatcaacgtgagagatagactctttcatgctttgttcttcaaaatggctgttacctatagcaggctgttcccaccagcgtttaggagactgtttgaatttttcgtacttctcaaggcccttttcgtcctgtttgtgttggcctatatccacattgtgtttagtcgcagtccaatcaattgtcttgagcacgttagggataagtggccgcgcgaggggatcttacgggtcgaagttaggcacaactccagccgcgctcccgtgttcctgcagttctgtgattccgggggtcgcggctcattcccgggacttgctgtcgagcccgggtccaacttggacatggaggatgaggaagaagaggagcttactatggagatgtttggcaatagcagcattaaattcgaactggacatcgagcccaaggtcttcaagcctcccagctctacagaagccctgaacgactcacaggaatttccttttcctgagactcctaccaaagtttggcctcaggatgagtacatagtggaatattccctggagtatggtttccttcggctgagtcaagccaccagacagcgcctgagcattcccgtgatggttgtgactcttgacccaaccagggaccagtgcttcggtgaccggttcagcaggctcctgctggatgagtttctgggctacgacgacatactgatgtcatctgtgaagggattggccgaaaatgaagagaacaagggattcctgcggaacgtggtgtccggcgaacattatcggtttgttagcatgtggatggcgcgtactagctatctggcagcattcgccattatggtcatctttaccctgtcagtctctatgctgctgaggtacagtcatcatcaaatcttcgtgttcattgtggatctgctccaaatgcttgaaatgaatatggccattgctttccctgctgcgcccctcctgacagtgattctggctctggtcgggatggaggccatcatgtctgaattcttcaacgacacaactaccgccttttatattatacttattgtttggctggccgaccagtacgatgccatctgttgccacaccagtacttcaaaaagacattggctccgtattccttag

SEQ ID NO: 228592 - DNA, 1227 bp, Artificial Sequence
  derived and/or modified sequence
atgtccgagcacgttgagcccgcagcccctggacccggacctaatgggggaggtggcggtcctgccccagctcggggaccaagaacacccaatctgaatcctaaccctctcatcaatgtgcgcgaccgactctttcatgcccttttcttcaaaatggctgtcacctactcgcgcttatttcctcccgcattccgtcgcctgttcgagttctttgtcctactgaaggccttgttcgtgctttttgttttggcgtacatacacattgtcttttcacggtccccgattaactgtctcgagcacgtgcgcgataagtggcccagggagggaatactccgtgtcgaggtgcgccacaactcatctcgagcaccagtctttctgcagttctgcgactctggcggacgcggatctttccccggtctggctgtggagccgggttctaacctcgacatggaggacgaggaagaggaggaactaacaatggagatgtttgggaactccagcataaagtttgagcttgatatcgaacccaaggtctttaagcccccaagcagtacggaggcactgaatgacagccaggagtttccatttcccgaaacaccgacgaaagtctggccccaagatgaatacattgtggaatactccctggagtacggcttccttagactgagccaggctacacgccagcggctctccattccggtaatggtggtgacactcgaccccacaagagaccagtgtttcggagatcgattctctaggctgctgctcgacgagtttctgggttatgacgacattcttatgtcatcagtaaaggggcttgctgagaacgaggagaacaagggctttctgcgtaatgtcgtttccggcgagcattacagatttgtgagcatgtggatggcgcgaacaagctacctcgcagccttcgccatcatggttatcttcactctgtctgtcagtatgcttctgcgctatagccaccatcagatttttgtgttcatagtcgacctgctgcagatgctggagatgaatatggcgatcgccttccccgctgcgcctttgctgacagttatactcgccctggtgggtatggaggctattatgtctgagttcttcaatgacacaacgactgcattttatataatcctgattgtctggctcgccgatcagtatgatgccatatgctgccacacgtcaacttctaagagacactggctccggattccatag

SEQ ID NO: 228593 - DNA, 2608 bp, Artificial Sequence
  derived and/or modified sequence
agcagcgccgcagccggacgagaaagcggaagatggcggcggcggccgggaggccgtgaggagagcggcggctgcgagggcggccgatggcggccgggaggcgccctcggacacttgcgggtcgttagggcgcgacgctgggaggcatgtcggagcacgtggagcccgcagctccggggcccgggcccaacggcggcggcggcggcccggcccccgcgcgcgggcctcgcacccccaatctcaaccccaaccccctcatcaacgtgcgcgaccggctcttccacgcgctgttcttcaagatggctgtcacctattcgcggctcttcccgcccgccttccgccgtctcttcgagttcttcgtgctgctcaaggccctgtttgtgctcttcgtcctggcctacatccacatcgtcttctcccgctcgcccatcaactgcctggagcatgtgcgtgacaagtggccgcgtgagggcatcctgcgtgtggaagtgcggcacaactcgagccgcgcgcccgtcttcctacagttctgtgacagcggcggccgcgggagcttcccgggcctggccgtggaaccaggcagcaacctggacatggaagatgaggaggaggaagagctgaccatggagatgtttgggaacagctccatcaagtttgagctggacatcgagcccaaggtgttcaagccgccgagtagcacagaggccctgaatgacagccaggagttccccttccccgagacgcccaccaaagtgtggccgcaggacgagtacatcgtggagtactcactagagtatggcttccttcgcctgtcgcaggccacccgccagcgcctgagcatccccgtcatggtggtcaccctggaccccacgcgggaccagtgcttcggggaccgcttcagccgcctgctgctggatgagttcctgggctacgatgacatcctcatgtccagcgtgaagggcctggccgagaacgaggagaacaagggcttcctgcggaatgtggtgtcgggcgagcactaccgctttgtgagcatgtggatggcgcggacgtcctacctggccgccttcgccatcatggtcatcttcacgctgagcgtgtccatgctgctgcggtactcacaccaccagatcttcgtcttcatcgtggacctgctgcagatgctggagatgaacatggccatcgccttccccgcagcgcccctgctgaccgtcatcctggccctcgtcgggatggaggccatcatgtcggagttcttcaacgacaccaccaccgccttctacatcatcctcatcgtgtggctcgcggaccagtatgacgccatctgctgccacaccagcaccagcaagcggcattggctgcgcattccatgatctacttcttccaccactacgagctgcctgccatcctgcagcaggtccgcatccaggagatgctgcttcaggcgccgccactgggccccgggacccccacggcgctgcccgatgacatgaacaacaactcgggcgccccggctacagcccctgactctgccggccagccccccgccctgggccccgtctcgcctggggccagcgggagtcccgggcctgtggcagcggcgcccagctccctggtggccgcggcagcctcagtggcagcagctgccggtggtgacctgggttggatggcagagaccgctgccatcatcacagacgcctccttcctgtccggcctgagcgcctccctcctggagcggcgtccagccagcccgctgggccctgctgggggcctcccccacgccccccaggacagtgtccccccgagtgactccgcagcttctgacacaactcccctgggggctgcggtaggcgggcctagcccggcctccatggccccaacggaggcgccctcggaggtggggtcctgagccgcacagctgagccgcctctgacccctgctggctgggcctgaccttcccgagcccgtgggggtgggggaggccagccacctccttcctctgggactgcccagcctgtgtcgggggctttcagggtttcgtggggtttgcccggaaggcggctttcctccccctggtgtgaggtcgcgcccgaggcttgtacccgctagtgaggtgtttgagctggtcagcaaggagagggggtggggttccgcggaaggttctggaggggtcttggtaggtctgcagtgaaccgtcctgaggatggagtggggtcccatggtgcaggtctctgagcaaggcggaggtgtggaggagaggccggcttggggtggggcctcgcgccctagtgccggccggcctcagcccggctctgcctggtgctccctgcagtgccttctccatggccccgccctccccgcgtgtgcgccaggcttggggtccccgggagagcagagcttgcgcctcgggcatagggacgtggggtgcaggcgccaacatcagtggcagcagccagggccgtggtccagtcccactcggggatggagtgggccggcggccaaaccagtcactcggggaggaatgcggaggagcgctcattccattctatttaattgcagtgtacaaaattgtgtttgtatatagaataaactgtctgttgacagcggc

SEQ ID NO: 228594 - DNA, 1227 bp, Artificial Sequence
  derived and/or modified sequence
atgagcgagcacgtggagcccgccgcccccggccccggccccaacggcggcggcggcggccccgcccccgccagaggccccagaacccccaacctgaaccccaaccccctgatcaacgtgagagacagactgttccacgccctgttcttcaagatggccgtgacctacagcagactgttcccccccgccttcagaagactgttcgagttcttcgtgctgctgaaggccctgttcgtgctgttcgtgctggcctacatccacatcgtgttcagcagaagccccatcaactgcctggagcacgtgagagacaagtggcccagagagggcatcctgagagtggaggtgagacacaacagcagcagagcccccgtgttcctgcagttctgcgacagcggcggcagaggcagcttccccggcctggccgtggagcccggcagcaacctggacatggaggacgaggaggaggaggagctgaccatggagatgttcggcaacagcagcatcaagttcgagctggacatcgagcccaaggtgttcaagccccccagcagcaccgaggccctgaacgacagccaggagttccccttccccgagacccccaccaaggtgtggccccaggacgagtacatcgtggagtacagcctggagtacggcttcctgagactgagccaggccaccagacagagactgagcatccccgtgatggtggtgaccctggaccccaccagagaccagtgcttcggcgacagattcagcagactgctgctggacgagttcctgggctacgacgacatcctgatgagcagcgtgaagggcctggccgagaacgaggagaacaagggcttcctgagaaacgtggtgagcggcgagcactacagattcgtgagcatgtggatggccagaaccagctacctggccgccttcgccatcatggtgatcttcaccctgagcgtgagcatgctgctgagatacagccaccaccagatcttcgtgttcatcgtggacctgctgcagatgctggagatgaacatggccatcgccttccccgccgcccccctgctgaccgtgatcctggccctggtgggcatggaggccatcatgagcgagttcttcaacgacaccaccaccgccttctacatcatcctgatcgtgtggctggccgaccagtacgacgccatctgctgccacaccagcaccagcaagagacactggctgagaatcccctag

SEQ ID NO: 228595 - protein, 246 aa, Artificial Sequence
  derived and/or modified sequence
MQPFLLLLAFLLTPGAGTEEIIGGHEAKPHSRPYMAFVQFLQEKSRKRCGGILVRKDFVLTAAHCQGSSINVTLGAHNIKEQERTQQFIPVKRPIPHPAYNPKNFSNDIMLLQLERKAKWTTAVRPLRLPSSKAQVKPGQLCSVAGWGYVSMSTLATTLQEVLLTVQKDCQCERLFHGNYSRATEICVGDPKKTQTGFKGDSGGPLVCKDVAQGILSYGNKKGTPPGVYIKVSHFLPWIKRTMKRL

SEQ ID NO: 228596 - DNA, 741 bp, Artificial Sequence
  derived and/or modified sequence
atgcaaccctttctcctgcttctggccttcctgctgacacccggagctggcacagaagaaataatcggaggtcatgaggctaagccacattctcgaccctacatggcgttcgtgcagttcctacaggaaaaatctaggaaacggtgcggaggtatcctggtgaggaaagattttgtcttgaccgccgcacattgccagggctcctcgatcaatgtcactttaggtgcccataacattaaggagcaggagagaacacaacaattcattccggtgaaacgaccaattccccacccagcatacaatccaaaaaatttcagcaacgacattatgctgctgcagctggaacggaaagctaaatggaccaccgccgttagacctctgagactgccaagcagtaaggcccaggtgaagcccggtcagctgtgcagtgttgctggatggggttacgtgtccatgtccactctcgctacaaccctccaggaggtgctgctgactgtacagaaagactgccaatgcgaacgactgtttcacggaaattactcgagagctacggagatctgtgtgggtgatcccaaaaaaacacaaacgggcttcaaaggtgatagtggaggaccactcgtgtgtaaggatgtcgcccaggggatcttatcttatggtaacaagaaaggcactccaccaggggtgtacattaaagtgagccatttcttaccgtggattaaaaggaccatgaaacgtctgtag

SEQ ID NO: 228597 - DNA, 909 bp, Artificial Sequence
  derived and/or modified sequence
ggagtcaacaccaacagctctgacctgggcagccttcctgagaaaatgcagccattcctcctcctgttggcctttcttctgacccctggggctgggacagaggagatcatcgggggccatgaggccaagccccactcccgcccctacatggcctttgttcagtttctgcaagagaagagtcggaagaggtgtggcggcatcctagtgagaaaggactttgtgctgacagctgctcactgccagggaagctccataaatgtcaccttgggggcccacaatatcaaggaacaggagcggacccagcagtttatccctgtgaaaagacccatcccccatccagcctataatcctaagaacttctccaacgacatcatgctactgcagctggagagaaaggccaagtggaccacagctgtgcggcctctcaggctacctagcagcaaggcccaggtgaagccagggcagctgtgcagtgtggctggctggggttatgtctcaatgagcactttagcaaccacactgcaggaagtgttgctgacagtgcagaaggactgccagtgtgaacgtctcttccatggcaattacagcagagccactgagatttgtgtgggggatccaaagaagacacagaccggtttcaagggggactccggggggcccctcgtgtgtaaggacgtagcccaaggtattctctcctatggaaacaaaaaagggacacctccaggagtctacatcaaggtctcacacttcctgccctggataaagagaacaatgaagcgcctctaacagcaggcatgagactaaccttcctctgggcctgaccatctctgggacagaggcaagaatccccaaggggtgggcagtcggggttgcaggactgtaataaatggatctctggtgtaaatatga

SEQ ID NO: 228598 - DNA, 741 bp, Artificial Sequence
  derived and/or modified sequence
atgcagcccttcctgctgctgctggccttcctgctgacccctggggccggcacagaggagatcatcggcggccacgaggccaagccccacagccggccctacatggcctttgtgcagttcctgcaggagaagagcaggaagagatgtggcggcatcctggtgaggaaggactttgtgctgacagctgcccactgccagggcagcagcatcaacgtgaccctgggcgcccacaacatcaaggagcaggagaggacccagcagttcatccctgtgaagaggcccatcccccacccagcctacaaccccaagaacttcagcaatgacatcatgctgctgcagctggagaggaaggccaagtggaccacagctgtgcggcccctgcggctgcccagcagcaaggcccaggtgaagccaggccagctgtgcagcgtggccggctggggctacgtgtccatgagcaccctggccaccaccctgcaggaggtgctgctgactgtgcagaaggactgccagtgtgagcggctcttccacggcaactacagccgggccacagagatctgtgtgggggaccccaagaagacccagacaggcttcaagggggacagcggcggccccctggtgtgcaaggatgtggcccagggcatcctgtcctatggcaacaagaagggcaccccacctggggtgtacatcaaggtgagccacttcctgccctggatcaagaggaccatgaagaggctgtag

SEQ ID NO: 228599 - DNA, 741 bp, Artificial Sequence
  derived and/or modified sequence
atgcagcccttcctgctgctgctggccttcctgctgacccccggcgcagggacagaagaaatcatcgggggccacgaggccaaaccccactccaggccgtatatggcattcgtccaattcctgcaggagaaaagcagaaagcggtgtggtggaatcttggtgcgaaaagacttcgtgctcaccgccgcccactgtcagggaagcagcatcaacgtgacactcggcgcacacaatatcaaggaacaagagcgaacccagcaattcattccagtgaagcggcctatccctcatcccgcctataatcccaagaacttctcgaacgatataatgctcctgcagctcgagagaaaagcgaagtggaccactgctgtacgtccactcagactcccgtcatcgaaggctcaggtgaagcccggccagctatgtagcgttgccggatggggatacgtctcaatgtctacattggctaccacccttcaggaagtcttgctgactgttcagaaggattgtcaatgtgaacggctgttccacggcaactactcacgggctacagaaatctgcgttggggaccccaagaagacccagaccggttttaagggagattccggcgggccactggtctgcaaggatgtggcgcaggggattctgtcttacggtaacaagaaaggaactccacccggggtgtacattaaggtttcccactttttgccttggataaagcgcactatgaagaggctgtag

SEQ ID NO: 228600 - DNA, 741 bp, Artificial Sequence
  derived and/or modified sequence
atgcagcctttcctgctgctgctggccttcctactgacacccggtgcaggtactgaggaaatcatcggtggccatgaagccaagccacatagcagaccttacatggccttcgtgcaatttctgcaggagaaatccaggaaaaggtgtgggggaatcctggtgaggaaggatttcgttctgacagctgctcattgtcagggatcaagtattaatgtgactctcggggcacacaacatcaaggagcaggagcgcacacagcagtttataccagtgaaaagacctataccacacccagcctacaatccaaaaaatttcagcaatgatatcatgctgctgcagctggaacggaaggccaaatggacaaccgctgtaaggcccttgcggctaccctcctctaaagctcaggtcaagccaggacagctctgctccgtcgctggctggggctacgttagtatgtctactctcgcgacgaccctgcaagaagttctactcacagtgcaaaaggattgccagtgcgaacggctattccacggcaactattctcgggcaactgagatctgtgtgggcgatcctaaaaagacccagaccggcttcaagggggattccggcggacctttagtgtgcaaagatgtggctcagggcattttatcctatggcaataagaagggaactccaccaggggtgtatatcaaggtgtcccatttcttaccatggatcaaacggacaatgaagcgtctgtag

SEQ ID NO: 228601 - DNA, 741 bp, Artificial Sequence
  derived and/or modified sequence
atgcagcccttcctgctgctgctggccttcctgctgacccccggcgccggcaccgaggagatcatcggcggccacgaggccaagccccacagcagaccctacatggccttcgtgcagttcctgcaggagaagagcagaaagagatgcggcggcatcctggtgagaaaggacttcgtgctgaccgccgcccactgccagggcagcagcatcaacgtgaccctgggcgcccacaacatcaaggagcaggagagaacccagcagttcatccccgtgaagagacccatcccccaccccgcctacaaccccaagaacttcagcaacgacatcatgctgctgcagctggagagaaaggccaagtggaccaccgccgtgagacccctgagactgcccagcagcaaggcccaggtgaagcccggccagctgtgcagcgtggccggctggggctacgtgagcatgagcaccctggccaccaccctgcaggaggtgctgctgaccgtgcagaaggactgccagtgcgagagactgttccacggcaactacagcagagccaccgagatctgcgtgggcgaccccaagaagacccagaccggcttcaagggcgacagcggcggccccctggtgtgcaaggacgtggcccagggcatcctgagctacggcaacaagaagggcaccccccccggcgtgtacatcaaggtgagccacttcctgccctggatcaagagaaccatgaagagactgtag

SEQ ID NO: 228602 - protein, 471 aa, Artificial Sequence
  derived and/or modified sequence
MGGTQVKCLTSPSPIHSAKSESIITQSEEKADFVIIPAEGIENRTEGTDSPLSRDWRPGPGTYLETSWEEQLLEQQEYLEKEMEEAKKMISGLQALLLNGSLPEDEQERPLALCEPGVNPEEQLIIIQSRLDQSMEENQDLKKELLKCKQEARNLQGIKDALQQRLTQQDTSVLQLKQELLRANMDKDELHNQNVDLQRKLDERNRLLGEYKKELGQKDRLLQQHQAKLEEALRKLSDVSYHQVDLERELEHKDVLLAHCMKREADEATNYNSHNSQSNGFLLPTAGKGATSVSNRGTSDLQLVRDALRSLRNSFSGHDPQHHTIDSLEQGISSLMERLHVMETQKKQERKVRVKSPRTQVGSEYRESWPPNSKLPHSQSSPTVSSTCTKVLYFTDRSLTPFMVNIPKRLEEVTLKDFKAAIDREGNHRYHFKALDPEFGTVKEEIFHDDDAIPGWEGKIVAWVEEDHGEN

SEQ ID NO: 228603 - DNA, 1416 bp, Artificial Sequence
  derived and/or modified sequence
atgggcggcacccaggtgaagtgcctgaccagccccagccccatccacagcgccaagagcgagagcatcatcacccagagcgaggagaaggccgacttcgtgatcatccccgccgagggcatcgagaacagaaccgagggcaccgacagccccctgagcagagactggagacccggccccggcacctacctggagaccagctgggaggagcagctgctggagcagcaggagtacctggagaaggagatggaggaggccaagaagatgatcagcggcctgcaggccctgctgctgaacggcagcctgcccgaggacgagcaggagagacccctggccctgtgcgagcccggcgtgaaccccgaggagcagctgatcatcatccagagcagactggaccagagcatggaggagaaccaggacctgaagaaggagctgctgaagtgcaagcaggaggccagaaacctgcagggcatcaaggacgccctgcagcagagactgacccagcaggacaccagcgtgctgcagctgaagcaggagctgctgagagccaacatggacaaggacgagctgcacaaccagaacgtggacctgcagagaaagctggacgagagaaacagactgctgggcgagtacaagaaggagctgggccagaaggacagactgctgcagcagcaccaggccaagctggaggaggccctgagaaagctgagcgacgtgagctaccaccaggtggacctggagagagagctggagcacaaggacgtgctgctggcccactgcatgaagagagaggccgacgaggccaccaactacaacagccacaacagccagagcaacggcttcctgctgcccaccgccggcaagggcgccaccagcgtgagcaacagaggcaccagcgacctgcagctggtgagagacgccctgagaagcctgagaaacagcttcagcggccacgacccccagcaccacaccatcgacagcctggagcagggcatcagcagcctgatggagagactgcacgtgatggagacccagaagaagcaggagagaaaggtgagagtgaagagccccagaacccaggtgggcagcgagtacagagagagctggccccccaacagcaagctgccccacagccagagcagccccaccgtgagcagcacctgcaccaaggtgctgtacttcaccgacagaagcctgacccccttcatggtgaacatccccaagagactggaggaggtgaccctgaaggacttcaaggccgccatcgacagagagggcaaccacagataccacttcaaggccctggaccccgagttcggcaccgtgaaggaggagatcttccacgacgacgacgccatccccggctgggagggcaagatcgtggcctgggtggaggaggaccacggcgagaactag

SEQ ID NO: 228604 - DNA, 5425 bp, Artificial Sequence
  derived and/or modified sequence
atccggaaggtggcacggagtgggatcgccgctggggactcgaggcgcagcctgcgccgccgggagcctccctcccagtgggagatgggttgagatgcccccgccaggggggatgcccggcaccgtgcgtccgcggaggccaagatgcagcggccaggggccggcagcctgcgaggggaggcagcttccgccggggccgggctgctgcacagtctgagcggccgggactgcgcgcttcagagcctggagcatcccagtcgctggggccgagacgccgccgccgccgccgttcccgctttctcccgcgagccgggccagtagctttgctaggctggccttcccgtggaggcgttttccagccccagcgcggggagacatgcctgaatttgggagcgatgtgactctcagcctcccacttcacccggggacgcaggcttgctgaagcccgagacaggagggggaccatgggagggacgcaagtcaaatgcctgacttcacccagtccaatccacagtgcaaagagcgagtccattataacccagtcagaagagaaggcagattttgtgattattcccgctgaaggaatagagaacagaacagaagggacagattctccattatctcgagactggcggccagggcctggaacctatctggagacctcatgggaagaacagctgttggaacaacaagaatatttagaaaaagaaatggaggaagcaaagaaaatgatatcaggactacaggccttactgctcaatggatccttacctgaagatgaacaggagaggcccttggccctctgtgaaccaggtgtcaatcccgaggaacaactgattataatccaaagtcgtctggatcagagtatggaggagaatcaggacttaaagaaggaactgctgaaatgtaaacaagaagccagaaacttacaggggataaaggatgccttgcagcagagattgactcagcaggacacatctgttcttcagctcaaacaagagctactgagggcaaatatggacaaagatgagctgcacaaccagaatgtggatctgcagaggaagctagatgagaggaaccggctcttgggagaatataaaaaagagctggggcagaaggatcgccttcttcagcagcaccaggccaagttagaagaagcactccggaaactctctgatgtcagttaccaccaggtggatctagagcgagagctagaacacaaagatgtcctcttggctcactgtatgaaaagagaggcagatgaggcgaccaactacaacagtcacaactctcaaagcaatggttttctccttccaacggcaggaaaaggagctacttcagtcagcaacagagggaccagcgacctgcagcttgttcgagatgctctccgcagcctgcgcaacagcttcagtggccacgatcctcagcaccacactattgacagcttggagcagggcatttctagcctcatggagcgcctgcatgttatggagacgcagaagaaacaagaaagaaaggttcgggtcaagtcacccagaactcaagtaggtagtgaataccgggagtcctggccccctaactcaaagttgcctcactcacagagctctccaactgtcagcagcacctgtactaaagtgctctatttcactgaccggtcacttacgcccttcatggtcaatataccaaagaggttggaggaggtgacgttaaaggattttaaagcagctattgatcgggaaggaaatcaccggtatcacttcaaagcactggatcctgagtttggcactgtcaaagaggagattttccatgatgatgatgccatccctggatgggaagggaaaattgtagcttgggtggaagaagaccatggagagaattaatgccaagtatcagattgagggcttatggaacctggtcactccctggctgcttcactcaggaaagggaactaaaaccagaatacactaagaagtttctagtttgtgtgccaaaacagaagcttctccaagcatgatggccacaggtcagtcctctttctgtgcctggcatatctggtacttaaaattctgtccaaatgtagaccatgggttcatctggagttccttgtccgtgggaacacagtgttctattctactctgaggacaacaaaccgaaggccttaaacgatggggatggatgatcccgcctctgtaggggcatggctgctattatctggaaattaggaattggatgcatcattcctgtgtgttacagtattattttaattggcctcaatggttgcagcaatcagagtcccagcgtttgtactcacagacaaggcaaaggtaccagcttttctgtttctttgaacctactgcaaaccaagaataactcatgaggtggtaccaaagatgaaagcccagacttcagtaatcttttgaaccagacgtggatggtgctgaattgttgcttggatggaaaaagggctgcccatgttgtgctacactatgctaaaactgtaatttagtaagaccttgggctgcctcttctgtcttaactggttctgcagcttgtccttttgcccacatagggcctatttcatgtactgttagttttctctggggactctttaactttagagccatttctttttcttcaaactgatgaacttttgtttgaaaggcataaggagtgaaaagctccttgaaaatccaggcgggtatggaaaggtgctgctacccatatctttttgactttctttgtttcatgactttaactcatggcatctcctttgtagtaaaaggagacagaccattaatttcagcatttctttgtgatttataagtactgagcatgaagtacttgtctgcccctcatttcaaggccagagttattttctatttatgtattagtctaggctgatcttttagggcacaatagaaaccatggggcgtggagcatgagttgtgaatggcagggatcattctgggtaaaaaaaacctagaatcatttctgatgtgcaacattgtcaagtgaagaagctaacagttcaactaccgagattatttgataacctgggttttctcattcatccatcaagcaccatcaaccagtcagccattattatttatatatgtattaccaaaagcagtctatctgcctgtgacctccaatgtacactgccaaacacaagagtaggacacatctgttctgggttcttgacctatctgtctccaattcatctccccttttcagccatttcaacaaactactctttggagctctgagatgacatcttgttgttttatatagatgtatcttttaaaaatagttcacgtttggagaattcttttgtactcatttgctttttgtctgagaaccatgtctatttttataactggagtgtgagttctgtatcttctcacattctgtatactgtatccattttctagagaacccagtagcttttatacagtctcttcttaccaccccttgtggtttcagaacaagctttattttattacgagtatattaatgacaactaattcctgttccaattctacctgttttagttgtgaaggtagttttgtgtaatccagttgattgctcctctggcagagagaaggagctcaaaagatacttgatgtctttcatgtaagtttacctggtcttttcctattgaagaatttttcatcagaaacgactgggaaagtttgggaaagtcagcaaaagaaagaatgcatttcgaaagcaaacagaagaaaaaagtatattctcacagtttttccccaggaagtctggagaaaaagtcctcatgtcaccaatttctctgttgcatgaattttagtgttttgctataagacagcatgagggctatcaggccaaaattcattattgtatttccaatacagtttgtcttgaatgtctgtctcttaaaccagtttttacttgtcagttttctctcagcaaacagtcttactattatgtggaatttaacttttcagagaaaatttccaaagtcctctaccttatttggcttttatctgtgtcttttggaaaaggagctgcatggcctcagtgcctccataaaaagcttaagttgagttcatgggagaacattaagatcgttttttttcccttttagctcggtaatctcatgtaccacaggtaatgaccaagcatctctgctagaggatgtaactctcataactcctgtgtaaaatgaggatcctgttggtgatcctcattccagtttccaaagcgagaggagccttctgagcagaagtatgcaagactgattctgtttggaacagtttcctatttggctgcattctaggaggcctcctgacttattcatagtattgtcgcctggtggcattggtgtggggtagcttgtcctgctacttgctaaagttctctttctttgagaaaactgaggaaccagaatgcttagagttcataaaataatctctaaaccatgttaggttaaaacaaaatgaccatctcacaaaaacgagtttagttgaatgctcaattccttacaaaatcttcatttaaggctgagtgtggtggctcatgcctgtaattccagcactttgggaggccgaggcaggaagactgcttgagcccaggagttcaagaccagcctgggcaacgtaggaagactccgtctctacatagaaattttattataaaagtagctggggatggtggcacacacctgtagtcccagctactcaggaggttgaggtgggaagattgcttgagcccaggagtttgaggttgcagtgagctgatcatgccactgcactctagcctaggctacagagcaggaccccatctccaaaaaaaaaaaaaaaaaagtcatttaaaaactgaagaatgttctcttcttgctcagttccctaaattagctggggggattgggatactttacaatttttacatttttaaatttgaagaatttgttttaaacttacttggtaatggcacttctacttactgaccaacttttcagctctttttgaccaggatggttgcaaattagggaaaatatctttatactatacatccaattcaagaggactttaattacttaaaagcatttaggtcataattaaaattattttcactgtttccataaaataagcattatgattgcacactccttctactgtctgaatttatgtaagaggtatagcttgcttaaaatacatatatatgtaaagttatattttcttagaaacatggatgtttacagccattgctttcaaagagattattactgtgtattctccctgttttacaatatgttttcatgaagactatgttacaccagaggcttctgattatcaaagtgataaccagttttaactgccggtatgtaccagatttgtgaactaatttaaaaaaccacaaactatgaataaaatggggtttgcaaact

SEQ ID NO: 228605 - DNA, 1416 bp, Artificial Sequence
  derived and/or modified sequence
atgggcgggacacaggtaaagtgtctcacttccccctcacctatacacagcgctaaatcagaatccatcataactcaaagcgaggaaaaggccgatttcgtgatcatccccgccgaaggtatcgagaaccgtaccgagggcaccgatagtccattgtccagggattggcgccccggtccagggacctaccttgagaccagctgggaggagcagctcctcgaacagcaggaatacctggagaaagagatggaagaagccaagaaaatgatatcaggcctccaagcgctgctgctcaatgggagcctgccggaggacgagcaggagaggcccctggctctctgtgagccgggtgtgaaccctgaggaacagttgataatcatccagtctcgcctcgatcaatcaatggaggagaaccaagatttgaaaaaggagctgttgaagtgcaagcaagaggcccggaatttgcagggaatcaaagatgcgcttcagcagcggctgacccagcaggacacatcagtcctccagctgaaacaagagctcctgcgggctaatatggacaaggatgagctgcataatcaaaatgttgacctccagcgtaagctggatgaacgcaaccgcctgcttggcgaatacaaaaaggagctgggccagaaagatcgcctgttgcagcagcaccaggcaaaactcgaagaggcactacgcaaactatccgacgtgagctatcaccaagtggatctggaaagggaactggagcacaaggacgtgttgctcgcgcactgcatgaaaagggaggccgacgaagcgaccaactataactcccacaactcacagtccaacgggttcctgcttcctaccgcgggaaaaggagctacgtccgtctccaatcgaggcacctcagatctgcagctggtgcgagatgctcttagatcactccggaatagtttctcggggcacgatccacagcaccatactattgatagcttggaacaggggatctcctccctgatggaacgattgcacgtaatggagacccagaaaaaacaggaacggaaggttcgcgtgaagtccccgcggactcaggtcgggtctgagtatagagagagttggcctcctaattcaaaattaccccacagccagtcatcgccaaccgtaagctcaacttgtaccaaagtcctgtactttactgaccggtcgctgactccctttatggtgaatatccccaagcggctagaagaagtgacattgaaagactttaaggccgctatcgaccgggaagggaaccacagatatcacttcaaggctctggatcccgaatttggaaccgtgaaggaagagattttccacgatgatgatgctataccagggtgggagggaaagatcgtcgcgtgggttgaggaagatcatggagagaattag

SEQ ID NO: 228606 - DNA, 1416 bp, Artificial Sequence
  derived and/or modified sequence
atgggcggcacccaggtgaagtgcctgaccagccccagccccatccacagcgccaagtctgagagcatcatcacccagagcgaggagaaggctgactttgtgatcatcccagctgagggcatcgagaacagaacagagggcacagacagccccctgagccgggactggaggcctggccctggcacctacctggagacctcctgggaggagcagctgctggagcagcaggagtacctggagaaggagatggaggaggccaagaagatgatcagcggcctgcaggccctgctgctgaatggcagcctgcctgaagatgagcaggagcggcccctggccctgtgtgagcccggggtgaaccctgaggagcagctgatcatcatccagagccggctggaccagagcatggaggagaaccaggacctgaagaaggagctgctgaagtgcaagcaggaggccaggaacctgcagggcatcaaggatgccctgcagcagaggctgacccagcaggacacctctgtgctgcagctgaagcaggagctgctgcgggccaacatggacaaggatgagctgcacaaccagaatgtggacctgcagaggaagctggatgagaggaaccggctgctgggggagtacaagaaggagctgggccagaaggaccggctgctgcagcagcaccaggccaagctggaggaggccctgaggaagctgagtgatgtgtcctaccaccaggtggacctggagcgggagctggagcacaaggatgtgctgctggcccactgcatgaagcgggaggctgatgaggccaccaactacaacagccacaacagccagagcaatggcttcctgctgcccacagctgggaagggggccacctctgtgagcaacagaggcaccagtgacctgcagctggtgagagatgccctgcggagcctgaggaacagcttcagcggccatgacccccagcaccacaccatcgacagcctggagcagggcatcagcagcctgatggagcggctgcacgtgatggagacccagaagaagcaggagaggaaggtgcgggtgaagagccccaggacccaggtgggcagcgagtaccgggagagctggccacccaacagcaagctgccccacagccagagcagccccaccgtgagcagcacctgcaccaaggtgctgtacttcacagacaggagcctgacccccttcatggtgaacatccccaagaggctggaggaggtgaccctgaaggacttcaaggccgccatcgaccgggagggcaaccaccgctaccacttcaaggccctggaccctgagtttggaacagtgaaggaggagatcttccatgatgatgatgccatccctggctgggagggcaagatcgtggcctgggtggaggaggaccacggggagaactag

SEQ ID NO: 228607 - DNA, 1416 bp, Artificial Sequence
  derived and/or modified sequence
atgggcggcacccaggtgaagtgcctgaccagccccagccccatccacagtgctaaatccgagtcaattatcacccagagcgaggagaaagccgactttgtgatcataccagctgaagggattgagaatagaacagaggggacggacagccccctatctagagactggagaccgggccctggtacctacctcgaaacctcctgggaagagcaattactggagcaacaggaatatcttgaaaaggagatggaagaggctaaaaagatgatttccggcctgcaggcgttgctgctcaatggttcactgccagaggatgagcaagagaggccgttggccctgtgtgagccgggggtaaatcccgaagaacagttaataatcatccagtccagactggaccagagcatggaagagaaccaggacctgaagaaggaactcctaaagtgtaagcaagaggctaggaacttgcaaggcataaaggatgcattgcagcagaggctgacacaacaggacacctctgtcttacagttgaagcaggagctcttgcgcgcgaacatggataaggacgaactgcataaccagaatgtggatctccaaagaaaactggacgagcgcaacagactcctgggagagtataagaaggaactggggcagaaggacagacttctgcagcaacatcaggccaagcttgaagaggcactgcgcaaactaagtgatgtatcttatcaccaggtcgacctggaacgcgagttggaacataaagacgtcctcttagctcattgcatgaagcgtgaggccgacgaagcaactaactataattctcataatagtcagtctaatggctttcttttgccaacggcaggaaaaggcgctaccagcgtgtctaatcgcggcacttccgacctccagcttgtgagagatgcgctgcgaagcctgcggaatagctttagcggccatgatccacagcaccacacaatcgatagcctcgagcagggaatcagtagtctcatggaaagactccatgttatggagacacagaagaaacaggaacgaaaagtccgggtgaagagccccagaacccaggttggctcagagtacagggaatcctggcctcccaactccaagctccctcatagccagtcatcgccgacggtgtcatctacctgcaccaaggtgttgtacttcaccgatcgctctctgaccccattcatggtaaacattcctaagaggctcgaggaggttactttgaaggactttaaagcagccatcgacagggagggtaaccataggtaccattttaaagcccttgatcctgagtttgggactgtgaaggaagagatctttcacgacgacgacgccatccctgggtgggaagggaagatcgtggcatgggttgaggaggaccatggggaaaactag

SEQ ID NO: 228608 - DNA, 1416 bp, Artificial Sequence
  derived and/or modified sequence
atgggcggaacccaggttaagtgcctgaccagcccctcccccatccattcggccaagtctgagtccattattacacagtctgaggaaaaagccgacttcgtgatcattcctgcggagggcatcgaaaacagaacggaaggaaccgatagccctctgagccgcgattggcgccctgggcctgggacatacctggaaactagctgggaggaacagctgctggagcagcaagagtatctagagaaggaaatggaggaggccaagaagatgatctccggacttcaggctctcctcctgaatggcagcctaccggaggatgagcaggagcggcctttggcactctgtgaacccggagtgaatccagaagaacagttgataattatccagtccagactcgatcaaagtatggaggaaaaccaggacctcaaaaaggaactgctaaagtgtaaacaagaggcgaggaacctgcaggggatcaaagatgccctgcagcaaagattaacgcagcaagacacatccgtgctccagctgaagcaggagctcctgagggccaacatggataaggatgaactccacaatcagaacgttgacctgcaacggaaacttgatgagcggaacagactattgggcgaatacaagaaagagctcggacaaaaggacaggctgttgcaacagcatcaggcgaaactcgaggaagcactgcgaaaactgtccgacgtgagttaccatcaggtcgacctcgagagggaactggagcataaagacgtgctcttggctcactgtatgaagcgtgaagcagacgaggcaaccaattataattcccacaacagccaatctaatggctttcttcttccaacggccggtaagggggcaacatctgtttctaacagggggaccagcgacctgcagctcgtgcgagacgccctccgtagtctgcgaaattccttttccggacatgacccacagcaccacaccatcgatagtctggagcaggggatcagttccctcatggagcggttgcacgtgatggagacacaaaaaaaacaggaaagaaaggtccgtgttaagagccccagaactcaggtgggaagcgagtatagggagtcttggccccctaactccaagctcccacacagtcagagttcaccaacagtgtcgagcacatgcacaaaagtgttgtatttcaccgaccggtcccttacccctttcatggtgaatatccccaagaggctcgaagaggtcacactgaaagactttaaagctgcaatcgaccgtgagggaaaccaccgttaccattttaaagccttggatccagagtttggaacagtcaaggaagaaatttttcacgatgacgatgctatccctggatgggaaggtaaaatcgttgcctgggtggaggaagaccacggtgagaactag

SEQ ID NO: 228609 - protein, 399 aa, Artificial Sequence
  derived and/or modified sequence
MERKNPSRESPRRLSAKVGKGTEMKKVARQLGMAAAESDKDSGFSDGSSECLSSAEQMESEDMLSALGWSREDRPRQNSKTAKNAFPTLSPMVVMKNVLVKQGSSSSQLQSWTVQPSFEVISAQPQLLFLHPPVPSPVSPCHTGEKKSDSRNYLPILNSYTKIAPHPGKRGLSLGPEEKGTSGVQKKICTERLGPSLSSSEPTKAGAVPSSPSTPAPPSAKLAEDSALQGVPSLVAGGSPQTLQPVSSSHVAKAPSLTFASPASPVCASDSTLHGLESNSPLSPLSANYSSPLWAAEHLCRSPDIFSEQRQSKHRRFQNTLVVLHKSGLLEITLKTKELIRQNQATQVELDQLKEQTQLFIEATKSRAPQAWAKLQASLTPGSSNTGSDLEAFSDHPAI

SEQ ID NO: 228610 - protein, 151 aa, Artificial Sequence
  derived and/or modified sequence
MERKNPSRESPRRLSAKVGKGTEMKKVARQLGMAAAESDKDSGFSDGSSECLSSAEQMESEDMLSALGWSREDRPRQNSKTAKNAFPTLSPMVVMKNVLVKQGSSSSQLQSWTVQPSFEVISAQPQLLFLHPPVPSPVSPCHTGEKKSDSR

SEQ ID NO: 228611 - protein, 135 aa, Artificial Sequence
  derived and/or modified sequence
MERKNPSRESPRRLSAKVGKGTEMKKVARQLGMAAAESDKDSGFSDGSSECLSSAEQMESEDMLSALGWSREDRPRQNSKTAKNAFPTLSPMVVMKNVLVKQGSSSSQLQSWTVQPSFEVISAQPQLLFLHPPVP

SEQ ID NO: 228612 - protein, 141 aa, Artificial Sequence
  derived and/or modified sequence
MERKNPSRESPRRLSAKVGKGTEMKKVARQLGMAAAESDKDSGFSDGSSECLSSAEQMESEDMLSALGWSREDRPRQNSKTAKNAFPTLSPMVVMKNVLVKQGSSSSQLQSWTVQPSFEVISAQPQLLFLHPPVPSPVSPC

SEQ ID NO: 228613 - protein, 157 aa, Artificial Sequence
  derived and/or modified sequence
MERKNPSRESPRRLSAKVGKGTEMKKVARQLGMAAAESDKDSGFSDGSSECLSSAEQMESEDMLSALGWSREDRPRQNSKTAKNAFPTLSPMVVMKNVLVKQGSSSSQLQSWTVQPSFEVISAQPQLLFLHPPVPSPVSPCHTGEKKSDSRNYLPIL

SEQ ID NO: 228614 - DNA, 1200 bp, Artificial Sequence
  derived and/or modified sequence
atggagagaaagaaccccagcagagagagccccagaagactgagcgccaaggtgggcaagggcaccgagatgaagaaggtggccagacagctgggcatggccgccgccgagagcgacaaggacagcggcttcagcgacggcagcagcgagtgcctgagcagcgccgagcagatggagagcgaggacatgctgagcgccctgggctggagcagagaggacagacccagacagaacagcaagaccgccaagaacgccttccccaccctgagccccatggtggtgatgaagaacgtgctggtgaagcagggcagcagcagcagccagctgcagagctggaccgtgcagcccagcttcgaggtgatcagcgcccagccccagctgctgttcctgcacccccccgtgcccagccccgtgagcccctgccacaccggcgagaagaagagcgacagcagaaactacctgcccatcctgaacagctacaccaagatcgccccccaccccggcaagagaggcctgagcctgggccccgaggagaagggcaccagcggcgtgcagaagaagatctgcaccgagagactgggccccagcctgagcagcagcgagcccaccaaggccggcgccgtgcccagcagccccagcacccccgccccccccagcgccaagctggccgaggacagcgccctgcagggcgtgcccagcctggtggccggcggcagcccccagaccctgcagcccgtgagcagcagccacgtggccaaggcccccagcctgaccttcgccagccccgccagccccgtgtgcgccagcgacagcaccctgcacggcctggagagcaacagccccctgagccccctgagcgccaactacagcagccccctgtgggccgccgagcacctgtgcagaagccccgacatcttcagcgagcagagacagagcaagcacagaagattccagaacaccctggtggtgctgcacaagagcggcctgctggagatcaccctgaagaccaaggagctgatcagacagaaccaggccacccaggtggagctggaccagctgaaggagcagacccagctgttcatcgaggccaccaagagcagagccccccaggcctgggccaagctgcaggccagcctgacccccggcagcagcaacaccggcagcgacctggaggccttcagcgaccaccccgccatctag

SEQ ID NO: 228615 - DNA, 456 bp, Artificial Sequence
  derived and/or modified sequence
atggagagaaagaaccccagcagagagagccccagaagactgagcgccaaggtgggcaagggcaccgagatgaagaaggtggccagacagctgggcatggccgccgccgagagcgacaaggacagcggcttcagcgacggcagcagcgagtgcctgagcagcgccgagcagatggagagcgaggacatgctgagcgccctgggctggagcagagaggacagacccagacagaacagcaagaccgccaagaacgccttccccaccctgagccccatggtggtgatgaagaacgtgctggtgaagcagggcagcagcagcagccagctgcagagctggaccgtgcagcccagcttcgaggtgatcagcgcccagccccagctgctgttcctgcacccccccgtgcccagccccgtgagcccctgccacaccggcgagaagaagagcgacagcagatag

SEQ ID NO: 228616 - DNA, 408 bp, Artificial Sequence
  derived and/or modified sequence
atggagagaaagaaccccagcagagagagccccagaagactgagcgccaaggtgggcaagggcaccgagatgaagaaggtggccagacagctgggcatggccgccgccgagagcgacaaggacagcggcttcagcgacggcagcagcgagtgcctgagcagcgccgagcagatggagagcgaggacatgctgagcgccctgggctggagcagagaggacagacccagacagaacagcaagaccgccaagaacgccttccccaccctgagccccatggtggtgatgaagaacgtgctggtgaagcagggcagcagcagcagccagctgcagagctggaccgtgcagcccagcttcgaggtgatcagcgcccagccccagctgctgttcctgcacccccccgtgccctag

SEQ ID NO: 228617 - DNA, 426 bp, Artificial Sequence
  derived and/or modified sequence
atggagagaaagaaccccagcagagagagccccagaagactgagcgccaaggtgggcaagggcaccgagatgaagaaggtggccagacagctgggcatggccgccgccgagagcgacaaggacagcggcttcagcgacggcagcagcgagtgcctgagcagcgccgagcagatggagagcgaggacatgctgagcgccctgggctggagcagagaggacagacccagacagaacagcaagaccgccaagaacgccttccccaccctgagccccatggtggtgatgaagaacgtgctggtgaagcagggcagcagcagcagccagctgcagagctggaccgtgcagcccagcttcgaggtgatcagcgcccagccccagctgctgttcctgcacccccccgtgcccagccccgtgagcccctgctag

SEQ ID NO: 228618 - DNA, 474 bp, Artificial Sequence
  derived and/or modified sequence
atggagagaaagaaccccagcagagagagccccagaagactgagcgccaaggtgggcaagggcaccgagatgaagaaggtggccagacagctgggcatggccgccgccgagagcgacaaggacagcggcttcagcgacggcagcagcgagtgcctgagcagcgccgagcagatggagagcgaggacatgctgagcgccctgggctggagcagagaggacagacccagacagaacagcaagaccgccaagaacgccttccccaccctgagccccatggtggtgatgaagaacgtgctggtgaagcagggcagcagcagcagccagctgcagagctggaccgtgcagcccagcttcgaggtgatcagcgcccagccccagctgctgttcctgcacccccccgtgcccagccccgtgagcccctgccacaccggcgagaagaagagcgacagcagaaactacctgcccatcctgtag

SEQ ID NO: 228619 - DNA, 1200 bp, Artificial Sequence
  derived and/or modified sequence
atggaaagaaaaaatccttctcgggaaagccccagacgcctctccgccaaggtcggcaagggcaccgaaatgaagaaagtggccagacagctgggcatggcagccgccgaatcagataaggactctggtttttccgatgggtcaagtgagtgtttaagcagcgcagaacaaatggagtccgaggacatgctttccgcactcgggtggagcagagaggatcgccctcgacaaaattctaaaaccgcaaagaacgcttttcccaccctcagtcccatggtggtgatgaaaaacgtactggttaagcagggttccagctcaagccagttgcaaagctggaccgtccagccaagttttgaggtgataagcgcccagccccaactgttgtttctgcacccccccgtcccctcgcctgtgagcccttgtcacactggagagaagaaaagtgactctaggaattatctgccaatcctaaacagctacacaaagatagctccgcacccgggaaaaaggggcctgtccctcggacccgaggagaagggcacatccggggtccagaaaaaaatttgcaccgaaagactcggaccgagcctgtcatccagcgaaccgactaaggctggggcagtgccctcatccccaagcactcctgctccaccgtcggccaagctggccgaagattccgcccttcagggggtgccttcactagtggctgggggctctccgcagacactgcagcctgtcagctcttcccacgttgccaaagcaccaagcttgacgtttgcgagcccagcaagccctgtgtgcgcaagtgacagcacactgcatggcctggagtcaaatagtcccttgagccctctctccgccaattatagctctcccctgtgggccgcagaacatctgtgcaggagccccgatatctttagcgaacagcgccagagcaagcatcgcaggttccagaacaccctagtggtcctgcacaagagtgggctcctggagattactctcaaaaccaaagaattgatccgtcagaatcaggcgactcaagtggaactcgaccagctgaaagagcagacccagctgttcatcgaggcgaccaagtctcgcgccccacaggcctgggccaagctgcaggcttccctgacccctggtagctctaacaccgggagcgacctggaagcattctctgatcatccagctatttag

SEQ ID NO: 228620 - DNA, 456 bp, Artificial Sequence
  derived and/or modified sequence
atggagagaaaaaacccatccagagaaagtcctcggagactgagcgccaaagttggcaaggggacagagatgaagaaggttgccagacaacttggaatggcagccgccgagagcgataaagattccggtttttccgacggctcgtccgaatgcctgtcctccgcagagcaaatggaatcagaagatatgttgtcggccctcggctggtcaagggaagaccgaccacgacagaattccaagaccgcaaagaacgcgttccctaccttgagcccgatggtggtgatgaagaatgtgctagtgaaacaggggtcctccagcagtcagctgcagtcatggacggtgcagcctagttttgaggtgatttcagctcaacctcagcttctcttcctgcacccacccgtcccctcccccgtttcaccttgccataccggggagaaaaaaagcgacagtcgctag

SEQ ID NO: 228621 - DNA, 408 bp, Artificial Sequence
  derived and/or modified sequence
atggagcggaaaaaccccagtcgcgagagtccccggagacttagtgctaaggtcggcaaagggacagagatgaaaaaggtagcccgacagctgggcatggctgccgcagagagtgacaaggatagcggttttagtgatgggagcagcgagtgcttgagttctgccgagcagatggaatctgaggatatgctgagtgcgctcggatggtccagggaggaccgtccgcgccagaacagcaagacagcgaaaaatgcgtttccgactttaagccccatggtcgtgatgaaaaatgtgctggtgaagcaaggctctagcagttcccaactccagagctggacagtgcagccctcctttgaagtcatcagcgcccagccacagctgctgtttctgcaccctccagtcccatag

SEQ ID NO: 228622 - DNA, 426 bp, Artificial Sequence
  derived and/or modified sequence
atggagagaaagaacccgtctagagaaagcccacgccgactgtctgcaaaagttggaaaaggcaccgagatgaagaaagtggctagacaactggggatggcagccgcagaatcggacaaagacagcgggttctcagatggttctagcgaatgcctaagcagcgcagagcagatggaaagtgaggatatgctgtctgcccttggatggagcagggaagacaggccaagacaaaacagcaagacagccaagaacgcttttcccacacttagccccatggtcgttatgaaaaatgtcctagtgaaacaaggatcctccagcagccaactccagtcatggacggtgcagccgagctttgaggtcatcagcgctcaaccacaattgctgttcctccacccacccgtgccctcccccgtgagcccctgctag

SEQ ID NO: 228623 - DNA, 474 bp, Artificial Sequence
  derived and/or modified sequence
atggagcgcaagaatccctctcgggagtccccaagaaggctgagtgccaaagtcggaaaggggacagaaatgaaaaaggtggcccggcaactgggaatggccgcagccgaatccgataaggatagtggctttagcgatggctctagtgagtgcttgagttccgcagagcagatggagtcagaggacatgctctccgccctcggctggtcccgggaggaccggccacggcagaactctaagaccgcaaaaaatgcgtttcccaccctgagccctatggtggtcatgaaaaacgtgctagttaaacaggggtccagttccagccagctgcaatcctggaccgtgcagcctagcttcgaggttatttccgcacagccccagctcttattcctccaccccccagtgccttcaccagtgagcccctgtcacaccggtgaaaagaaaagtgactccaggaactacttacctattctttag

SEQ ID NO: 228624 - DNA, 1200 bp, Artificial Sequence
  derived and/or modified sequence
atggagaggaagaaccccagccgggagagcccccggcggctgagcgccaaggtgggcaagggcacagagatgaagaaggtggcccggcagctgggcatggctgctgctgagagtgacaaggacagcggcttcagtgatggcagcagcgagtgcctgagcagcgctgagcagatggagagcgaggacatgctgagcgccctgggctggagccgggaggaccggccccggcagaacagcaagacagccaagaatgccttccccaccctgagccccatggtggtgatgaagaatgtgctggtgaagcagggcagcagcagcagccagctgcagagctggacagtgcagcccagctttgaggtgatcagcgcccagccccagctgctcttcctgcacccccctgtgcccagccctgtgagcccctgccacactggagagaagaagagtgacagcaggaactacctgcccatcctgaacagctacaccaagatcgccccccaccctgggaagaggggcctgagcctgggccctgaggagaagggcaccagcggcgtgcagaagaagatctgcacagagcggctgggccccagcctgagcagcagcgagcccaccaaggccggggctgtgcccagcagccccagcaccccagcccctccttctgccaagctggccgaggacagcgccctgcagggcgtgcccagcctggtggccggcggcagcccccagaccctgcagcctgtgagcagcagccacgtggccaaggcccccagcctgacctttgccagccctgccagccctgtgtgtgccagtgacagcaccctgcacggcctggagagcaacagccccctgagccccctgagcgccaactacagcagccccctgtgggccgctgagcacctgtgccgcagcccagacatcttcagcgagcagaggcagagcaagcaccggcgcttccagaacaccctggtggtgctgcacaagagcggcctgctggagatcaccctgaagaccaaggagctgatccggcagaaccaggccacccaggtggagctggaccagctgaaggagcagacccagctgttcatcgaggccaccaagagccgggccccccaggcctgggccaagctgcaggccagcctgaccccaggcagcagcaacacaggcagtgacctggaggccttcagtgaccacccagccatctag

SEQ ID NO: 228625 - DNA, 456 bp, Artificial Sequence
  derived and/or modified sequence
atggagaggaagaaccccagccgggagagcccccggcggctgagcgccaaggtgggcaagggcacagagatgaagaaggtggcccggcagctgggcatggctgctgctgagagtgacaaggacagcggcttcagtgatggcagcagcgagtgcctgagcagcgctgagcagatggagagcgaggacatgctgagcgccctgggctggagccgggaggaccggccccggcagaacagcaagacagccaagaatgccttccccaccctgagccccatggtggtgatgaagaatgtgctggtgaagcagggcagcagcagcagccagctgcagagctggacagtgcagcccagctttgaggtgatcagcgcccagccccagctgctcttcctgcacccccctgtgcccagccctgtgagcccctgccacactggagagaagaagagtgacagcaggtag

SEQ ID NO: 228626 - DNA, 408 bp, Artificial Sequence
  derived and/or modified sequence
atggagaggaagaaccccagccgggagagcccccggcggctgagcgccaaggtgggcaagggcacagagatgaagaaggtggcccggcagctgggcatggctgctgctgagagtgacaaggacagcggcttcagtgatggcagcagcgagtgcctgagcagcgctgagcagatggagagcgaggacatgctgagcgccctgggctggagccgggaggaccggccccggcagaacagcaagacagccaagaatgccttccccaccctgagccccatggtggtgatgaagaatgtgctggtgaagcagggcagcagcagcagccagctgcagagctggacagtgcagcccagctttgaggtgatcagcgcccagccccagctgctcttcctgcacccccctgtgccctag

SEQ ID NO: 228627 - DNA, 426 bp, Artificial Sequence
  derived and/or modified sequence
atggagaggaagaaccccagccgggagagcccccggcggctgagcgccaaggtgggcaagggcacagagatgaagaaggtggcccggcagctgggcatggctgctgctgagagtgacaaggacagcggcttcagtgatggcagcagcgagtgcctgagcagcgctgagcagatggagagcgaggacatgctgagcgccctgggctggagccgggaggaccggccccggcagaacagcaagacagccaagaatgccttccccaccctgagccccatggtggtgatgaagaatgtgctggtgaagcagggcagcagcagcagccagctgcagagctggacagtgcagcccagctttgaggtgatcagcgcccagccccagctgctcttcctgcacccccctgtgcccagccctgtgagcccctgctag

SEQ ID NO: 228628 - DNA, 474 bp, Artificial Sequence
  derived and/or modified sequence
atggagaggaagaaccccagccgggagagcccccggcggctgagcgccaaggtgggcaagggcacagagatgaagaaggtggcccggcagctgggcatggctgctgctgagagtgacaaggacagcggcttcagtgatggcagcagcgagtgcctgagcagcgctgagcagatggagagcgaggacatgctgagcgccctgggctggagccgggaggaccggccccggcagaacagcaagacagccaagaatgccttccccaccctgagccccatggtggtgatgaagaatgtgctggtgaagcagggcagcagcagcagccagctgcagagctggacagtgcagcccagctttgaggtgatcagcgcccagccccagctgctcttcctgcacccccctgtgcccagccctgtgagcccctgccacactggagagaagaagagtgacagcaggaactacctgcccatcctgtag

SEQ ID NO: 228629 - DNA, 1200 bp, Artificial Sequence
  derived and/or modified sequence
atggagcggaagaaccccagccgggagagcccccggcggctgagcgcaaaagtcggaaagggaactgagatgaagaaggtcgcacggcagctggggatggctgctgcagaaagcgataaagattctggattttcagacggaagcagcgagtgcctatcttctgctgaacaaatggaatcagaggacatgctcagtgctctagggtggagtagggaggatagaccgcgtcagaactctaaaaccgcaaaaaatgcgttcccgaccctttcccctatggtggtgatgaagaatgtacttgttaaacagggatcgtcctcaagccaattacagtcttggacagtccaacccagtttcgaagtcatttccgcccagccacagctgctgttcctgcacccacccgttcctagcccagtgtccccatgccacactggcgaaaaaaagtccgatagtaggaattatttaccaatactcaattcgtacaccaaaatcgctcctcatcccggcaagcgcggcctctccctgggccccgaggagaaagggacgtctggggttcaaaaaaagatctgcactgagcgacttggtccgtccttgagctcatctgagccaacaaaggcaggtgctgtcccgtcctccccatcaacacccgcaccaccttccgcaaaactggccgaggatagcgcattacaaggggtaccctccctggtggctggaggtagtccacagaccctgcagccagtgtcgtcttcccatgtggctaaagccccttcactgacattcgcctccccagcttctcctgtatgtgcctcagactccacactgcacggtttagaatctaactctccgctgtcacctttatcagctaattacagctcacctctgtgggcggccgaacacctgtgcagaagccctgacattttttcagaacagaggcagagtaagcacagacgattccagaatacgcttgtggtgctgcacaaatcaggattgcttgagatcaccctgaagacaaaggagctgattaggcagaatcaggcaacccaggtggaacttgaccagctgaaagaacagactcagcttttcattgaagcaaccaagtctcgagctcctcaggcttgggctaagctgcaagccagtctgactccaggatcaagcaataccggctccgacttagaagctttctccgaccacccagcaatttag

SEQ ID NO: 228630 - DNA, 456 bp, Artificial Sequence
  derived and/or modified sequence
atggagcggaagaaccccagccgggagagcccccggcggctgagcgctaaggtcggtaaaggaacagagatgaagaaagtggcccgacagctgggcatggcggctgcagagtctgataaagactcaggtttcagtgacggaagctctgagtgtctctcgagcgcagaacagatggagagtgaagacatgcttagcgccctgggatggagccgggaagaccggccacgtcagaactccaagaccgcgaagaacgcctttcctacactttctccaatggtggtaatgaagaatgtgctggtaaagcaagggtcctcttcttcacagctacagtcttggactgttcagccttcgttcgaagttatctctgcacagccccagctgctgttccttcacccccctgtaccttcccctgtgagcccctgccatacgggggaaaaaaagtctgacagccgatag

SEQ ID NO: 228631 - DNA, 408 bp, Artificial Sequence
  derived and/or modified sequence
atggagcggaagaaccccagccgggagagcccccggcggctgagcgccaaagtcggcaaaggcactgagatgaagaaagttgcgcggcaattggggatggctgcagcagagagtgacaaggactccggctttagtgacggtagcagcgagtgcctgagttctgcagaacagatggagtctgaggatatgctttccgccttaggatggtctagagaggacagacctaggcagaactccaaaaccgctaagaacgctttccccacgttgtctcccatggtcgtcatgaagaatgtcttggttaaacagggatcctcttcatcacaactccaatcatggactgtccagccgagttttgaagtcatttctgctcagccccagctgctgttccttcaccccccagtcccttag

SEQ ID NO: 228632 - DNA, 426 bp, Artificial Sequence
  derived and/or modified sequence
atggagcggaagaaccccagccgggagagcccccggcggctgagcgcgaaagtgggtaaaggcacggagatgaaaaaggtggccagacagcttggcatggcggccgcagaaagtgacaaggactctggcttttctgatggatcatctgagtgtctatcctcagccgagcaaatggagtccgaggacatgttaagtgccttgggctggtccagggaggatcgcccaaggcagaatagcaagactgccaagaatgcatttccaacccttagcccaatggtcgtcatgaaaaatgtgctggtgaaacagggcagcagtagctcccagctgcagtcatggacagtgcaaccatctttcgaggtgatatctgcacagccccagctgctcttcctgcaccctcccgtgccttcaccagtttctccttgctag

SEQ ID NO: 228633 - DNA, 474 bp, Artificial Sequence
  derived and/or modified sequence
atggagcggaagaaccccagccgggagagcccccggcggctgagcgctaaagtcggcaaggggaccgagatgaaaaaagtggcccgtcaactcggaatggccgcggctgagtcagacaaggattctggattcagcgacggctccagcgagtgtctcagtagcgcggaacagatggaaagcgaagatatgttgtctgccttaggatggtccagggaagatcgacctaggcagaactctaaaactgctaagaacgcttttcctaccttaagcccgatggtcgttatgaaaaacgtgctggtaaaacaggggtcatccagtagtcagctgcaatcctggactgtacagccgtctttcgaggtcatcagcgctcagccccaactgctttttttgcaccctcctgttccttccccagtgtccccttgccacacaggcgaaaagaaaagtgattctcggaattacctaccaatcctctag

SEQ ID NO: 228634 - DNA, 1200 bp, Artificial Sequence
  derived and/or modified sequence
atggaacgtaagaatccttcacgcgagtctcccagaaggctttctgctaaggtgggcaaaggaacagaaatgaagaaagtggctagacagctgggaatggcggctgctgaaagcgacaaagatagtggcttcagcgacgggagtagtgaatgtctgtccagtgccgaacagatggaaagcgaggatatgttgtcagcactcgggtggagccgggaggatcggcctagacagaacagcaaaaccgcaaaaaatgccttcccaactctgtctcctatggtcgtgatgaaaaatgtactagtaaagcaaggctcgagctcaagtcagctgcagtcttggaccgtgcagccctcctttgaagtcattagcgcccagccccagctactttttttgcatcctccagtcccctcccctgtaagcccctgccataccggtgaaaaaaagtctgactccaggaactacttgccaattcttaactcatacactaagattgccccacaccccggaaaacggggtttgtctttggggccagaggaaaagggcacgtctggagttcagaagaaaatctgcacagaaagattgggaccaagcctctctagctctgagccgaccaaggccggtgccgtgccttccagtccttcaactcctgcacccccaagcgccaagcttgcagaagatagcgctcttcaaggagttccgtcccttgtggcaggtggcagcccccagactctgcaacccgtgtcttcttctcacgtagccaaggctcccagtctcacgtttgcctcacccgctagccctgtgtgcgcttccgactcaaccttgcacgggctggagtctaattcccccctcagccccctgagtgccaattactcaagtcctctgtgggcggctgagcatctatgtaggagcccagacatcttctccgagcagagacagagtaagcacagaaggttccagaacacactagtagtgctgcataaatccggcctgctggagatcaccctgaaaacaaaagaactgatacgccaaaaccaggctacccaagtcgagctggaccagctgaaagaacaaacccaactcttcattgaggccactaaatcccgtgcaccacaggcatgggccaagttacaggcgtccctgacacccggatcaagtaatacaggctccgatttggaggccttctctgatcaccctgctatttag

SEQ ID NO: 228635 - DNA, 456 bp, Artificial Sequence
  derived and/or modified sequence
atggaaagaaagaaccctagcagggagtcaccccgacgactttcggccaaggtcgggaaagggaccgagatgaagaaggtagccagacagttaggcatggcagctgccgagagcgacaaggattcggggttctccgatggtagcagcgaatgtttatctagcgctgaacaaatggagtccgaagacatgttatcagctcttggttggtcgagggaggacagacctcgacaaaactccaagaccgcaaagaacgcatttccaacattatctccaatggtcgtcatgaaaaatgttctggtgaaacaaggaagcagttcctcacagttgcagtcttggactgttcaacccagtttcgaggtgatatcggctcagccccaactgctgttcttacaccccccagtgccgtcacccgtgagtccctgccatacaggcgaaaagaaatcggattctcgctag

SEQ ID NO: 228636 - DNA, 408 bp, Artificial Sequence
  derived and/or modified sequence
atggaacgaaaaaatcccagcagggagtctccaagacgactctccgctaaagtggggaagggcaccgaaatgaagaaggttgctcggcagctgggtatggctgctgccgagtctgacaaagactcggggttttccgatgggtctagtgagtgtttgagcagtgccgagcagatggaatctgaggacatgctctccgccctgggctggagcagagaagaccggcctagacagaacagcaaaactgccaaaaacgcctttcctaccctgtcgcccatggtggtcatgaagaatgtgttggtgaagcagggctcttcaagttcccagctgcagtcttggacagttcagcccagtttcgaggtgataagtgctcagccccagctgctcttcctgcacccacctgtcccttag

SEQ ID NO: 228637 - DNA, 426 bp, Artificial Sequence
  derived and/or modified sequence
atggaaaggaagaaccccagcagagagtccccccgtcggctgtcggccaaagtcggcaaggggaccgaaatgaagaaggtagctcggcagctgggcatggccgcagcagagtctgataaagatagtggattcagcgatggctcctctgaatgcctgtcatcagcagagcagatggagagcgaagatatgttgagcgcacttggttggagccgcgaggataggccgaggcagaattccaagaccgccaaaaatgctttccctacgctgtcgcccatggttgtgatgaagaacgtgctggttaaacagggttctagctcaagccaattgcagagttggaccgtccagcctagcttcgaggtgatctccgctcagcctcaactcctattcctgcatccacctgtgccatcacctgtctccccctgttag

SEQ ID NO: 228638 - DNA, 474 bp, Artificial Sequence
  derived and/or modified sequence
atggagcgaaaaaatccatcccgtgaaagcccaaggcgtttaagcgccaaagtgggtaaggggactgaaatgaaaaaggtagctaggcagctgggaatggccgctgccgaatccgacaaggacagcggtttcagcgacggctcaagcgagtgtctgagcagcgcagagcaaatggagagtgaggacatgctgtccgcattgggctggtctcgcgaggaccgacccaggcagaactcaaaaaccgctaaaaacgccttccccaccctgtcaccgatggtcgtgatgaaaaatgtgctcgttaagcaagggtccagctcttcacagctccagtcctggacggttcagccttcctttgaggtgattagtgcacagccgcagctcctattcctccatcctcctgtgccctctccggtgagtccatgccacaccggcgaaaaaaaatccgacagtagaaattacctgccgatcctgtag

SEQ ID NO: 228639 - DNA, 4486 bp, Artificial Sequence
  derived and/or modified sequence
cttccggcgggggcggggaaagggcgcatttccaagggcccttctaggagaacagcgtgcggtctccatggtgccgggtcatccgagtcgggtcacgtggctggcgaaagccgtcgcggaggcgtggggaggagaaatgggcgggaggctgtggggatagcgagacacccagcgacgacgaggttgtcatggtgccgcggggccgtgctcgcgcatgcgccacctgacccacaggccggtcgtggagctgcgaccccggccctagggcagtccagatgaaaagagtaccaatgaatctgcctccagctgaataaaccatggagaggaaaaacccatccagagagagccccagaagactctctgccaaagtaggcaaaggcacagagatgaagaaagtggctcgtcagcttgggatggctgctgctgagtcagacaaggactctggcttttcagatgggagctcggaatgtctgagctctgcagagcagatggagtccgaggacatgctgagcgccttaggctggagcagagaagacaggccgaggcagaactccaaaactgcaaagaatgccttccctaccctgtctcccatggtcgtcatgaagaatgtgcttgtcaaacagggcagcagctcatcccagctccagtcgtggactgtccagccctcctttgaagtgatctcagcacagccacagctcttattccttcatccacctgtaccatctcctgtcagtccatgtcacactggtgagaaaaagtccgactccaggaactacttgcccattctgaattcttacaccaaaatagccccacatccaggcaaaaggggcctttcccttggcccagaagaaaaaggaacaagtggagtgcagaagaaaatctgtactgagagacttgggcctagcttgtcttccagtgagccaaccaaggctggtgctgtcccatccagtccctcgacgccagcaccacccagcgccaaacttgccgaggactcagctctgcagggtgtgccctctctggtggcaggtggaagtccacagactcttcagccggtatccagcagtcacgtggctaaagctcccagtctgaccttcgcttcccccgccagtcctgtctgcgcatcagacagcactctccatgggttagagagcaactctcccctttcaccactgtccgctaattatagctcacctttatgggctgcagagcacctctgccgcagcccagatatcttttcagagcagcggcagagcaaacataggcgctttcagaataccctagtagtcctacataaatctggtttgctggagatcactttgaaaaccaaggagttgattcgtcagaatcaggcaactcaggtagaactagaccagctaaaggagcaaacccagctgtttatagaagccaccaagagcagggcccctcaggcttgggccaagctgcaggcatctttaacacctgggtccagtaatacaggcagtgacctagaagcattctctgatcacccagccatatagcacagaggcatattttcctgttacttgagtggttcttttagctcatttgctgttacctactcctgtttcccaaagcttatgtaagagcttttccttctaaacttaaactgtgttgtggttcacttaggaagccacgtgccaatacctggctgctgtcttaactcgtagtctgggcacaggatacatatgtccccgtcccactgaggacctcagtttgggagtgcccttgagccccttttccttagcctgcaggtgcttcaatggatcatggggcaaagcaggagatgattgtgtggggctcttcctgctgtcacctcccatcatcccactctctcaccaggatcaagggtacagtaacacgaatgagcatacagagcaacacctgttgagccagggagtaggtgacacaaggaaaccttcatggatcttcccttgcctgtcttagtcacagagagaaataagaggaggttgtttgcatcccacaaggcatcgtactagttgggcgagacctaaaattccctgggcacaggttgcacctgggtgtgagcacttaatcactcaacgctttgttttcttacacttgaaaatcaagggaaagagtagtaccatctgactcctacactttcattacaagtcagatttttcttaaactagcaggcaaaaacagtacttccaaattttaaggtatggaatgaatgcagtacatctggaattgtagtcgatgaattgcttttttgacttagaagctgaagaaaatagacatagccggcatatctcatggtcaggagctggacgattctggtaacttaggctttttttctctcttcttttgaaacagtgtaacctgttttatgtctaaaaatcttaaggatagtttcagtggttcctgggatgtagtataagttaactctgctgccatcttgttttttttttttttcctttattttgataagtgattattatgcttgataaactttgaattaaatacagttgtcttgagggtatgataagtccacaaaaaattggaaagcatcttacccattttcttcacatcccaaatttttatttgttccatgtcatagtgatgggaagcagttacagagcagcgtcttctgtgtttccttcatgtgttagatattggcaacaaagccagaggtgtaatgttggttatatgaagttcatctcaaaatggagaccatgaccagagtttccagatgatacacgttcttttcagcttcattaaataggcaactatgtttctaaatagtaaagtttcaaaatattctctcaatttaaaatttcatcctcttgaaaatctttgttctttacaaaattatcttaataagttctatatggtcagcttcatcttccttttttttttttttgagatggagtttcgctcttgttgcccaggcggagtacaatggtgggatctcggctcactgcaacctccgcctcctgggttcaagtgattctcctgccacagcctcccaagtagctgggattacaggtgcctgccaccatgcccagctaatttttgtatttttagtagaaatggggttttaccgtgttggccaggctggtctcgaactcctgacctcagttgatccgcctgcctcagcctcccaaagtgctgggcttacaggcctgagccaccacgctcagctcagcttcaccctgtctgcaaagaaaagttttaccaagaccagaagttaaatatgacatttcctaggtagttgtaactctaacatagtttaaaaagtatgtggcttcagattgcctatactttgttcacaaacgtgtgatttagatatgactgatgtagaagtgaacaacttggtaacatccctagactccactcatgaacgcagaattattacctgctgtttgctttctgaaagaatttcagaaatcagagcaaatgtgtctttaggcagattcagctccttttaatatttttctcttggcccactctctttgcttcccctgaatctgtgtggtactatagcagctctactctgtgcaccatgctaggaagcttcctttttggcagaatatgtttggcagcaaagctatagagacaggtgcattcagaacatcctgggcaccagtcatgagtcttactgtgtcaaaaatctgaaaacacttgctgagaaccaaatttattccattggaaaaaccctctgtggagctataagcctcttggactcttcttcctagattaaggcttgcatttccctccctgtttcagtaaaagatgatgaaagccactatcaatcctcactgctgagtggcagggagaagcagcaccactctcagctcttttctaatcttgtaacttagtgctagaagtctctccaggctattaccatgggcatttgttctctgttggagctgtaagcagatgaacccaagtagagaagatagatcttggaaggagagatccattgagtccagaagccagatcagcaaatggaggaacctcggaggtgaccagaaagatctccatcggttgcccaaggctgtaagtagtgatggttttagcgatgaataacgtaattggctatgaagtactgtggcagagctgctgttttctgaaggtgagaagccatttttagctcagagcaacccttaagagaacttttggcagattttgttggcattattgaaatatatatagaaaagttgctgattgcaatggttatgggaatggaatttaatgacatttgtaatttattacactcattggtttttattgattatagtattgtctgactttttattttctactatggttcctttagcagaaaagtaacttttgtgcatatattgaagtggtttttcagctatgaattctttagggtagaaatttatttagcaaatgtgaattcttttgagaaagtatgaagttttgcagaaattgactgtgaaatgtcagagaaaaataaaagtcacttacttgaaaccta

SEQ ID NO: 228640 - DNA, 596 bp, Artificial Sequence
  derived and/or modified sequence
agttttgccctgctgagctggcaggctggtggatgcctggagggtgcacatgctgcctggcacagatgcaacgtgggctggtgcgaatggggcagtccagatgaaaagagtaccaatgaatctgcctccagctgaataaaccatggagaggaaaaacccatccagagagagccccagaagactctctgccaaagtaggcaaaggcacagagatgaagaaagtggctcgtcagcttgggatggctgctgctgagtcagacaaggactctggcttttcagatgggagctcggaatgtctgagctctgcagagcagatggagtccgaggacatgctgagcgccttaggctggagcagagaagacaggccgaggcagaactccaaaactgcaaagaatgccttccctaccctgtctcccatggtcgtcatgaagaatgtgcttgtcaaacagggcagcagctcatcccagctccagtcgtggactgtccagccctcctttgaagtgatctcagcacagccacagctcttattccttcatccacctgtaccatctcctgtcagtccatgtcacactggtgagaaaaagtccgactccagga

SEQ ID NO: 228641 - DNA, 584 bp, Artificial Sequence
  derived and/or modified sequence
tgcgccacctgacccacaggccggtcgtggagctgcgaccccggccctaggggaccagacgtggaggttagatcttaaggtgaccgtggtgtttggaaatgcagaatcttgaccttcaagctgttcagggcagtccagatgaaaagagtaccaatgaatctgcctccagctgaataaaccatggagaggaaaaacccatccagagagagccccagaagactctctgccaaagtaggcaaaggcacagagatgaagaaagtggctcgtcagcttgggatggctgctgctgagtcagacaaggactctggcttttcagatgggagctcggaatgtctgagctctgcagagcagatggagtccgaggacatgctgagcgccttaggctggagcagagaagacaggccgaggcagaactccaaaactgcaaagaatgccttccctaccctgtctcccatggtcgtcatgaagaatgtgcttgtcaaacagggcagcagctcatcccagctccagtcgtggactgtccagccctcctttgaagtgatctcagcacagccacagctcttattccttcatccacctgtacc

SEQ ID NO: 228642 - DNA, 581 bp, Artificial Sequence
  derived and/or modified sequence
agatgcaacgtgggctggtgcgaatgggggaccagacgtggaggttagatcttaaggtgaccgtggtgtttggaaatgcagaatcttgaccttcaagctgttcagggcagtccagatgaaaagagtaccaatgaatctgcctccagctgaataaaccatggagaggaaaaacccatccagagagagccccagaagactctctgccaaagtaggcaaaggcacagagatgaagaaagtggctcgtcagcttgggatggctgctgctgagtcagacaaggactctggcttttcagatgggagctcggaatgtctgagctctgcagagcagatggagtccgaggacatgctgagcgccttaggctggagcagagaagacaggccgaggcagaactccaaaactgcaaagaatgccttccctaccctgtctcccatggtcgtcatgaagaatgtgcttgtcaaacagggcagcagctcatcccagctccagtcgtggactgtccagccctcctttgaagtgatctcagcacagccacagctcttattccttcatccacctgtaccatctcctgtcagtccatgtc

SEQ ID NO: 228643 - DNA, 882 bp, Artificial Sequence
  derived and/or modified sequence
gaaagggagggctcggtccgggaggaggggagcagggatgacggcgggagagggattgggcgaggagcgtggggaaaggaggtggaagtaggggagagaggaagaggagcgagtaggcaagaggggcaaaccgggactttcggaggacggagagccaaatggtgggagcagggctttggtttgctgtgaggggcgtgggagagggaatcgcgggtgaggagggggctgcgtgtggggaggaggcttgtgtgaggggcaggtgggccctggtctagccctgggcgcaaccgccagccggctgggcggggagagagcttggagtccagcccggctgggagctgagggccaagcaatgggcagggcagtccagatgaaaagagtaccaatgaatctgcctccagctgaataaaccatggagaggaaaaacccatccagagagagccccagaagactctctgccaaagtaggcaaaggcacagagatgaagaaagtggctcgtcagcttgggatggctgctgctgagtcagacaaggactctggcttttcagatgggagctcggaatgtctgagctctgcagagcagatggagtccgaggacatgctgagcgccttaggctggagcagagaagacaggccgaggcagaactccaaaactgcaaagaatgccttccctaccctgtctcccatggtcgtcatgaagaatgtgcttgtcaaacagggcagcagctcatcccagctccagtcgtggactgtccagccctcctttgaagtgatctcagcacagccacagctcttattccttcatccacctgtaccatctcctgtcagtccatgtcacactggtgagaaaaagtccgactccaggaactacttgcccattct

SEQ ID NO: 228644 - protein, 1663 aa, Artificial Sequence
  derived and/or modified sequence
MATDGASCEPDLSRAPEDAAGAAAEAAKKEFDVDTLSKSELRMLLSVMEGELEARDLVIEALRARRKEVFIQERYGRFNLNDPFLALQRDYEAGAGDKEKKPVCTNPLSILEAVMAHCKKMQERMSAQLAAAESRQKKLEMEKLQLQALEQEHKKLAARLEEERGKNKQVVLMLVKECKQLSGKVIEEAQKLEDVMAKLEEEKKKTNELEEELSAEKRRSTEMEAQMEKQLSEFDTEREQLRAKLNREEAHTTDLKEEIDKMRKMIEQLKRGSDSKPSLSLPRKTKDRRLVSISVGTEGTVTRSVACQTDLVTENADHMKKLPLTMPVKPSTGSPLVSANAKGSVCTSATMARPGIDRQASYGDLIGASVPAFPPPSANKIEENGPSTGSTPDPTSSTPPLPSNAAPPTAQTPGIAPQNSQAPPMHSLHSPCANTSLHPGLNPRIQAARFRFQGNANDPDQNGNTTQSPPSRDVSPTSRDNLVAKQLARNTVTQALSRFTSPQAGAPSRPGVPPTGDVGTHPPVGRTSLKTHGVARVDRGNPPPIPPKKPGLSQTPSPPHPQLKVIIDSSRASNTGAKVDNKTVASTPSSLPQGNRVINEENLPKSSSPQLPPKPSIDLTVAPAGCAVSALATSQVGAWPAATPGLNQPACSDSSLVIPTTIAFCSSINPVSASSCRPGASDSLLVTASGWSPSLTPLLMSGGPAPLAGRPTLLQQAAAQGNVTLLSMLLNEEGLDINYSCEDGHSALYSAAKNGHTDCVRLLLSAEAQVNAADKNGFTPLCAAAAQGHFECVELLISYDANINHAADGGQTPLYLACKNGNKECIKLLLEAGTNRSVKTTDGWTPVHAAVDTGNVDSLKLLMYHRIPAHGNSFNEEESESSVFDLDGGEESPEGISKPVVPADLINHANREGWTAAHIAASKGFKNCLEILCRHGGLEPERRDKCNRTVHDVATDDCKHLLENLNALKIPLRISVGEIEPSNYGSDDLECENTICALNIRKQTSWDDFSKAVSQALTNHFQAISSDGWWSLEDVTCNNTTDSNIGLSARSIRSITLGNVPWSVGQSFAQSPWDFMRKNKAEHITVLLSGPQEGCLSSVTYASMIPLQMMQNYLRLVEQYHNVIFHGPEGSLQDYIVHQLALCLKHRQMAAGFSCEIVRAEVDAGFSKEQLLDLFISSACLIPVKQSPSKKKIIIILENLEKSSLSELLRDFLAPLENRSTESPCTFQKGNGLSECYYFHENCFLMGTIAKACLQGSDLLVQQHFRWVQLRWDGEPMQGLLQRFLRRKVVNKFKGQAPSPCDPVCKIVDWALSVWRQLNSCLARLGTPEALLGPKYFLSCPVVPGHAQVTVKWMSKLWNGVIAPRVQEAILSRASVKRQPGFGQTTAKRHPSQGQQAVVKAALSILLNKAVLHGCPLPRAELDQHTADFKGGSFPLSIVSSYNTCNKKKGESGAWRKVNTSPRRKSGRFSLPTWNKPDLSTEGMKNKTISQLNCNRNASLSKQKSLENDLSLTLNLDQRLSLGSDDEADLVKELQSMCSSKSESDISKIADSRDDLRMFDSSGNNPVLSATINNLRMPVSQKEVSPLSSHQTTECSNSKSKTELGVSRVKSFLPVPRSKVTQCSQNTKRSSSSSNTRQIEINNNSKEVNWNLHKNEHLEKPNK

SEQ ID NO: 228645 - DNA, 4992 bp, Artificial Sequence
  derived and/or modified sequence
atggccacagacggggccagctgcgagcccgatctgagccgcgcacccgaagatgcagcaggcgctgctgccgaagcagctaaaaaagagtttgatgtcgatactctttcaaagtccgaactgcgcatgttactgagcgtcatggagggcgaactcgaagctcgcgacctagtgatcgaggccctgagggcccggaggaaagaagtttttattcaggagagatatggaaggttcaatctgaatgatccttttctggcccttcaacgggactatgaggcaggagcaggggataaagaaaaaaaacccgtgtgcactaacccgctgtccatcctggaggcagtcatggcacactgcaaaaaaatgcaggagcggatgtccgcccagctcgcagctgctgaaagtcggcaaaaaaaactggaaatggaaaaactgcagctccaggccctggagcaagagcacaagaagctggcagcacgattagaggaggagcgagggaagaacaagcaggtggtgttgatgcttgtgaaggaatgcaaacagttatccgggaaagttattgaagaagcccagaaattagaagacgtcatggcgaaacttgaagaggaaaagaaaaaaaccaacgaacttgaggaggagctttctgccgaaaaacggaggtcaactgagatggaggcccagatggagaagcaattatccgaattcgatacagaaagagagcagctgcgggcaaagctgaaccgcgaggaagctcatacaactgacctcaaggaagaaattgacaagatgcggaagatgattgagcagctcaagcgcggctcagacagcaagccatcgctctctctgccccggaagacaaaggaccggcgcctggtctcaattagtgtaggcaccgaggggacagtgacaagaagtgtggcctgccagactgatctggtcacagagaatgctgaccatatgaaaaaacttccattgaccatgccagtgaagccttccaccggatcacccctggtgtcagctaacgctaaagggagtgtgtgcactagcgccacaatggctcgacctgggattgaccgacaggcgtcatatggggacttaattggagcctctgtccctgctttcccaccgccttccgcaaataaaatcgaagaaaacggcccatctactggcagcacccccgatccaactagttccacccctcctctcccatccaatgccgcccccccaacagcccagacccctgggatagcgccccagaattcccaggccccccccatgcactccctgcactccccatgcgccaacacctcacttcaccctggcctcaacccacggatccaggctgccaggtttcgatttcagggaaacgctaatgacccagaccagaatggtaatacaacccagtctcccccctcgagggatgtttctccaacgagccgagataatctcgtagccaagcagcttgccaggaatactgtgacacaggccctgagcaggtttacctctccccaagccggagccccctctcgccctggcgtaccgcctacaggggacgtcggcacacacccaccggttggacgtacatctctcaagacgcacggtgtagccagggtggaccgcggcaaccctcctccgatccctcccaaaaagccagggctgtcccaaaccccctcaccacctcatcctcaattaaaggtcattattgattccagcagagccagcaacactggtgctaaggtggataacaagaccgttgccagcactccttcttctctgccccagggcaatagagtcataaatgaagagaacttgcccaagtcgagcagcccacagctcccaccgaagccttctattgacctgacggtggcgcccgctggctgcgctgtctctgccctggccaccagtcaggtgggggcctggccggccgccacacccggactcaaccagccggcttgttccgactcatccttagtgataccaacaacaattgcattttgtagtagtatcaaccccgtctctgcttcctcctgccgcccgggggccagcgactcactcctggtgaccgcctccgggtggtccccgtctcttaccccacttctgatgagtggggggcccgctccactggccgggcgtccaacacttctccagcaggctgctgcccagggtaatgtgaccctgctgtctatgttactcaatgaagagggccttgacataaactatagttgcgaagacggccacagcgcactctacagcgccgccaaaaacggacataccgattgtgtgcgcctgctcctgtcagcagaggcccaggttaacgccgcagataaaaatgggtttaccccgctctgcgcggcagccgcacaggggcacttcgagtgcgtcgagctcctcatctcctacgatgccaacattaaccacgccgccgatggtggccagactccactgtatctggcctgcaagaacggcaataaagagtgtattaaactactgctggaggcaggtaccaacagatccgtgaaaaccaccgacggttggacacccgtgcacgccgccgtcgataccggaaatgtagacagccttaagctccttatgtatcaccgaatccctgctcatggaaactctttcaatgaggaggaatccgagagcagtgtgttcgacctcgatggcggtgaggagtccccagagggcattagcaagccagttgtccccgccgatctgattaatcatgccaaccgggaaggctggaccgctgcccatatagccgcctctaagggctttaaaaattgtctggagattctctgccggcatggtggcctggaacctgagaggcgagacaaatgcaataggaccgtgcatgatgtggccacagatgattgcaagcacctccttgagaaccttaatgccctgaagatcccgctgagaatctcagttggcgaaattgagccatcaaactatggtagcgacgacctggagtgcgagaacacaatttgtgctctgaacatccgtaagcagacatcatgggatgacttttctaaagccgtgtcccaggcactgactaaccactttcaagctattagttcggacggatggtggtctctagaagatgtcacgtgcaacaatacaacagactcgaatattggtctgagcgctcgaagcatccgcagcatcaccctgggcaacgtgccttggtctgtggggcagagcttcgcccagagcccctgggattttatgcgtaaaaacaaggccgaacacatcacagtgctgctgagtggtcctcaggaaggatgcctgtctagtgtcacctatgccagtatgatccccctgcaaatgatgcagaattacttgagactggtggagcagtatcataacgttattttccatggaccagagggcagcttgcaggactacattgtccaccagctcgctctgtgtttgaagcatagacagatggcggctggattctcttgcgaaattgtacgggctgaggtggatgccgggttttcaaaagagcagttactggaccttttcatctcttcagcttgtctcatacctgtaaagcagtcaccatctaagaagaaaattataatcattctggagaatcttgagaagtcaagcctttccgagttgctgagggactttctggctccactcgagaatcggtccaccgagtcaccttgtactttccagaaagggaacgggttgagtgagtgttactactttcatgagaactgctttcttatgggcaccatcgccaaagcctgtctccagggctcagatctgctcgtgcagcagcactttcgctgggtccagctcaggtgggatggcgagcccatgcaaggcctcttgcagcgattcttgagaaggaaggtggtgaacaaattcaaaggtcaggctcctagcccatgtgacccagtatgtaaaatcgttgattgggcactgagtgtttggcgacagctgaacagctgtctagcacgcctcgggactcccgaggcgctgctaggcccgaagtacttcctgagctgccctgttgtccccggccatgctcaggtaacggtgaagtggatgtcaaaattgtggaatggagttattgccccacgagtgcaggaggccatcctgtcccgcgctagtgtcaagaggcagcctggatttgggcagactacggcaaagaggcatcccagccaagggcagcaagccgtagtaaaagcggcactctcgatcctgctcaacaaagcggtgctccacggctgtcctttaccaagagctgagcttgaccagcacaccgctgacttcaagggcggttccttcccgctttcgatagtttcgtcctataatacctgtaacaagaagaagggagagtccggcgcgtggcgcaaggtaaacacatcaccacggagaaaaagtgggagattctccctcccaacatggaacaagcccgacctttccaccgagggtatgaagaacaagacaatctctcagcttaactgtaatcggaacgccagcctaagcaaacaaaaatccctcgagaacgacttatccttgactctcaatctggatcagaggctatctttgggatccgatgacgaagcggacttggtgaaggagctgcaatcgatgtgctctagcaaaagcgaaagcgacataagcaaaatcgccgattcccgagatgacctgcggatgtttgacagcagtgggaataaccccgttctgagcgccacaatcaacaatttgcgcatgcccgtgagtcaaaaggaggtctccccactctcttcccaccagacaactgagtgctcaaatagcaagagcaagacagaacttggtgtgtccagagtcaagagcttcttgcctgtgccacggagtaaagtcactcaatgctcacaaaacacaaagcgcagctcctcatcttccaatacgagacaaattgagatcaataataatagcaaggaggtaaactggaacctgcataagaatgaacatttggagaagcctaataaatag

SEQ ID NO: 228646 - DNA, 4992 bp, Artificial Sequence
  derived and/or modified sequence
atggccacagatggagccagctgtgagccagacctgagccgggccccagaagatgctgctggagctgctgctgaggccgccaagaaggagtttgatgtggacaccctgagcaagtctgagctgaggatgctgctgtctgtgatggagggggagctggaggcccgggacctggtgattgaggccctgcgggcccggaggaaggaggtgttcatccaggagagatatggccgcttcaacctgaatgaccccttcctggccctgcagagggactatgaagctggagctggggacaaggagaagaagcctgtgtgcaccaaccccctgagcatcctggaggccgtgatggcccactgcaagaagatgcaggagaggatgtctgcccagctggccgctgctgagagccggcagaagaagctggagatggagaagctgcagctgcaggccctggagcaggagcacaagaagctggccgcccggctggaggaggagcggggcaagaacaagcaggtggtgctgatgctggtgaaggagtgcaagcagctgagcggcaaggtgattgaggaggcccagaagctggaggatgtgatggccaagctggaggaggagaagaagaagaccaatgagctggaggaggagctgtctgctgagaagaggaggagcacagagatggaggcccagatggagaagcagctgtctgaatttgacacagagcgggagcagctgcgggccaagctgaaccgggaggaggcccacaccacagacctgaaggaggagattgacaagatgaggaagatgattgagcagctgaagaggggcagtgacagcaagcccagcctgagcctgcccaggaagaccaaggaccggcggctggtgtccatctctgtgggcacagagggcaccgtgaccaggtctgtggcctgccagacagacctggtgacagaaaatgctgaccacatgaagaagctgcccctgaccatgcctgtgaagcccagcacaggcagccccctggtgtctgccaatgccaagggctctgtgtgcaccagcgccaccatggcccggcccggcatcgaccggcaggccagctatggagacctgattggagcctctgtgcctgccttccccccaccttctgccaacaagattgaagaaaatggccccagcacaggcagcaccccagaccccaccagcagcaccccacccctgcccagcaatgctgccccacccacagcccagaccccaggcatcgccccccagaacagccaggccccacccatgcacagcctgcacagcccctgtgccaacaccagcctgcaccctggcctgaacccccgcatccaggccgcccgcttccgcttccagggcaatgccaatgaccctgaccagaatggaaacaccacccagagcccccccagcagagatgtgagccccaccagccgggacaacctggtggccaagcagctggccaggaacacagtgacccaggccctgagccgcttcaccagcccccaggccggggcccccagcaggcctggggtgcccccaactggagatgtgggcacccacccccctgtgggccgcaccagcctgaagacccacggcgtggcccgggtggaccggggcaaccccccacccatcccccccaagaagccaggcctgagccagacccccagccccccccacccccagctgaaggtgatcatcgacagcagccgggccagcaacacaggagccaaggtggacaacaagacagtggccagcacccccagcagcctgccccagggcaacagagtcatcaatgaggagaacctgcccaagagcagcagcccccagctgccccccaagcccagcattgacctgactgtggccccagctggctgtgctgtgtctgccctggccaccagccaggtgggcgcctggccagctgccaccccaggcctgaaccagcctgcctgcagcgacagcagcctggtgatccccaccaccatcgccttctgcagcagcatcaaccctgtgtctgccagcagctgcaggcctggggccagtgacagcctgctggtgacagccagcggctggagccccagcctgacccccctgctgatgtctgggggccctgcccccctggccggccggcccaccctgctgcagcaggccgccgcccagggcaatgtgaccctgctgtccatgctgctgaatgaggagggcctggacatcaactacagctgtgaagatggccacagcgccctgtacagcgctgccaagaatggccacacagactgtgtgcggctgctgctgtctgctgaggcccaggtgaatgctgctgacaagaatggcttcacccccctgtgtgccgctgctgcccagggccactttgaatgtgtggagctgctgatctcctatgatgccaacatcaaccacgccgcagatggcggccagacccccctgtacctggcctgcaagaatggaaacaaggagtgcatcaagctgctgctggaggccggcaccaacagatctgtgaagaccacagatggctggacccctgtgcatgctgctgtggacacaggaaatgtggacagcctgaagctgctgatgtaccaccgcatcccagcccacggcaacagcttcaatgaggaggagagcgagagctctgtgtttgacctggatggaggagaggagagccctgagggcatcagcaagcctgtggtgcctgctgacctgatcaaccacgccaaccgggagggctggacagctgcccacatcgccgccagcaagggcttcaagaactgcctggagatcctgtgcagacatggaggcctggagcctgagcggcgggacaagtgcaacagaacagtgcatgatgtggccacagatgactgcaagcacctgctggagaacctgaatgccctgaagatccccctgcgcatctctgtgggggagattgagcccagcaactacggcagtgatgacctggagtgtgagaacaccatctgtgccctgaacatcaggaagcagacctcctgggatgacttcagcaaggctgtgtcccaggccctgaccaaccacttccaggccatcagcagtgatggctggtggagcctggaggatgtgacctgcaacaacaccacagacagcaacatcggcctgagcgcccggagcatccgcagcatcaccctgggcaatgtgccctggagcgtgggccagagctttgcccagagcccctgggacttcatgaggaagaacaaggccgagcacatcaccgtgctgctgagcggcccccaggagggctgcctgagctctgtgacctacgcctccatgatccccctgcagatgatgcagaactacctgcggctggtggagcagtaccacaacgtcatcttccacggccctgagggcagcctgcaggactacatcgtgcaccagctggccctgtgcctgaagcaccggcagatggctgctggcttcagctgtgaaattgtgcgggcagaggtggatgctggcttcagcaaggagcagctgctggacctcttcatcagcagcgcctgcctgatccctgtgaagcagagccccagcaagaagaagatcatcatcatcctggagaacctggagaagagcagcctgtctgagctgctgcgggacttcctggcccccctggagaacagaagcacagagagcccctgcaccttccagaagggaaatggcctgtctgagtgctactacttccacgagaactgcttcctgatgggcaccatcgccaaggcctgcctgcagggcagtgacctgctggtgcagcagcacttccgctgggtgcagctgcgctgggatggagagcccatgcagggcctgctgcagcgcttcctgcggaggaaggtggtgaacaagttcaagggccaggcccccagcccctgtgaccctgtgtgcaagatcgtggactgggccctgtctgtgtggaggcagctgaacagctgcctggcccggctgggcaccccagaggccctgctgggccccaagtacttcctgagctgccctgtggtgcccggccacgcccaggtgacagtgaagtggatgagcaagctgtggaatggagtcatcgccccccgggtgcaggaggccatcctgagccgggcctctgtgaagaggcagcccggcttcggccagaccacagccaagaggcaccccagccagggccagcaggccgtggtgaaggccgccctgagcatcctgctgaacaaggctgtgctgcacggctgccccctgcccagggctgagctggaccagcacacagctgacttcaagggcggcagcttccccctgagcatcgtgtcctcctacaacacctgcaacaagaagaagggggagagcggggcctggaggaaggtgaacaccagccccaggaggaagagcggccgcttcagcctgcccacctggaacaagccagacctgagcacagagggcatgaagaacaagaccatcagccagctgaactgcaacagaaatgccagcctgagcaagcagaagagcctggagaatgacctgagcctgaccctgaacctggaccagaggctgagcctgggcagtgatgatgaggccgacctggtgaaggagctgcagagcatgtgcagcagcaagtctgagagtgacatcagcaagattgctgacagcagagatgacctgaggatgtttgacagcagcggcaacaaccctgtgctgagcgccaccatcaacaacctgaggatgcctgtgtcccagaaggaggtgagccccctgagcagccaccagaccacagagtgcagcaacagcaagagcaagacagagctgggcgtgtcccgggtgaagagcttcctgcctgtgcccaggagcaaggtgacccagtgcagccagaacaccaagaggagcagcagcagcagcaacacccggcagatcgagatcaacaacaacagcaaggaggtgaactggaacctgcacaagaatgagcacctggagaagcccaacaagtag

SEQ ID NO: 228647 - DNA, 4992 bp, Artificial Sequence
  derived and/or modified sequence
atggccaccgacggcgccagctgcgagcccgacctgagccgggccccggaagacgcagcaggggccgctgctgaagctgcgaagaaagagttcgatgtcgacacacttagtaagtcagaactgcgaatgttgttgagcgttatggaaggggaactagaagcccgagatcttgtgattgaggcactgcgcgcacggagaaaggaggtcttcatacaggaacgatacgggcgttttaatctgaacgaccctttcttggcccttcagagagactacgaggccggcgccggtgacaaagagaaaaaaccagtctgcaccaatcccctttccattttggaagccgtgatggcccactgcaagaagatgcaagagcgcatgtcagcccagctcgccgcagccgagagccggcagaagaagcttgagatggaaaagctacaactgcaggccctcgagcaggagcacaaaaagctggcagccaggctggaagaagaaaggggcaagaataagcaggtcgtgctcatgctcgtgaaggagtgcaaacagctgtccgggaaagtaattgaggaagcgcaaaagctggaggacgtgatggccaagctggaggaagagaaaaagaagacgaatgagctcgaggaagagctgagcgccgagaaaaggcgcagcaccgaaatggaggcccagatggagaagcagctctctgagttcgacaccgagagagagcagttaagagccaaacttaacagggaagaagcacataccactgacctgaaagaagagatcgacaagatgcgcaagatgatagagcagttgaagaggggctccgattctaagcctagcctttcgttgcctcggaaaactaaagataggagactggtttccattagcgtgggcaccgaggggaccgtgacccggtctgtggcctgtcagaccgacttggtaactgagaacgccgatcacatgaaaaagcttcccctcacaatgcctgtgaagccctccacggggtcaccactcgttagcgcaaacgccaaagggtccgtatgtacgtctgcaaccatggcgagacccggtattgaccggcaggcttcatacggtgacttaatcggagcctcagtgcccgccttccccccccctagcgctaacaagattgaggaaaatggccccagcacaggcagcactccggacccgacatcttccacacctcctctgccttctaacgcagcacctcctactgctcagactcctggaattgctccgcagaattcgcaggctcctcctatgcactcactgcactctccatgtgctaacacctcgttgcatccaggtctgaacccacgcatccaagccgcccggtttcgttttcaaggcaatgcaaatgaccctgatcagaatgggaacactactcagagtcctccctcaagagatgtatcgccgacgtctagggacaatctggtggcgaagcaacttgcacgcaatacagtgacacaggcgttaagtcgattcacgagtccgcaggctggagccccctcccgcccaggtgtccccccaacgggagatgttggcacccatccgcctgttggtcggactagtctgaaaacacacggcgttgcacgagtcgatcgtggcaaccccccacccattcctccaaaaaagcccggcttgagccagactccttccccccctcatccacagcttaaggttataatcgacagctctcgagcctccaacacgggtgctaaagtggacaataagaccgtggccagtaccccctcttccttgcctcagggtaacagggtaattaacgaagaaaatctgcctaaaagctcctccccccagctgccacctaaaccctcgattgacttgaccgtcgcacccgccggttgcgcagtatccgccttggccacctctcaagttggcgcgtggccggccgctacaccaggactgaatcagcctgcatgctctgattccagtcttgtcatacctaccacgatagcattttgttcaagtatcaatccagtctctgcatcgagctgccgacctggggcgagcgactctttgttggtgaccgcttcagggtggagcccaagcctgacaccgctgctaatgagtgggggacctgcccccctggcaggccggccaactttattacagcaggctgccgctcaggggaatgtaactctactttctatgctgctgaatgaagagggactggacattaattatagctgtgaagacggacactcagccttatatagtgcggcgaagaatggacacaccgattgcgtccgactgctccttagtgctgaggctcaggtgaacgccgccgataaaaatggatttaccccactgtgtgcggcggccgcccaaggccattttgaatgcgttgaactgttgatttcctatgacgccaacataaatcacgccgcagacggcgggcaaacacctctgtacctggcctgcaagaatggcaataaggaatgcataaaactgctgctggaggccgggactaataggtctgtaaaaacgactgatgggtggacccccgtacacgccgccgttgatactggaaatgtggatagcttgaagttactgatgtatcaccggattcctgcacatggaaatagcttcaacgaggaggagagtgagagctctgtatttgatttggatgggggcgaggaaagtcctgaaggcatctccaaaccggtggtgcccgctgatctcattaaccacgccaaccgagaaggttggacagcggcacacatcgcggcttccaaaggcttcaagaactgtctggaaatcctgtgtcgccatggaggactagagcctgaaaggagagacaagtgtaacaggacagtacacgacgtcgccactgatgactgcaaacaccttctggaaaatctgaacgcacttaagattcccctccgcatttcggttggtgagatcgaaccaagcaactatgggtcagatgatctggagtgcgaaaatacgatctgcgcccttaacatccgaaagcagaccagctgggatgactttagtaaagctgtgagtcaggctctgactaaccactttcaagcaatctcctctgatgggtggtggtctctcgaagatgtcacctgcaataatacgaccgattcaaacattgggctctccgcaagatccattcgttctatcacactgggtaacgttccttggagcgtcggccagtcattcgcccaatccccatgggatttcatgcgcaaaaataaggctgaacacatcacagtattgctctcaggccctcaggaaggctgtctgtcctccgtcacttacgcttccatgatacccctgcagatgatgcagaattaccttagacttgtggaacagtaccacaatgtgatatttcacggacctgaagggagtctccaggattacatagtccaccagcttgccctttgtctgaagcataggcagatggccgcaggattcagctgcgaaatcgtgagggccgaggtggacgctggcttctccaaggagcagctcctggatttgttcatcagctctgcctgtctgatccccgtgaagcagtccccatcaaagaagaagattatcatcattctggagaacctcgagaagtcttccctctccgaactgctacgggacttcctggcaccactggagaataggagcactgaatcgccttgcaccttccagaagggtaacggcctgtctgagtgttattattttcacgagaactgcttcctgatggggactattgccaaagcctgcctgcaggggagcgacttgctcgtgcagcaacactttcggtgggttcagctccggtgggatggagaacctatgcaggggctgctccagaggttcctgcgacgcaaggtggttaataaatttaaggggcaggcacccagcccatgtgatccggtctgtaagatcgttgattgggccctgtctgtgtggcgccaactcaatagctgtctggcacgccttggaaccccagaagccttgttaggcccgaaatattttcttagctgccccgttgtccctggtcacgcacaggtgacagtgaagtggatgtccaaactgtggaacggagtgatcgccccaagggtccaggaagctatattatcaagagctagcgtgaagcgccagccgggattcgggcaaaccacagccaaacggcatcccagtcagggtcagcaggccgttgtcaaggctgccctcagcatactcctgaacaaagcagtgttgcatggctgtccattgcctagagcggagctggaccagcacaccgctgattttaagggtgggtctttccccttatcaatcgtgtcgtcttataacacctgcaataagaagaagggcgagtcgggtgcgtggaggaaggttaacacttctccccgtcgaaagtctgggcggttctccctgccaacttggaacaaacccgacctttctaccgagggaatgaagaacaaaactataagccagctgaattgtaatagaaacgcctccctctccaagcagaagagtctagaaaatgatctaagtttgactctcaatctggaccagaggctatctctgggatccgatgacgaagccgatctggtgaaagagctccagagtatgtgctcgagtaagtctgaaagcgatatctctaagatcgccgactccagggatgatctaagaatgtttgattcatctggtaataatcctgtgctgagtgccactattaacaacctaagaatgccagtcagtcaaaaagaggtttcaccacttagtagccatcaaaccactgaatgctcaaatagcaaatcaaagacggaacttggagttagtagggttaagagtttcctgcccgtgcctaggagtaaggttacccagtgttcgcaaaacacgaagagaagttcaagcagcagtaatacccgccaaatcgaaatcaacaacaatagcaaggaggtgaattggaatttgcacaaaaacgaacacctggagaaaccaaataagtag

SEQ ID NO: 228648 - DNA, 4992 bp, Artificial Sequence
  derived and/or modified sequence
atggcgacggatggcgcatcgtgtgagcccgatctttccagggccccagaagacgccgctggagcagctgctgaggcggcaaagaaagagttcgatgtggatactttaagcaagtcagagctacgtatgctgctgagcgtaatggagggtgagctggaggccagagatctggtcattgaggcactccgagcgaggcgaaaagaagttttcattcaggagcgctatgggaggttcaatctgaacgacccattcctggccctgcagcgagattatgaggcaggagccggtgacaaagagaaaaaacctgtctgtactaatccattgagcattctcgaagcggtcatggcacattgcaagaagatgcaggaaaggatgagcgctcaattggcggcagcagaaagcaggcaaaaaaaattggagatggaaaagctgcaactgcaggccctcgaacaagaacacaaaaaattagcagctcgtctggaggaggagaggggaaagaataagcaggtcgtgctgatgcttgtcaaggaatgcaaacagctcagcgggaaagttatcgaagaggcacaaaagctggaggacgttatggcgaagctggaggaggagaaaaagaagacaaatgaattggaggaggagttaagcgcagagaagagacgaagcaccgagatggaagcacagatggaaaagcagctgagtgagttcgacacagagcgggaacagctgcgggctaaactgaatcgtgaggaggcacatacgactgacctgaaagaagaaattgacaaaatgaggaagatgattgagcagctgaagcggggaagtgactctaagcccagtctgagtctgcctaggaagacgaaggatcgccgtcttgtcagcatcagcgttggaacagagggcacggtcaccaggtccgttgcatgccaaacagacctcgtgactgagaacgccgatcatatgaagaagttgccactgacaatgccggtaaagcccagcaccggctcccccctggtgagcgccaatgccaagggatccgtgtgtactagtgcaaccatggctcgcccaggaattgatcggcaggcttcatatggcgatctgatcggggctagcgtgcccgctttcccaccaccttccgccaacaaaatagaagaaaatgggccttctacaggatccacccccgaccctaccagttcaacgcccccacttccctccaacgctgccccacctactgctcagacccctggcatcgccccacaaaactctcaggcacctccaatgcacagtctgcatagtccttgcgccaatacttcccttcacccaggactgaatccccgtatccaggccgctagattccgatttcagggcaatgccaacgacccagaccagaacgggaataccacacagtcacctcctagtagagacgtgtcacccaccagtcgggacaatctcgtggctaaacagctcgctagaaatacagtgactcaggcgttatcccgcttcacctcgccccaagccggagctccttctagaccgggagtgcccccaactggcgacgtaggtacacatcctccagttggacgcacaagcctgaagactcacggcgtggcccgtgtcgatcgtgggaatccaccacccattccccctaaaaagcctggcctgtcacagacaccttccccaccccaccctcagcttaaagttatcattgactcatctagggccagcaacaccggagccaaggtcgacaataagacagtagcctctaccccttcatctctgccccagggcaacagggtgatcaatgaggagaatttgcctaagtccagttcaccacagctgccacctaagccgagcatcgacctgacagtggcgcctgcgggatgcgccgtgtctgcactcgccactagtcaagtaggcgcttggccagccgcaacaccaggtctcaaccagcccgcatgcagtgactcctctcttgtgatccctactaccatagctttctgcagctccatcaacccagtgagcgcatccagctgtcgccctggcgcatccgatagtctactggtaacagcatctggttggtctccttctcttacacccctgttgatgagcggtggacctgcccctttagcaggcaggccgaccttgctacagcaagccgctgctcagggaaatgtcaccctgctctccatgctgctgaacgaggaaggcctggacatcaactattcctgcgaggatggccatagcgcattgtactccgcagccaaaaatggccatacggattgtgtgcgccttcttctatccgctgaggcccaggttaacgctgccgacaagaacggatttacccctctgtgcgctgcagctgcgcagggtcacttcgagtgtgtcgagctgcttatctcttacgacgcgaacatcaaccatgctgccgatggcggacaaacacctctgtacctcgcgtgcaaaaacggcaataaagagtgtatcaagctgctactggaagctggcactaaccggagcgtcaaaactactgatggttggacacctgtccatgccgcagttgataccggtaatgttgatagcttgaagctgcttatgtatcataggatcccggcacacggcaactcctttaacgaagaggaatccgaatctagtgtcttcgatctggatggtggcgaagaatccccggagggaatctctaagccagtcgtgccagccgacctgattaatcacgctaaccgtgagggctggacggctgcacatatcgccgctagcaaaggcttcaaaaactgccttgagatcctatgccgccacggtgggctagaacctgagagacgcgataaatgtaacaggaccgtccatgacgtcgctaccgacgactgtaagcacctgcttgagaatctcaatgcattaaagatcccgctcagaatctccgtcggcgaaatcgagccaagcaactacgggtccgatgaccttgaatgtgagaacaccatttgtgcacttaatattcgcaaacagacttcttgggacgacttcagtaaggccgtgtcgcaggccctgaccaatcatttccaagcaatctcatccgatggctggtggtcgctggaggatgttacctgcaacaacactacagacagcaacattggactcagtgctcgctccattaggtcaattacgttaggtaacgtcccctggagcgtggggcagtcttttgcccaatctccctgggatttcatgcgcaagaacaaggccgaacacatcactgtcttgttgagcggtcctcaagagggctgtctgtcctcagtcacctatgcctcaatgatccccctgcaaatgatgcagaactacttgaggcttgtggaacagtaccataatgtcatcttccacggcccagaaggttcattgcaggactacattgtgcaccaattggctctgtgtctgaaacaccggcagatggccgcaggatttagttgcgaaattgtccgggctgaggtcgacgccggtttttcaaaagaacaacttctggatttattcatctccagcgcctgtcttatcccagtcaagcagagccccagcaagaagaaaataattattattctggagaacctcgaaaaatcttctttgtcagagctcttgcgcgacttccttgctcccctcgagaataggtccaccgaaagtccatgcacctttcagaagggcaacgggctgtcagaatgctactatttccacgagaactgcttcctgatgggcaccattgccaaagcttgcctccaagggagtgatctcttggtccagcagcatttcaggtgggtacaactccgttgggacggagaacctatgcagggcctgctacaacggtttctgcggcgaaaggtggtgaacaaattcaagggccaagcacctagtccttgtgaccccgtgtgcaagatagtagactgggctcttagtgtgtggagacagctgaactcctgcttagcaagattaggaacgccagaagccctgttggggcctaagtattttttgtcttgtccagtggtgcctggccacgcccaggtgaccgttaagtggatgtctaaactctggaacggcgttattgctcctcgagtccaagaggcgattctcagtagagcaagtgtaaagcgacagccgggattcggtcagaccaccgccaaaaggcatccgagtcagggacagcaggcagtagttaaagctgccctgtccattctcctgaacaaagctgtgcttcatggttgccccctgcctcgggctgagttagaccaacataccgctgactttaaaggtgggagcttccccttgagtatagtgtccagctataacacgtgcaataagaagaaaggagagtccggggcttggcgcaaagtgaatacgagccccagaagaaagagcggcagattttctctgccaacatggaataaaccggacctgtcaactgaggggatgaagaacaagactattagccagctcaattgtaatcggaacgcgtcactctccaaacagaagagtcttgagaacgatctatctctcaccctgaatcttgaccaaaggctgtccctggggtccgatgacgaggccgacctggtcaaagaacttcaaagtatgtgcagcagcaaatcggagtccgatatctcaaaaatcgctgacagtcgcgatgatcttcggatgttcgatagctccggcaataatcctgtattatctgccacaataaacaacctccgcatgcccgtgtctcaaaaggaagtgagcccactttcttcacaccagacaacagaatgttcaaactctaagtcaaagactgaattaggcgtgtcccgagtgaaatcttttctgcccgtccccaggagcaaagtcacacagtgtagccaaaataccaagcggtcaagttcctcttcaaataccagacaaatcgaaatcaacaataattcgaaggaagttaattggaatctgcacaagaacgagcacctggagaaacctaacaagtag

SEQ ID NO: 228649 - DNA, 4992 bp, Artificial Sequence
  derived and/or modified sequence
atggccacagacggcgcgagctgtgagccggacttgtcaagagccccagaggacgccgctggtgctgcagctgaggctgctaaaaaagaattcgacgttgacaccctgtcaaagagtgagttgcgaatgctgctgtctgtcatggaaggcgaactggaagccagagacctcgtcatagaagccctgcgcgccagacgtaaagaggtgttcatacaagagcgatatggccgatttaacttgaacgaccccttcctggcactgcagagagactacgaggcaggagctggggataaagaaaaaaaacctgtatgcacgaacccactttctatcctcgaagcagttatggcccattgcaagaaaatgcaggagagaatgagcgcgcaactggcggctgccgagagccgacaaaagaagctggagatggagaaattgcagctacaagcgctggaacaagaacataagaagctcgccgctcgcctggaagaggaaaggggaaagaataagcaggttgtgctcatgttggtgaaagaatgcaaacagctatccgggaaagtaattgaagaggcccaaaagctcgaggacgtcatggccaagctggaagaggagaagaaaaagacaaacgaacttgaagaagagttgagtgcggagaaaagacgctctaccgagatggaagcccaaatggaaaagcagttaagcgagttcgacacagagagagaacagctccgcgcaaagctcaatagagaggaagcgcacactaccgatctgaaggaagaaattgacaagatgcggaagatgatcgagcagttgaagaggggaagcgactcaaagccatcattatcgctgcctagaaagaccaaggatcggcggcttgtcagtatctctgttggcactgaggggaccgttacaagatctgtggcttgtcaaacggatctcgtgaccgaaaacgctgaccatatgaagaagctcccactcactatgccggtaaagcccagtaccgggtcaccgcttgtgagcgcgaacgccaaaggctctgtctgtacttctgcgactatggcacggccaggtatcgatcggcaggcttcctacggagatctaatcggagcttcagtaccggctttccccccgcccagtgcaaataagatagaggaaaatggaccttctactggctccacaccagaccccacttcaagcactccccctctgccatctaacgccgcgccccctacagctcaaactccagggatagcccctcagaacagccaagctcctcctatgcactcactgcacagtccatgcgctaatacaagcttgcaccctggactgaatcctcgtattcaagctgcccgattccgctttcaaggtaacgctaacgacccagatcagaacggtaatacaacccaaagtcctccaagcagagatgtctctcccaccagcagagacaatctggttgcgaagcagctggctcgaaatacggttacacaggcacttagtcgatttacaagtccacaagcaggagctccctccagacccggggtgccccccacaggcgacgtcggcacacacccccctgtcggaagaacatccctcaaaacccacggagtagctcgcgttgatcggggcaacccacctcccatcccacccaagaagccgggcctttcacaaactccatcacccccccacccccagttgaaggtgatcatcgacagcagccgcgcatctaataccggagctaaagtcgataacaaaacagtcgcttccacaccttcttccctccctcaaggcaatcgggtgattaacgaggaaaacctgcccaagtcgtcaagcccacagctgcccccaaaaccatcaatcgacctgactgttgcccccgctggatgcgcggtctccgcgttggcgacttctcaagtcggggcttggcctgccgccacacctggcctgaaccagccagcatgttccgactccagcttggtgatccctacaactattgccttctgttcttctatcaacccagtgagtgccagctcctgccgaccgggagcttccgactcactcctcgtcaccgccagcggctggtctccatctttaacccctcttttaatgtcaggaggcccggccccactggcgggacgcccgacactgctgcagcaggccgccgcccaggggaatgtaaccctcctgagtatgctgctgaacgaagagggtctggacatcaactactcctgcgaggatggccactccgccctttactcagccgcaaaaaacggtcatactgactgtgtcaggctgctgctctccgctgaggctcaggttaatgctgctgataagaatggcttcaccccactgtgcgccgccgcagcacaaggacactttgagtgcgtggagctcctgatctcatatgatgcaaacattaatcatgccgccgacggcggccagacccccctatacctggcttgtaagaacggaaacaaagaatgcattaagctgctccttgaagccggaacgaatcgctctgtgaaaactacagacgggtggactccagttcacgctgccgttgacactggcaacgtcgattcgttgaaacttctcatgtaccatcgaatcccagcccacggcaattcctttaacgaggaggagtccgagtcctccgtcttcgacctggacgggggagaggaatcccccgaaggcatttccaagccagtggtacctgctgatctgattaatcacgcgaacagagaaggttggactgccgcccatatagctgctagcaagggctttaagaactgtctcgaaatcctgtgtaggcatggaggtcttgaaccagagaggcgtgacaagtgtaaccgcactgtgcatgatgtagctaccgacgactgcaaacatcttcttgaaaatctgaatgccctgaagatcccacttaggatctcagtcggagagatagaacctagcaattacggctccgacgatctggagtgtgaaaacaccatatgcgccctgaatattcggaaacagactagctgggacgatttcagcaaggccgtgtctcaggctctaaccaaccacttccaggctatctccagcgatggttggtggagtctcgaggatgtgacctgtaacaataccaccgatagcaacattggattgagcgctagatcaatccgatcgatcactctgggtaatgtaccgtggtccgtcggccaatcctttgcccagagcccgtgggactttatgaggaagaacaaagccgagcatattactgtgttgcttagcgggcctcaggaggggtgcctgtcttccgtaacatacgcaagcatgataccactgcaaatgatgcagaattatctcaggctggtggaacagtaccataatgttatcttccatgggcctgagggcagccttcaggattatattgtccaccagctcgctctctgcctaaaacataggcagatggcagccggtttctcctgcgaaattgtgcgtgcggaagttgacgccggcttctccaaggagcagctcttggacctctttatctcatcggcttgtctgattccagtgaagcaatccccatcaaaaaagaaaattatcattatcctcgaaaatctggaaaaatcctcattatccgagctcttgcgggactttttggcacccctggagaataggagtacagagagcccctgcaccttccagaaggggaacggccttagcgaatgctactatttccacgaaaactgcttcctaatgggaaccatcgcaaaagcatgtttacaaggatctgatcttcttgtacagcagcactttcggtgggtacaactcagatgggacggcgaaccaatgcagggtcttctgcagcgcttcctcaggagaaaggtcgtaaacaagtttaaaggccaggctccctctccttgcgatcccgtctgcaaaatagtggactgggctctgtctgtttggagacaacttaactcttgtttagcccggcttgggacgccagaagcattacttgggcccaaatactttctttcgtgtccagtggtgcccggtcatgctcaggttacagtcaaatggatgagcaagctatggaatggggtcatcgcgcctagagttcaggaggcgatcctctcccgagcatctgtcaaacgtcagcccggttttggccagaccacggctaagagacacccttcacagggccagcaggctgttgtgaaggcggcgttgtctatcctcttaaacaaggccgtgctccacggttgcccacttcctcgtgccgagctcgatcagcacacagcggacttcaaaggcggatctttccccttaagcatcgtgagctcttataatacttgtaataaaaaaaagggagaaagcggagcctggcgcaaagtgaacacctcaccacgccgcaaatccggtagattttctctgccaacctggaataaacccgacctttccaccgagggaatgaagaacaaaaccataagccaactcaattgtaaccgtaacgccagtctgagtaagcaaaagtcactagagaacgatctgtctcttacactcaacttggatcagaggttgagcctgggtagcgatgatgaggctgacctggttaaggagctgcagtctatgtgttcctccaaaagcgaatcagacatatcaaaaatagccgatagcagagatgacttaagaatgtttgattcatccggcaacaacccggtgctgagcgccaccattaataatcttagaatgccagtaagtcaaaaagaagtgagcccattatcatcacaccaaacaaccgagtgcagcaattcaaagtcaaaaacggagctgggagtcagtagggtaaagagctttttgcccgtcccgaggtcgaaggtgacacagtgctcccagaacacgaaaagatcttccagttcttccaacacaagacagatcgagattaataacaattctaaagaagtgaactggaacttacacaagaacgagcacctcgagaaacccaacaagtag

SEQ ID NO: 228650 - DNA, 4992 bp, Artificial Sequence
  derived and/or modified sequence
atggccacagatggagcaagctgtgaacccgatctgtcccgggcaccagaagatgcagctggagccgcagcagaagcagccaagaaggagttcgacgttgacaccctgagcaagagtgagcttcgcatgctcctctccgtcatggagggtgagttagaagcgcgcgacctggttatcgaagcactccgcgcccgacggaaagaagtattcatccaggagaggtatggaaggtttaacctcaatgacccattcctcgccctccaaagagattacgaagcaggcgccggcgataaagagaaaaagcctgtctgtaccaacccactgtcaattttggaagcagtcatggcacattgtaaaaaaatgcaggagagaatgagcgcccagctcgcggcagctgaatcccggcagaagaaactggagatggaaaagctacagcttcaggccttagaacaggagcataaaaaactcgccgcacgactcgaagaggaaagaggcaaaaacaaacaagttgtactgatgctggtcaaagaatgcaaacagctttccgggaaggtgatcgaagaggcacagaagctggaggacgtgatggccaaactagaggaggagaagaaaaagaccaacgagctggaggaagagttgtcagcggaaaagcggagatctactgaaatggaagcccaaatggaaaagcaactttcggagtttgatacagagagagagcagctgcgagccaaattgaaccgggaggaagcccacactaccgacctgaaagaggaaattgataagatgagaaagatgatagaacagctaaagcggggatctgatagcaaaccgagtttgagtttgccacgaaagaccaaggatcgcagactggtatccatttccgttgggacagaggggaccgtaacccgctctgtcgcctgtcagaccgacctggtcactgagaacgccgaccacatgaagaagctcccccttactatgcccgtcaagccttcaacaggctcgcctctggtctccgctaatgccaagggcagtgtgtgcacctccgcgaccatggcacgcccgggaatcgatagacaagcctcatacggagacctaattggcgcatccgtaccagctttccctccgccctctgccaataagatcgaagaaaacggcccctcaactggttcaacccccgacccaacctctagtacccctcctttgccgtctaacgccgctcccccaactgctcaaacccccggcattgctccccagaattcacaggcccccccaatgcactccctccatagcccttgcgcgaacacatcactacatcccggtttaaacccacggattcaagctgcacggttcaggtttcaaggtaatgctaatgatccagaccagaacggaaacactacgcagtcaccacccagtcgagacgtgagccctacatccagagacaaccttgtggccaaacagcttgctagaaacaccgtgacccaagccctgagccggttcaccagtccacaagcaggagctccctccagacccggggtgccccccacaggcgacgtcggcacacacccccctgtcggaagaacatccctcaaaacccacggagtagctcgcgttgatcggggcaacccacctcccatcccacccaagaagccgggcctttcacaaactccatcacccccccacccccagttgaaggtgatcatcgacagcagccgcgcatctaataccggagctaaagtcgataacaaaacagtcgcttccacaccttcttccctccctcaaggcaatcgggtgattaacgaggaaaatttacccaagagctcttccccccagctgcctcccaaaccaagcatcgatctcacagtcgcccccgcaggatgtgctgtgagcgcacttgctacatcacaggtgggagcctggccagctgccacacctggacttaatcaacctgcatgttcagactcaagcctcgtgatccctaccaccatcgcattctgttcgtccatcaacccagtgtctgcttcatcttgtagacccggcgcttccgactcgctcctcgtaacagcctccggctggagcccttccctgaccccactcctgatgagcggcggacccgccccactcgccgggcgcccaacgctcctgcagcaggctgccgctcagggaaatgtgacacttctctccatgttattaaatgaggaagggctggacataaactactcttgcgaagacggacattctgccctctactccgcagccaaaaatggacatactgactgcgtcagactgttgctcagcgcagaggcccaggtgaacgccgccgataagaacggatttactcccctctgcgccgctgctgctcaaggtcatttcgaatgcgtggagctcttgatctcatacgatgctaacattaatcacgctgccgatgggggccagacacctttatacctagcttgcaaaaatggcaataaggagtgtatcaaactgctgttagaagcgggcacaaacaggagcgtaaagacaaccgacggatggacaccagttcatgcggcggtagacaccggtaatgttgactctctgaaattacttatgtaccaccgcatccccgcccatggaaatagcttcaatgaagaggagtcggagagctccgtctttgacttggatggtggcgaggagagccccgagggaatttcaaaacccgttgtgccagctgacctaattaatcatgccaaccgggaaggttggacggctgcacatatcgccgctagtaaaggattcaaaaattgtctggaaattctgtgcagacacggggggcttgagccagaacggcgagataagtgtaaccggaccgttcatgacgtcgccacagacgattgtaaacatttgctagaaaacttaaacgctttgaaaatacccctgcggattagtgtgggagagatcgagccgtctaactatggtagtgacgacctggaatgcgagaatacaatttgtgccctaaacataagaaagcagacttcatgggatgacttctctaaggccgtgtctcaagccctgactaaccatttccaggctatttcttctgacggctggtggtcactcgaggacgttacttgcaataacacaactgactctaacataggtttgtctgcacgaagcatacgctctatcaccctggggaatgtgccctggtccgtcggtcaatcctttgcccagagcccatgggattttatgaggaaaaataaggcagaacacatcacagtactcctgtcagggcctcaagagggctgtttgtcttcggtaacttacgcatcaatgattccactccaaatgatgcagaattatctgaggcttgtcgagcagtatcataatgtcatatttcatggaccagaagggtctctccaagactacatagttcatcaactggctctgtgtctcaagcacaggcaaatggctgccggattttcttgcgagatagtgcgcgccgaagtggatgctggatttagtaaggaacagctgctggatctgttcatcagtagtgcttgtctgatccctgttaagcagagcccatcaaagaagaagattattatcatcctcgaaaatctggaaaaatcctcattatccgagctcttgcgggactttttggcacccctggagaataggagtacagagagcccctgcaccttccagaaggggaacggccttagcgaatgctactatttccacgaaaactgcttcctaatgggaaccatcgcaaaagcatgtttacaaggatctgatcttcttgtacagcagcactttcggtgggtacaactcagatgggacggcgaaccaatgcagggtcttctgcagcgcttcctcaggagaaaggtcgtaaacaagtttaaaggccaggctccctctccttgtgatcctgtttgtaaaattgtggactgggctctgtccgtgtggagacagctgaattcgtgtcttgcccggctaggcacaccagaagcccttttaggccccaagtattttctgagttgcccagtagtcccaggccacgctcaggtaacagtgaaatggatgtcgaaactttggaatggtgtgatcgcacctcgcgtgcaggaggccatcttatcccgagcgtcagtgaagcgccagcccggattcggacaaaccacggcaaagcgccacccttctcaggggcaacaagccgttgttaaagccgcgctttctatactcctgaataaggctgtgctgcacggctgccctctgcctcgcgccgaacttgaccagcataccgccgactttaaagggggatcttttcctttaagcatcgtgagctcatacaacacttgcaataaaaagaagggagaatctggagcctggcggaaagtgaacacctcacccagacgaaaatcaggccggttctcactgcctacctggaataagcccgatctcagcactgaagggatgaaaaacaagaccatctctcaacttaattgtaatagaaatgccagtctgtctaagcagaagagccttgagaacgatctctccctgacccttaatttagatcagagactgtcattgggtagcgacgatgaagctgatttggttaaagagcttcagagtatgtgcagctccaagtccgagagtgacatctctaaaattgccgacagccgcgacgaccttcggatgttcgactcgtcaggaaataaccctgtcctgtccgccaccattaataaccttaggatgcctgtgagccagaaagaagtcagtccattatcaagtcatcagacaacagagtgctctaactcgaagagtaaaaccgagctaggggtgagtcgcgtgaagagcttcttaccagtgccccggtctaaagttacccagtgctcacagaataccaaaaggagcagctcatcaagcaacaccagacagatcgaaatcaataataatagtaaagaagtgaattggaacctgcataagaacgagcatcttgaaaaacccaataaatag

SEQ ID NO: 228651 - DNA, 5970 bp, Artificial Sequence
  derived and/or modified sequence
ggacagcagcgggttaagtgccgcccgcgcggagacggctgagtccggagccgcggctccgagctcgcattcggatccgctagagcaggaagatggcgacggacggcgcgagctgcgagcccgacttgtcccgggccccggaggacgcggcgggggccgcggcggaggcggcgaaaaaagagtttgatgtggatactctcagtaaatccgagctgcggatgctcctcagcgtgatggaaggggagctggaggccagagaccttgtcatcgaggccctgcgggctcgcaggaaggaggtatttatccaggaacggtatgggagatttaatctaaatgacccgttcctggcactccagagagactatgaagcaggtgctggtgacaaagagaagaagccagtttgtaccaaccccctctccatccttgaagcagtcatggcccactgcaagaaaatgcaagaaaggatgtccgcacagctggctgctgctgagagcagacaaaagaagctggaaatggagaagcttcagctacaagcccttgagcaagagcacaagaagctggctgcccgccttgaggaagagcgtggcaagaacaagcaggtggtcctgatgctggtcaaagagtgcaagcagctctcaggcaaagtcatagaggaggcccagaagctcgaagacgtaatggccaaactggaagaggaaaagaaaaagacgaatgaattagaagaggaactctccgctgagaaacgaagaagcacagaaatggaagctcagatggaaaaacaactctctgagtttgacactgagcgggaacagcttcgtgccaagctgaaccgggaagaagcacacaccactgacctcaaagaggagatagacaagatgaggaaaatgattgagcaactgaaaaggggaagtgacagcaaaccaagcctctctcttccacggaagacaaaagataggcgtttggtttccatatctgtgggaacagaaggaactgtgacaaggtctgttgcatgccagacagacctagtgacagaaaatgctgaccacatgaaaaagttgcctttaaccatgcctgtaaaaccttccacagggagtcccctagtttctgcaaatgcaaaagggagcgtgtgcaccagtgccaccatggccagaccaggtattgacaggcaggcttcctatggtgacttgattggcgcttctgtacccgctttcccacctccaagtgcaaacaaaattgaggaaaatggaccaagcactggctcaacaccagatccaaccagtagcacacccccacttcccagtaacgctgcccctcccaccgctcaaacaccaggcatagctcctcagaactcgcaagctccacctatgcacagtttacattcaccatgtgccaacacctctttgcatccaggtctaaacccacgaatccaagcagctagatttagatttcagggcaatgctaacgacccagaccaaaatggaaatactacccaaagtcctccgtcaagagatgtctcgcctacaagtcgtgacaacctagtggccaaacaactagctcggaatactgtgacccaagcactgtcaagatttacaagccctcaagcaggtgctccctcaaggcctggagtgcccccaacaggggatgttggcacccaccctccagttggtcggaccagtttaaagactcatggtgtagcacgagttgacagaggaaatcctcctcctatccctccaaaaaagccagggctctcccaaactccttctccaccacacccccaactcaaggttattatagacagcagcagggcctcgaacacaggggccaaagttgataacaaaactgtggcttcgactccttccagtttgccacaagggaacagggtgatcaatgaggagaaccttcctaagtcatcctcccctcagctgccaccaaaaccatccatagatttaactgtggcacctgcaggctgtgccgtttcagccctggccacgtctcaggtgggtgcctggcctgctgcaacccccggactgaaccaacctgcatgttcagacagttcccttgtcattcctaccaccattgccttttgctcttccataaaccccgttagtgcctcatcctgtagaccaggtgcctcagacagcctcctggtaacagcatcaggctggtcaccctccctaacccctttgctaatgagtggtggtcctgcccccctggctggcaggcccacccttcttcagcaagctgctgcccagggaaatgtcactttattatcaatgctgcttaatgaagaaggactggacattaattactcctgtgaagatggccattctgccttgtattctgctgctaagaatggacatacagactgtgtgagattgctgctgagtgcagaagcccaagtcaatgctgctgataaaaatggcttcacacccttgtgtgctgcagctgctcagggacatttcgagtgtgtagaattattaatttcatatgatgctaacattaatcatgctgctgatggaggacagacacctctatacctggcctgtaaaaatggaaataaagaatgtattaaactcttgttggaagctggaaccaatcgaagtgtaaaaaccacagatggctggacaccagttcacgcagctgtggacactggtaatgtggacagcctcaagcttcttatgtaccatagaataccagctcatggaaattctttcaatgaggaggagtccgagtcaagtgtctttgacttggatggaggagaagagagtcctgaaggcatatccaagcctgttgttcctgcagacctcattaaccacgccaacagagaaggctggactgctgcccacattgctgcttccaaaggttttaagaactgcctagaaatcttgtgtaggcacggagggcttgagccagaaaggagagacaagtgcaatcggactgtgcatgatgttgccactgatgactgcaagcatttgctggagaatctgaatgctcttaaaatacccttaaggatttcagtgggtgagattgaaccaagcaactatggttctgatgacttggaatgtgaaaacacaatatgtgctttaaatatccgcaaacagacatcatgggatgatttttcaaaagcagtgagtcaagctctgacaaatcatttccaggcaatctcttctgatggatggtggagtctggaagacgtgacttgcaataacaccactgattccaacatcggcctcagtgcaagaagcatacgatccatcacgctaggaaatgtgccgtggtcagtgggtcagagcttcgcgcagtccccgtgggactttatgaggaagaataaggcagagcacatcactgtgcttttgtcaggtcctcaagaaggctgtctcagtagtgtgacttatgcctccatgatccctctccagatgatgcagaactacctcaggctggttgagcaatatcataatgtcattttccacggcccagaaggaagcttgcaagactacatagtacatcagcttgcactctgcctgaagcacagacaaatggctgcaggattctcctgtgaaatagtgagagctgaagtagatgctggtttttccaaggaacagctactagacctgttcattagtagcgcttgtctgatcccagtgaaacaatctcccagtaagaagaaaatcatcatcattttagaaaatttagaaaaatcttcactgtcggagttattgagggactttttggcacctcttgaaaatcgcagcactgaaagcccctgcactttccaaaaaggaaatggactgtccgaatgttattactttcatgagaactgctttctgatgggaaccatcgccaaggcctgtctccagggctccgacttgctggtgcagcagcatttccgctgggtgcagctgcggtgggatggcgagcccatgcaaggactgctgcagaggttcttacgaaggaaagttgtgaataagttcaaaggtcaggcgccctccccctgcgatcctgtgtgcaagattgtcgactgggctctgtccgtctggcgtcagcttaactcctgcctggcccgcttgggcacacctgaagcacttcttggaccaaaatatttcctgtcttgtcctgtagttcctgggcatgcccaagtgacagtgaagtggatgtctaagctgtggaatggcgtcatcgcacccagagttcaagaagcaatattgtcaagagcctctgtgaaaagacaacctggctttgggcagacaactgctaaaagacaccctagccaaggacagcaggctgtggtcaaagctgctctcagcatcttgctaaataaagctgtactgcatggctgtcccctccccagagcagagctagaccagcatacagctgatttcaaaggaggaagtttccctttatccatagtttccagttataacacttgtaacaagaagaaaggagagagtggtgcctggagaaaggtgaacaccagtcctcgcaggaagtctggccgcttctctttacccacctggaataagccagacctaagcactgaaggtatgaaaaataagactatatcacagctgaattgtaacaggaatgcttctctgtcaaaacaaaagtctttagagaatgatctatcactgacgttgaatttggatcagagactctctctgggttcagatgacgaagcagatcttgtcaaggaacttcagagcatgtgctccagcaagtctgagtctgatatcagcaagattgctgattccagggatgatttaaggatgtttgatagttctggaaacaaccctgtactttcagcaactattaataatctgagaatgccagtgtcacaaaaggaggtcagtcctctcagcagccatcaaactactgaatgcagcaacagtaaatcaaagactgagttgggtgtttcaagagttaaatcttttcttcctgttcctagaagtaaagtcacccagtgttcccagaacaccaaaagaagcagcagcagcagtaatacaaggcaaatagaaatcaacaacaactcaaaagaagtgaattggaacttacacaaaaatgaacacctagaaaaacctaacaaataggcctgcctacaatattctcattattaacttcctctatttcacacagaaaccaaggacaacaagatacaaatacctttaaattgataaaatgttttcactgtaatataaattatgagtgcgggaccactattcaatttttttttgtaaagaatgtatttataaccaacattttgttgcttttttttttaattctgtaggattgaacttcaataccaggaagttatgccaacttttcaagtagttttataatagaaaaattgtaatagttttaatcaagatgttcaggggtattaaaacagaactgtgtactgtatatctgtatatatgtatatatgtatgtatatttaaggaagtccagaaatcatactgcatacatgctacaaaaaagtagcaaaaaagtacaaagttggcttagataacttgtaccgttttaaatggagatcataattttatgttcacttgatggggaatgactagaatggggcaataacaaatcatttctaaacagttattttccattaaaagccatattaagtattttgcttgttaaattctagttttatgttttaaatctcttagtggttacattgccatttggtagcatcatgtatatatttatgcttataagtttgcattatgactcctgtaaaatatgaaattataatgcaataaaagtgttatctttcttacaaaagttttgtacctaagtggatatagataactgcataaatgaataaattcagaattaactccttcaatatttctagtagcacaactgataatattgatattttctacaaatgttacttctaaaattacagacaaaattacttacacaattcagttaagatgctttgacactgaataaaatattgatttcatgaaa

SEQ ID NO: 228652 - DNA, 4992 bp, Artificial Sequence
  derived and/or modified sequence
atggccaccgacggcgccagctgcgagcccgacctgagcagagcccccgaggacgccgccggcgccgccgccgaggccgccaagaaggagttcgacgtggacaccctgagcaagagcgagctgagaatgctgctgagcgtgatggagggcgagctggaggccagagacctggtgatcgaggccctgagagccagaagaaaggaggtgttcatccaggagagatacggcagattcaacctgaacgaccccttcctggccctgcagagagactacgaggccggcgccggcgacaaggagaagaagcccgtgtgcaccaaccccctgagcatcctggaggccgtgatggcccactgcaagaagatgcaggagagaatgagcgcccagctggccgccgccgagagcagacagaagaagctggagatggagaagctgcagctgcaggccctggagcaggagcacaagaagctggccgccagactggaggaggagagaggcaagaacaagcaggtggtgctgatgctggtgaaggagtgcaagcagctgagcggcaaggtgatcgaggaggcccagaagctggaggacgtgatggccaagctggaggaggagaagaagaagaccaacgagctggaggaggagctgagcgccgagaagagaagaagcaccgagatggaggcccagatggagaagcagctgagcgagttcgacaccgagagagagcagctgagagccaagctgaacagagaggaggcccacaccaccgacctgaaggaggagatcgacaagatgagaaagatgatcgagcagctgaagagaggcagcgacagcaagcccagcctgagcctgcccagaaagaccaaggacagaagactggtgagcatcagcgtgggcaccgagggcaccgtgaccagaagcgtggcctgccagaccgacctggtgaccgagaacgccgaccacatgaagaagctgcccctgaccatgcccgtgaagcccagcaccggcagccccctggtgagcgccaacgccaagggcagcgtgtgcaccagcgccaccatggccagacccggcatcgacagacaggccagctacggcgacctgatcggcgccagcgtgcccgccttccccccccccagcgccaacaagatcgaggagaacggccccagcaccggcagcacccccgaccccaccagcagcaccccccccctgcccagcaacgccgccccccccaccgcccagacccccggcatcgccccccagaacagccaggccccccccatgcacagcctgcacagcccctgcgccaacaccagcctgcaccccggcctgaaccccagaatccaggccgccagattcagattccagggcaacgccaacgaccccgaccagaacggcaacaccacccagagcccccccagcagagacgtgagccccaccagcagagacaacctggtggccaagcagctggccagaaacaccgtgacccaggccctgagcagattcaccagcccccaggccggcgcccccagcagacccggcgtgccccccaccggcgacgtgggcacccacccccccgtgggcagaaccagcctgaagacccacggcgtggccagagtggacagaggcaaccccccccccatcccccccaagaagcccggcctgagccagacccccagccccccccacccccagctgaaggtgatcatcgacagcagcagagccagcaacaccggcgccaaggtggacaacaagaccgtggccagcacccccagcagcctgccccagggcaacagagtgatcaacgaggagaacctgcccaagagcagcagcccccagctgccccccaagcccagcatcgacctgaccgtggcccccgccggctgcgccgtgagcgccctggccaccagccaggtgggcgcctggcccgccgccacccccggcctgaaccagcccgcctgcagcgacagcagcctggtgatccccaccaccatcgccttctgcagcagcatcaaccccgtgagcgccagcagctgcagacccggcgccagcgacagcctgctggtgaccgccagcggctggagccccagcctgacccccctgctgatgagcggcggccccgcccccctggccggcagacccaccctgctgcagcaggccgccgcccagggcaacgtgaccctgctgagcatgctgctgaacgaggagggcctggacatcaactacagctgcgaggacggccacagcgccctgtacagcgccgccaagaacggccacaccgactgcgtgagactgctgctgagcgccgaggcccaggtgaacgccgccgacaagaacggcttcacccccctgtgcgccgccgccgcccagggccacttcgagtgcgtggagctgctgatcagctacgacgccaacatcaaccacgccgccgacggcggccagacccccctgtacctggcctgcaagaacggcaacaaggagtgcatcaagctgctgctggaggccggcaccaacagaagcgtgaagaccaccgacggctggacccccgtgcacgccgccgtggacaccggcaacgtggacagcctgaagctgctgatgtaccacagaatccccgcccacggcaacagcttcaacgaggaggagagcgagagcagcgtgttcgacctggacggcggcgaggagagccccgagggcatcagcaagcccgtggtgcccgccgacctgatcaaccacgccaacagagagggctggaccgccgcccacatcgccgccagcaagggcttcaagaactgcctggagatcctgtgcagacacggcggcctggagcccgagagaagagacaagtgcaacagaaccgtgcacgacgtggccaccgacgactgcaagcacctgctggagaacctgaacgccctgaagatccccctgagaatcagcgtgggcgagatcgagcccagcaactacggcagcgacgacctggagtgcgagaacaccatctgcgccctgaacatcagaaagcagaccagctgggacgacttcagcaaggccgtgagccaggccctgaccaaccacttccaggccatcagcagcgacggctggtggagcctggaggacgtgacctgcaacaacaccaccgacagcaacatcggcctgagcgccagaagcatcagaagcatcaccctgggcaacgtgccctggagcgtgggccagagcttcgcccagagcccctgggacttcatgagaaagaacaaggccgagcacatcaccgtgctgctgagcggcccccaggagggctgcctgagcagcgtgacctacgccagcatgatccccctgcagatgatgcagaactacctgagactggtggagcagtaccacaacgtgatcttccacggccccgagggcagcctgcaggactacatcgtgcaccagctggccctgtgcctgaagcacagacagatggccgccggcttcagctgcgagatcgtgagagccgaggtggacgccggcttcagcaaggagcagctgctggacctgttcatcagcagcgcctgcctgatccccgtgaagcagagccccagcaagaagaagatcatcatcatcctggagaacctggagaagagcagcctgagcgagctgctgagagacttcctggcccccctggagaacagaagcaccgagagcccctgcaccttccagaagggcaacggcctgagcgagtgctactacttccacgagaactgcttcctgatgggcaccatcgccaaggcctgcctgcagggcagcgacctgctggtgcagcagcacttcagatgggtgcagctgagatgggacggcgagcccatgcagggcctgctgcagagattcctgagaagaaaggtggtgaacaagttcaagggccaggcccccagcccctgcgaccccgtgtgcaagatcgtggactgggccctgagcgtgtggagacagctgaacagctgcctggccagactgggcacccccgaggccctgctgggccccaagtacttcctgagctgccccgtggtgcccggccacgcccaggtgaccgtgaagtggatgagcaagctgtggaacggcgtgatcgcccccagagtgcaggaggccatcctgagcagagccagcgtgaagagacagcccggcttcggccagaccaccgccaagagacaccccagccagggccagcaggccgtggtgaaggccgccctgagcatcctgctgaacaaggccgtgctgcacggctgccccctgcccagagccgagctggaccagcacaccgccgacttcaagggcggcagcttccccctgagcatcgtgagcagctacaacacctgcaacaagaagaagggcgagagcggcgcctggagaaaggtgaacaccagccccagaagaaagagcggcagattcagcctgcccacctggaacaagcccgacctgagcaccgagggcatgaagaacaagaccatcagccagctgaactgcaacagaaacgccagcctgagcaagcagaagagcctggagaacgacctgagcctgaccctgaacctggaccagagactgagcctgggcagcgacgacgaggccgacctggtgaaggagctgcagagcatgtgcagcagcaagagcgagagcgacatcagcaagatcgccgacagcagagacgacctgagaatgttcgacagcagcggcaacaaccccgtgctgagcgccaccatcaacaacctgagaatgcccgtgagccagaaggaggtgagccccctgagcagccaccagaccaccgagtgcagcaacagcaagagcaagaccgagctgggcgtgagcagagtgaagagcttcctgcccgtgcccagaagcaaggtgacccagtgcagccagaacaccaagagaagcagcagcagcagcaacaccagacagatcgagatcaacaacaacagcaaggaggtgaactggaacctgcacaagaacgagcacctggagaagcccaacaagtag

SEQ ID NO: 228653 - protein, 112 aa, Artificial Sequence
  derived and/or modified sequence
MGSRLSQPFESYITAPPGTAAAPAKPAPPATPGAPTSPAEHRLLKTCWSCRVLSGLGLMGAGGYVYWVARKPMKMGYPPSPWTITQMVIGLSIATWGIVVMADPKGKAYRVV

SEQ ID NO: 228654 - DNA, 2755 bp, Artificial Sequence
  derived and/or modified sequence
taaggagactgaaaggtgattcatttagtgagtagcgattacagaatttctaaaacagtgggggcggggggggcggcggggaggagggctggaattgtcctccagcgcatacaaggttgttgctgccagagaaatccagcaggaaagagcagcattctttcaccttttccgcctctgaagcggaggagaacttcatttcccagcagcccttaagattcctccgcgcactgcgctagcgtcccggcattctgctttccggcgctctgccttccggtgcgtcgtttacgccagtttgaaccaaagacgcccaaggttgaggccgagttccagagcatggggtctcggttgtcccagccttttgagtcctatatcactgcgcctcccggtaccgccgccgcgcccgccaaacctgcgcccccagctacacccggagcgccgacctccccagcagaacaccgcctgttgaagacctgctggagctgtcgcgtgctttctgggttggggctgatgggggcgggcgggtacgtgtactgggtggcacggaagcccatgaagatgggataccccccgagtccatggaccattacgcagatggtcatcggcctcagcattgccacctggggtatcgttgtcatggcagaccccaaagggaaggcctaccgcgttgtttgaaagtaccaccagtgaatctgtcttctgtctctgtccctttccccgtgacacacacagcaggcatggaatttaatgggtgttctggacagacacttgtacatggacagacatcactactgtggatactacaagactgagaagaaaatcgtatgttgtcattctctggctatggagtgtttgtggccttcacagatttcacaggaaccaataaatccctcagagaagtaaacaggttctttgtcttatctggggaaggaaagtataacttatatttaaatataattgcttaattaagcattatatataaacataatagtatgtcttatataattgcatgtcatattatatataataaacataaatatgtttagttatatagttagtataatttttaaaacttttaaatacagcatatggtaaaccaacgggaaaattagctattttacttcattattttaaagagttctttttatttctttcataattggatcaacaactgttaacctaaccctgggtgggcatcatgcaatatatagaagtacgtgaaattttctgtgtatgaattgctgatactttgcaaggcattttcaaatccatcaccttatgagagcttcacagctagtctgaggtagttacttcattggaggtaaaacttaaaacacaagaaagagcccacatgatttgcctagggtcattcagtaagtccgtgatggagctagaacttgttcttgtcagttttttgttctagtcttccctttcatggaggcaagaataaccattatgaaacagttagataatcataaaaatcagcatacaataaaagacttaaatgtcacaagaaaaattcaaaacctttagctaaaaaaaaaaaagatcttttgattctttttccacaagcactagatatgtttctgtgatgattttgagataagtactcaaaattacatagttcatttctaagagaaggccatgttttctacctattgggtttttctaccctgagatactatggcttctttgtaaaggtatataaagtgtttttcaaagcggaaagatactgttaaattcagctgctaatcatagtgtatttgtttggaatgacatgttgagcaggtagtacctttacggctgttgctttttgcagcattatgtggaagtgcctaagtctatttagcctcacagatgactttagaatcttgtattttctacatcagagttcatagcggggatggtgctacatatatctatgcaactgaaaaagaaaacatttcaaacctaaagtacgcaacaagatattatttatatgaaatccatagctcagttatgctatgttcatgaatagagaagttttaagttggaagggaccatggatgacccaaagcagatacatatggtcattcatatacctaaaatacctacaaagacaagttgttccctggtttaaaaggcagtctgttctattgatggactgctttagtccctgaacattttctttggttaaaccaaaaacacataaacctaacttggtcttggcttgatctactgggtaaataataactcttaaatatatatacagttgacccttggacaacacaggagttaagagcgctgaacatttgctcagtggagaatctgcatataacctgactcctcaaaaacttaattagtagttagtttacaattgactggaagccttattgataacataaagcagttgattaacacattttttgtgttgtatgtattatattccgtattcttacaagaaggtaagctagagaaaaaaaaaatgttattaaggaagtaatatattcactattcgttaggtagaagtgaatcatcctaaaggtcttcatcctcatcttcacgctgagtagtctgaggagcaagaggagttggtctttctgtcccagtggcagaggtggaagaaaatccacagatacgtggacctgcgcagttcaaacctgtgttgtttgggtcaactgtattgtaatagcattttaatgtttttctcagacttttacgagtatgaatctgagctttttctgaataaacctgcctgctcaccattaataatgccaaa

SEQ ID NO: 228655 - DNA, 339 bp, Artificial Sequence
  derived and/or modified sequence
atgggcagcagactgagccagcccttcgagagctacatcaccgccccccccggcaccgccgccgcccccgccaagcccgccccccccgccacccccggcgcccccaccagccccgccgagcacagactgctgaagacctgctggagctgcagagtgctgagcggcctgggcctgatgggcgccggcggctacgtgtactgggtggccagaaagcccatgaagatgggctacccccccagcccctggaccatcacccagatggtgatcggcctgagcatcgccacctggggcatcgtggtgatggccgaccccaagggcaaggcctacagagtggtgtag

SEQ ID NO: 228656 - DNA, 339 bp, Artificial Sequence
  derived and/or modified sequence
atgggtagtagactctctcagccctttgaatcttacatcaccgccccaccagggaccgctgcggctcctgcaaagcccgcgccaccggctactcccggagctcctacgagccccgctgagcaccggcttctgaaaacatgttggtcctgcagagtcctgagcgggcttggtctgatgggggccgggggttacgtgtactgggtggcacgaaagcctatgaagatgggctacccgcctagcccctggacaatcacgcagatggtgattggcctcagcatcgcaacgtgggggattgtcgtgatggcagatccaaaaggcaaggcatatagagtggtgtag

SEQ ID NO: 228657 - DNA, 339 bp, Artificial Sequence
  derived and/or modified sequence
atgggcagccggctgagccagccctttgagagctacatcacagcccctcctggaacagctgctgccccagccaagccagcccccccagccacccctggggcccccaccagccctgctgagcaccggctgctgaagacctgctggagctgccgggtgctgagcggcctgggcctgatgggcgccggcggctacgtgtactgggtggccaggaagcccatgaagatgggctacccacccagcccctggaccatcacccagatggtgattggcctgagcatcgccacctggggcatcgtggtgatggctgaccccaagggcaaggcctacagagtggtgtag

SEQ ID NO: 228658 - DNA, 339 bp, Artificial Sequence
  derived and/or modified sequence
atgggcagccggctgagccagcccttcgagagctacatcaccgcccctcctggaactgccgccgccccggcaaaacctgctccaccagctacacccggagcacctacttctcccgccgagcacaggttgctaaaaacttgctggtcatgccgggttctctctggcctggggctaatgggggcagggggttacgtgtactgggtcgcaagaaaaccgatgaagatggggtacccccccagcccctggactatcacccaaatggtcatagggcttagcattgctacctggggaatagtggtgatggctgatcccaaaggtaaggcctatagggtggtgtag

SEQ ID NO: 228659 - DNA, 339 bp, Artificial Sequence
  derived and/or modified sequence
atgggctctcggttgagccagccctttgagtcttacattacagcccctcccggaaccgccgcagcacctgcaaaacccgctcccccagcaacacctggcgcacctaccagtccggctgaacaccggctgctaaaaacctgttggtcatgcagggtcctttccggactaggccttatgggtgccggtggttatgtgtattgggtcgccagaaagcctatgaagatggggtatccacccagcccctggaccatcacacagatggttatagggctgtccattgccacatgggggattgtggtgatggctgaccccaaaggaaaagcttaccgcgtcgtctag

SEQ ID NO: 228660 - protein, 833 aa, Artificial Sequence
  derived and/or modified sequence
MLPFGDKTREMVNAWFAERVHTIPVCKEGIRGHTESCSCPLQQSPRADNSAPGTPTRKISASEFDRPLRPIVVKDSEGTVSFLSDSEKKEQMPLTPPRFDHDEGDQCSRLLELVKDISSHLDVTALCHKIFLHIHGLISADRYSLFLVCEDSSNDKFLISRLFDVAEGSTLEEVSNNCIRLEWNKGIVGHVAALGEPLNIKDAYEDPRFNAEVDQITGYKTQSILCMPIKNHREEVVGVAQAINKKSGNGGTFTEKDEKDFAAYLAFCGIVLHNAQLYETSLLENKRNQVLLDLASLIFEEQQSLEVILKKIAATIISFMQVQKCTIFIVDEDCSDSFSSVFHMECEELEKSSDTLTREHDANKINYMYAQYVKNTMEPLNIPDVSKDKRFPWTTENTGNVNQQCIRSLLCTPIKNGKKNKVIGVCQLVNKMEENTGKVKPFNRNDEQFLEAFVIFCGLGIQNTQMYEAVERAMAKQMVTLEVLSYHASAAEEETRELQSLAAAVVPSAQTLKITDFSFSDFELSDLETALCTIRMFTDLNLVQNFQMKHEVLCRWILSVKKNYRKNVAYHNWRHAFNTAQCMFAALKAGKIQNKLTDLEILALLIAALSHDLDHRGVNNSYIQRSEHPLAQLYCHSIMEHHHFDQCLMILNSPGNQILSGLSIEEYKTTLKIIKQAILATDLALYIKRRGEFFELIRKNQFNLEDPHQKELFLAMLMTACDLSAITKPWPIQQRIAELVATEFFDQGDRERKELNIEPTDLMNREKKNKIPSMQVGFIDAICLQLYEALTHVSEDCFPLLDGCRKNRQKWQALAEQQEKMLINGESGQAKRN

SEQ ID NO: 228661 - DNA, 2502 bp, Artificial Sequence
  derived and/or modified sequence
atgctcccctttggagacaaaacacgcgaaatggtcaacgcttggtttgcagagagagtgcacacgatcccggtttgcaaggaggggatacggggccataccgaatcatgctcttgccccctgcaacagtctccgcgggccgataactctgctcccggaacccctactcgtaaaatatcagcatccgagttcgatcggccgctgcggcccatcgtggtcaaggactctgagggaaccgttagtttcctgagcgacagtgaaaagaaagaacagatgcccttgacacctccccggttcgatcacgacgagggcgatcaatgttcacgactcctcgagctcgtaaaggatattagtagtcatttggatgttaccgcactctgtcacaagatttttctccacattcacggattaatctccgccgacaggtattctctgttcctggtgtgcgaggactcttctaatgacaagtttctgattagcaggcttttcgacgtagccgagggatccacattagaagaggtgagcaataactgtatacggctagaatggaataaaggaattgtggggcatgtcgcggccctgggggagcccctgaatatcaaagacgcgtacgaagacccgagatttaatgcagaagtggatcaaattacaggctataagacacagagcatcctctgcatgcccatcaagaaccacagggaggaagtggtaggtgtcgcacaagcaatcaataagaagagcggaaatggtggcacatttaccgaaaaagacgagaaggactttgcagcctatctcgcattctgtggcatcgttctccacaacgcacagctctacgagacgtctcttctcgagaacaagcgaaaccaggtgcttctcgatctagcttccctgatctttgaagaacagcagagcctcgaagtcatcctgaaaaagattgccgccactatcatctcattcatgcaagtccaaaaatgtaccatcttcattgtcgatgaggactgttcagattcattctccagcgtgttccatatggaatgtgaagagctcgaaaagtccagtgacaccttgacccgcgagcatgacgctaataagattaactatatgtatgcccaatacgtcaagaacaccatggagcctctcaacattccggatgtttcaaaggacaagcgcttcccatggaccactgaaaataccggaaatgttaatcaacagtgcatacgttcactgctatgcaccccgattaagaatggcaaaaagaacaaggtgatcggtgtgtgtcagctagtgaacaagatggaggagaacaccggaaaagtgaaaccctttaatcgaaatgatgaacagttccttgaagctttcgtgatcttttgcggactgggcatacagaatacacaaatgtacgaagccgtggagcgggctatggctaaacagatggtcacgcttgaggtccttagttatcacgcctcggccgctgaagaagaaactcgggaactgcagagtttagccgccgccgtagtcccttccgcccagactctgaaaattactgactttagtttttcagatttcgaactttccgatctggaaactgccctctgtacaattaggatgtttacggatctgaatttagtccagaattttcagatgaagcacgaggtgttgtgcagatggattctaagcgtcaaaaagaattacagaaaaaacgtggcctatcataattggcggcatgccttcaataccgcgcagtgcatgttcgcagccctcaaagccgggaaaatccagaacaaattaacggacctcgagattctcgctttactgattgccgccctctcacatgatctcgaccatcggggcgtaaataactcttacatacaacgatctgaacaccccctggctcagctttattgtcatagcattatggagcatcaccactttgatcaatgcctaatgatacttaatagtccaggtaaccagattttgtccggcctgtcaatcgaggaatacaagaccactctcaaaatcatcaaacaggcaatccttgctaccgatctagccctgtatataaaacgacggggggagttcttcgaactcattcgtaagaatcaattcaaccttgaagatccacaccagaaagaactgttcctggcgatgctgatgaccgcttgcgacctgtcagctatcaccaagccctggcccatacagcagcgcattgccgagttagtagccacagaattcttcgaccagggcgaccgagagaggaaggagctcaacattgaaccaaccgacctgatgaaccgcgagaagaagaacaagatccccagtatgcaggtcggcttcattgatgccatctgcctgcagctgtatgaggctctgactcatgtgagtgaggactgttttccattgctagatggttgtaggaaaaaccggcaaaaatggcaggcccttgccgaacagcaggagaagatgctgattaacggagaaagcggccaagctaaaaggaactag

SEQ ID NO: 228662 - DNA, 2502 bp, Artificial Sequence
  derived and/or modified sequence
atgctgccctttggagacaagacccgggagatggtgaatgcctggtttgctgagcgggtgcacaccatccctgtgtgcaaggagggcatccggggccacacagagagctgcagctgccccctgcagcagagccccagggctgacaacagcgcccctggcacccccaccaggaagatcagcgccagcgagtttgaccggcccctgcggcccatcgtggtgaaggacagcgagggcaccgtgtccttcctgagtgacagcgagaagaaggagcagatgcccctgaccccacccaggtttgaccatgatgaaggagaccagtgcagccggctgctggagctggtgaaggacatcagcagccacctggatgtgacagccctgtgccacaagatcttcctgcacatccacggcctcatctctgctgaccgctacagcctcttcctggtgtgtgaggacagcagcaatgacaagttcctgatcagccggctgtttgatgtggccgagggcagcaccctggaggaggtgagcaacaactgcatccggctggagtggaacaagggcatcgtgggccacgtggccgccctgggggagcccctgaacatcaaggatgcctatgaggacccccgcttcaatgctgaggtggaccagatcaccggctacaagacccagagcatcctgtgcatgcccatcaagaaccaccgggaggaggtggtgggcgtggcccaggccatcaacaagaagtctggaaatggaggcaccttcacagagaaggatgagaaggactttgctgcctacctggccttctgtggcatcgtgctgcacaatgcccagctgtatgagaccagcctgctggagaacaagaggaaccaggtgctgctggacctggccagcctcatctttgaggagcagcagagcctggaggtgatcctgaagaagattgctgccaccatcatctccttcatgcaggtgcagaagtgcaccatcttcatcgtggatgaggactgcagcgacagcttcagcagcgtcttccacatggagtgtgaggagctggagaagagcagtgacaccctgacccgggagcatgatgccaacaagatcaactacatgtatgcccagtatgtgaagaacaccatggagcccctgaacatcccagatgtgtccaaggacaagcgcttcccctggaccacagagaacacaggaaatgtgaaccagcagtgcatccgcagcctgctgtgcacccccatcaagaatggcaagaagaacaaggtgattggagtgtgccagctggtgaacaagatggaggagaacacaggcaaggtgaagcccttcaacagaaatgatgagcagttcctggaggcctttgtgatcttctgtggcctgggcatccagaacacccagatgtatgaagctgtggagcgggccatggccaagcagatggtgaccctggaggtgctgagctaccacgccagcgctgctgaggaggagacccgggagctgcagagcctggccgctgctgtggtgcccagcgcccagaccctgaagatcacagacttctccttcagtgactttgagctgagtgacctggagacagccctgtgcaccatccgcatgttcacagacctgaacctggtgcagaacttccagatgaagcatgaggtgctgtgccgctggatcctgtctgtgaagaagaactacaggaagaatgtggcctaccacaactggaggcatgccttcaacacagcccagtgcatgtttgctgccctgaaggccggcaagatccagaacaagctgacagacctggagatcctggccctgctgattgctgccctgagccatgacctggaccacagaggagtgaacaacagctacatccagaggtctgagcaccccctggcccagctgtactgccacagcatcatggagcaccaccactttgaccagtgcctgatgatcctgaacagccctggcaaccagatcctgagcggcctgagcattgaggagtacaagaccaccctgaagatcatcaagcaggccatcctggccacagacctggccctgtacatcaagagaagaggagagttctttgagctgatcaggaagaaccagttcaacctggaggacccccaccagaaggagctgttcctggccatgctgatgacagcctgtgacctgagcgccatcaccaagccctggcccatccagcagagaattgctgagctggtggccacagagttctttgaccagggcgaccgggagaggaaggagctgaacatcgagcccacagacctgatgaaccgggagaagaagaacaagatccccagcatgcaggtgggcttcattgatgccatctgcctgcagctgtatgaggccctgacccacgtgtctgaggactgcttccccctgctggatggctgcaggaagaaccggcagaagtggcaggccctggccgagcagcaggagaagatgctgatcaacggggagagcggccaggccaagaggaactag

SEQ ID NO: 228663 - DNA, 2502 bp, Artificial Sequence
  derived and/or modified sequence
atgctgcccttcggcgacaagacccgggagatggtgaacgcctggtttgccgagagggtacacactatcccagtttgtaaggaggggatacgcgggcacaccgaatcctgttcttgtcccttacagcagtctcctcgagccgataattccgcgcccggtacgccgacacgtaaaatttccgcttctgagtttgatagaccccttcgacctatcgtcgtgaaggattcagaaggcacggtgtcctttttgtccgattccgagaaaaaagaacagatgccactgaccccccctagatttgatcatgacgaaggagatcagtgctctagactgctggagctagtgaaggatattagttcacacctagacgtgacagccctgtgccacaaaatcttcctacacatacacggactcatcagcgcagacagatatagcctgtttttggtttgtgaggattcctcaaacgataagttccttataagccgcctgttcgacgtcgccgaggggtccaccctcgaagaagtcagcaacaattgtattagactggagtggaacaaggggattgtgggtcatgtcgccgccctcggtgaacctctgaatatcaaggacgcctatgaagatccacggttcaacgcagaggtggaccaaataacgggctataaaacgcaatcaatactttgcatgcccatcaaaaaccacagggaagaggtggtgggcgtggcacaggccataaataagaaatctggtaatgggggcacctttaccgagaaagacgagaaagacttcgcagcctatctcgcattctgcggcatcgtgcttcacaacgctcagttatatgagacgagtctcctggagaacaaaaggaaccaggttctgctcgatttggcgagcctgatctttgaagaacagcaatcactggaggttatcctcaagaagatcgcagcgaccatcatcagcttcatgcaggttcagaaatgcacaatctttattgttgacgaggattgctctgattcattcagtagcgtgtttcacatggagtgcgaagaactcgaaaaatctagcgataccctcactcgtgaacacgatgctaacaaaataaactatatgtacgctcagtatgttaagaacacgatggagccactcaacatcccagatgtgtctaaagacaaaaggtttccatggacaaccgagaataccgggaatgtgaatcagcagtgcatccgctcgctgctttgcactcctataaaaaatggtaagaagaacaaggtcatcggcgtttgccaactggtaaataagatggaggagaatactggcaaagtcaagccgttcaataggaatgacgagcagttcctcgaggcctttgtgatcttctgcggcctggggattcagaacacccagatgtacgaggccgtggagagggcaatggcaaagcagatggtgactttggaggttcttagctatcacgcctctgctgcagaagaagaaaccagggaactacagtctcttgcggcagctgtggtcccttctgcccagacacttaaaatcacggatttctccttcagcgatttcgagttgagcgatttggagactgccctgtgcacaatcaggatgtttaccgacctcaaccttgtgcagaactttcaaatgaagcatgaagttctatgccggtggattctgtccgtcaagaagaattacagaaaaaatgtggcttatcataattggaggcacgcatttaacaccgcccaatgtatgttcgctgcgctgaaggctggaaagatccagaacaagttgaccgatctagagattctggctcttcttatcgcggcacttagccacgacttagatcacaggggcgtaaataatagttatatccagagaagtgagcatcctcttgcccagctgtactgccacagcattatggagcatcatcacttcgatcagtgccttatgatattgaactcccctggcaatcagatcctttccggactgtcaatagaggagtataaaaccacactcaagatcataaaacaggcaatactggccacagacctggccctctacatcaagcggaggggggaattctttgaactgatacggaagaaccagttcaatctggaggacccccaccagaaggagctcttcctcgcgatgctgatgaccgcctgcgacctgtccgccatcacaaagccttggcctatccagcagcgaatagctgagctggtggccacggaattcttcgaccagggagaccgtgaacggaaagagctcaacatcgagccaactgatctgatgaaccgggagaaaaaaaacaagattcccagcatgcaggttggctttatagatgcgatctgtttgcagctctacgaagccttgacccacgtgtctgaggactgcttcccgcttctcgacgggtgccgaaaaaataggcagaagtggcaggccctggccgagcagcaggaaaagatgctcattaacggtgagtcaggacaagccaaaagaaactag

SEQ ID NO: 228664 - DNA, 3020 bp, Artificial Sequence
  derived and/or modified sequence
gtggagcagagagtgcttggcgggcgggtgccccgaagcctgaggaattgatgcatagtcggggtgcgtggactccaggacgcgcccctttgcagaaagagtccgtgccccgctgccgcctgctctgggcagcggccgtcgggcagcgggtgctggccgtcttggccgggagggtgacacacgcccggcagtgatggtcgaggagcccgcccgggttcgacgcccgggtcccactcgccggcgcgcggccgcggctctgccggtcgctccccgccagggggcggcgcagcgcggggcgagcgggaggcgacgggcggcggcgcggaggccggggccgtgagggagctggttctgagtcgccgacctcacctcacctcacctgcgcgcgttgttgcccctacggagcctcctggagtccaggatcggcggagttcgaaaacgaacttcccacgtttgctatgttgccctttggagacaaaacaagagaaatggtcaatgcatggtttgctgagagagttcacaccatccctgtgtgcaaggaaggtatcagaggccacaccgaatcttgctcttgtcccttgcagcagagtcctcgtgcagataacagtgcccctggaacaccaaccaggaaaatctctgcctctgaatttgaccggcctcttagacccattgttgtcaaggattctgagggaactgtgagcttcctctctgactcagaaaagaaggaacagatgcctctaacccctccaaggtttgatcatgatgaaggggaccagtgctcaagactcttggaattagtgaaggatatttctagtcatttggatgtcacagccttatgtcacaaaattttcttgcatatccatggactgatatctgctgaccgctattccctgttccttgtctgtgaagacagctccaatgacaagtttcttatcagccgcctctttgatgttgctgaaggttcaacactggaagaagtttcaaataactgtatccgcttagaatggaacaaaggcattgtgggacatgtggcagcgcttggtgagcccttgaacatcaaagatgcatatgaggatcctcggttcaatgcagaagttgaccaaattacaggctacaagacacaaagcattctttgtatgccaattaagaatcatagggaagaggttgttggtgtagcccaggccatcaacaagaaatcaggaaacggtgggacatttactgaaaaagatgaaaaggactttgctgcttatttggcattttgtggtattgttcttcataatgctcagctctatgagacttcactgctggagaacaagagaaatcaggtgctgcttgaccttgctagtttaatttttgaagaacaacaatcattagaagtaattttgaagaaaatagctgccactattatctctttcatgcaagtgcagaaatgcaccattttcatagtggatgaagattgctccgattctttttctagtgtgtttcacatggagtgtgaggaattagaaaaatcatctgatacattaacaagggaacatgatgcaaacaaaatcaattacatgtatgctcagtatgtcaaaaatactatggaaccacttaatatcccagatgtcagtaaggataaaagatttccctggacaactgaaaatacaggaaatgtaaaccagcagtgcattagaagtttgctttgtacacctataaaaaatggaaagaagaataaagttataggggtttgccaacttgttaataagatggaggagaatactggcaaggttaagcctttcaaccgaaatgacgaacagtttctggaagcttttgtcatcttttgtggcttggggatccagaacacgcagatgtatgaagcagtggagagagccatggccaagcaaatggtcacattggaggttctgtcgtatcatgcttcagcagcagaggaagaaacaagagagctacagtcgttagcggctgctgtggtgccatctgcccagacccttaaaattactgactttagcttcagtgactttgagctgtctgatctggaaacagcactgtgtacaattcggatgtttactgacctcaaccttgtgcagaacttccagatgaaacatgaggttctttgcagatggattttaagtgttaagaagaattatcggaagaatgttgcctatcataattggagacatgcctttaatacagctcagtgcatgtttgctgctctaaaagcaggcaaaattcagaacaagctgactgacctggagatacttgcattgctgattgctgcactaagccacgatttggatcaccgtggtgtgaataactcttacatacagcgaagtgaacatccacttgcccagctttactgccattcaatcatggaacaccatcattttgaccagtgcctgatgattcttaatagtccaggcaatcagattctcagtggcctctccattgaagaatataagaccacgttgaaaataatcaagcaagctattttagctacagacctagcactgtacattaagaggcgaggagaattttttgaacttataagaaaaaatcaattcaatttggaagatcctcatcaaaaggagttgtttttggcaatgctgatgacagcttgtgatctttctgcaattacaaaaccctggcctattcaacaacggatagcagaacttgtagcaactgaattttttgatcaaggagacagagagagaaaagaactcaacatagaacccactgatctaatgaacagggagaagaaaaacaaaatcccaagtatgcaagttgggttcatagatgccatctgcttgcaactgtatgaggccctgacccacgtgtcagaggactgtttccctttgctagatggctgcagaaagaacaggcagaaatggcaggcccttgcagaacagcaggagaagatgctgattaatggggaaagcggccaggccaagcggaactgagtggcctatttcatgcagagttgaagtttacagagatggtgtgttctgcaatatgcctag

SEQ ID NO: 228665 - DNA, 6733 bp, Artificial Sequence
  derived and/or modified sequence
gagggacgagtccacgggacagcccaaaggcaacatgacggaaccttgccaaaagaaatggtcaatgcatggtttgctgagagagttcacaccatccctgtgtgcaaggaaggtatcagaggccacaccgaatcttgctcttgtcccttgcagcagagtcctcgtgcagataacagtgcccctggaacaccaaccaggaaaatctctgcctctgaatttgaccggcctcttagacccattgttgtcaaggattctgagggaactgtgagcttcctctctgactcagaaaagaaggaacagatgcctctaacccctccaaggtttgatcatgatgaaggggaccagtgctcaagactcttggaattagtgaaggatatttctagtcatttggatgtcacagccttatgtcacaaaattttcttgcatatccatggactgatatctgctgaccgctattccctgttccttgtctgtgaagacagctccaatgacaagtttcttatcagccgcctctttgatgttgctgaaggttcaacactggaagaagtttcaaataactgtatccgcttagaatggaacaaaggcattgtgggacatgtggcagcgcttggtgagcccttgaacatcaaagatgcatatgaggatcctcggttcaatgcagaagttgaccaaattacaggctacaagacacaaagcattctttgtatgccaattaagaatcatagggaagaggttgttggtgtagcccaggccatcaacaagaaatcaggaaacggtgggacatttactgaaaaagatgaaaaggactttgctgcttatttggcattttgtggtattgttcttcataatgctcagctctatgagacttcactgctggagaacaagagaaatcaggtgctgcttgaccttgctagtttaatttttgaagaacaacaatcattagaagtaattttgaagaaaatagctgccactattatctctttcatgcaagtgcagaaatgcaccattttcatagtggatgaagattgctccgattctttttctagtgtgtttcacatggagtgtgaggaattagaaaaatcatctgatacattaacaagggaacatgatgcaaacaaaatcaattacatgtatgctcagtatgtcaaaaatactatggaaccacttaatatcccagatgtcagtaaggataaaagatttccctggacaactgaaaatacaggaaatgtaaaccagcagtgcattagaagtttgctttgtacacctataaaaaatggaaagaagaataaagttataggggtttgccaacttgttaataagatggaggagaatactggcaaggttaagcctttcaaccgaaatgacgaacagtttctggaagcttttgtcatcttttgtggcttggggatccagaacacgcagatgtatgaagcagtggagagagccatggccaagcaaatggtcacattggaggttctgtcgtatcatgcttcagcagcagaggaagaaacaagagagctacagtcgttagcggctgctgtggtgccatctgcccagacccttaaaattactgactttagcttcagtgactttgagctgtctgatctggaaacagcactgtgtacaattcggatgtttactgacctcaaccttgtgcagaacttccagatgaaacatgaggttctttgcagatggattttaagtgttaagaagaattatcggaagaatgttgcctatcataattggagacatgcctttaatacagctcagtgcatgtttgctgctctaaaagcaggcaaaattcagaacaagctgactgacctggagatacttgcattgctgattgctgcactaagccacgatttggatcaccgtggtgtgaataactcttacatacagcgaagtgaacatccacttgcccagctttactgccattcaatcatggaacaccatcattttgaccagtgcctgatgattcttaatagtccaggcaatcagattctcagtggcctctccattgaagaatataagaccacgttgaaaataatcaagcaagctattttagctacagacctagcactgtacattaagaggcgaggagaattttttgaacttataagaaaaaatcaattcaatttggaagatcctcatcaaaaggagttgtttttggcaatgctgatgacagcttgtgatctttctgcaattacaaaaccctggcctattcaacaacggatagcagaacttgtagcaactgaattttttgatcaaggagacagagagagaaaagaactcaacatagaacccactgatctaatgaacagggagaagaaaaacaaaatcccaagtatgcaagttgggttcatagatgccatctgcttgcaactgtatgaggccctgacccacgtgtcagaggactgtttccctttgctagatggctgcagaaagaacaggcagaaatggcaggcccttgcagaacagcaggagaagatgctgattaatggggaaagcggccaggccaagcggaactgagtggcctatttcatgcagagttgaagtttacagagatggtgtgttctgcaatatgcctagtttcttacacactgtctgtatagtgtctgtatttggtatatactttgccactgctgtatttttatttttgcacaacttttgagagtatagcatgaatgtttttagaggactattacatattttttgtatatttgttttatgctactgaactgaaaggatcaacaacatccactgttagcacattgataaaagcattgtttgtgatatttcgtgtactgcaaagtgtatgcagtattcttgcactgaggtttttttgcttggggattattttaaataattggtttttgtgttttctgaattaccattttttcaagaatgtttggaatctttcctttttcaaaagtaggttaggagcaaattatcatacattctgtgacatttaaagcctttataggatagtgaaaaatgctggctgagtggattttaagagaaataattgtatttgttaacagtgtctttttttaaaaagttaaggcactctgaaacaaatggaaagtcctatgaaactgtattgtaaagaaaacattatttaattgatatgctgttttgtgagagaacaggcaagacagaactttgtcacttcagtgcagtacatttttctgaaagctacccataaaatcactttcatctcacctacctgatgcaaagcaggtgaaaccttaggagatgatccagtcactgacttgattgagggataagtgtgatttagaaatggaatggccttggatgtctatcagtgaagaaaaatgttctgttagaagatctctctaagagtttttttccttctgagcttccttttcaaaataaaagtgacaattgtagcattgacttgaagtgagacatggttatagataagagagtacaaaatgactctttttcctgtcaattgaaatttaaagaaaagttttaattatataaatagcaaagggctattgccaatactagggtcaaaaatgaatttgagggaacagtgggtaagaaactttatgcctgaataacatttagcagtattgtgattgaaaaattgccatattttgatgtataggacaagtcaactgagatccagagaatcctggatgtgaatgctaaacactggcccttaactcacattcaatgtattttcttcccataacatttagtatagttaatattttcttagaatttgagcccatttaagtggattaatattctacatgtgtgcccctaaagacacatttactcaatattggagaagtagataatgaattaagcaactggtctaggaaaggaaaatttgtttcaaatatgcaggaatgtttggatttggggagagtagaaggagagatttgcttgatttgttaacttctacctccaacccacaaaaaagatatttgatctgagtttctatcactaatttggatagaaaatttctaagggacatggtaatccagcattctcaaggacctttcgccaaaatgtgttttccatctatgtcccgattcccctaaattttgcctaaaattcagtatgttccttaagtttttaaaattctgagtgtgtacaaatatcttgacataatgcagttttatttttatcattctggtaaaaaaacaaaaaatagaagcaaaacacattgtattgccattattttgtatttggtaaaggttaatctaggaagttaccaactgtttaatgctatatgtattgtatacttgtattttcaggatattttattttttttgccatacagataaaatttgtaaggttgcccctttgtggcactggtgtgtaaaatacacagactatcactaaaataatagttatatatacatacaggtgtatacttatgcatgcatacataaatccttagtatagaaaaattgcataaagaatagcaatctttaataaacctttttattacattgtgatttagcagttatgctaaaatatgtacttatgctttagtagtttgtttggtcccctctagtatgtgtcactgagaaattttttaaagacatggtagatcgtgtttagaggctttgtatgtgtgtcattttaataagcaagaagatatatttagattagaaatggtttggtctgcctttgaatattgtttattttactttactagttgagacattaaaggaagctgggcaatgcctattttatttctttgttggatattttagttcatacaaagcagagtacttctttagggctggttaattggttcaaataatttttaatttcctttctagtatcttctcaagttggaaaaatatacatacagtcctccttcaccttactctgtatttatattacccataactagcaagaagttcttgttctagattttttgtttgtttagttataacagagtaacataccatttaattacaatttttagccagaaaagtccccactattttactaacttgttaaaagatatctatataattgcctggccttatatttttcagtagattagaccgtgccaatcacaatcctgggtggatttgtgtaagtcacttaacctctgtgtgcctaaacaagttgtgcttttttaaaaggagttatgtttgggcaaagcctttgtcttcaagcagaatgtcacagaaggcagctactttataagccccaatgggccatggagaccactgtcagaaatgggatattagtctagagagaaggtgatctattcccacatgtcatttctaatgttgagtttccatgactgaacaaagagaatatatttattcagcttcacttgcagatcactagtgaatgtgagatttagagctcattgagtatattgcttcaaggtacaaacccaggatgatgatgttgtcaccactgtctcttaattttgaataatagtttcctttaataggagtattagagataagaaagtatatgaaaatatactggaaatattggattcttggagaaaactgttcagtcacagatatattcttgcctagcagtgaagtgcctttattttcagcatagcaaataaatattagacctgttccaatttgatctacaatttttttctgtgtttttcaccagattgtactcctaaaacttaacaggccatcacaagcaattgtcttttgtttacaagattgatttaatatgagaggatacaaaatgtcatcgttatcctctcttatgaacaactgtagtcaaaataaggtggcacaatttaattgttttgtatcagaaatacactgacccaccttttattgagtcctgccacatgttaggtaccgtgctctgctgtggagacagagcagtgaccccaaggagctcacggtccctgaaggaggtgctagagaagagacttagcttctgatactgccaatttaatgtgagaacatggggtatactgcatcatttccattttcatcaataacatatgttttatgcaccttctttacctgaaacttactaagaatctaccagtaaacaaacatcctgtctttttgcaagtatgaatcacttaacctgctgatagttgaagaacactttaggagttttgtattcttgtatatagtttattttttccatgtgctagccaggtaaagattacacagttcttctggactgttaaattgtgcatggttttggaccccttctgctctactacagagagtgaagaagaaagtattaaagctcactttaccattccatatacttactaaaagcctgtgtaaacatgtcttaatgaatgttgttgaaagcaatgtaaatagttgaaaatataaatttatattacagtttaagaaaaccttatgaggcatcactagccactgttaatatctatttgtattcttataccttttcaatatatttgaacaaatatagtttctggcactatttttatactaggaaaaggagttactatgtatattatgcttagcttttaaggcattttaaataaccatgaatgttgatttcattactttcctttcctccatcacgagagtcatttcagatgactctttcatgacaaaatcactttaaaggaacacttacctccgattcctgtataaagtcatgagatggtcaaggtggttttccattgtgcaaattcttcacctgtcagtggtttcctcattttgccatgctttgtaaaaataaaaagaatgatcaagtaggtatg

SEQ ID NO: 228666 - DNA, 2502 bp, Artificial Sequence
  derived and/or modified sequence
atgctgccctttggggacaaaacaagggaaatggtgaacgcctggttcgccgaacgcgttcacacaattccggtctgcaaggagggtataagaggccacaccgagagctgctcctgccctcttcagcaatcccccagagccgataactcagcccctggaacccctacccgcaagatttcagcatccgagttcgatagacccttgagacctattgtggttaaagactccgagggcaccgtaagcttcctctccgactcagagaaaaaggaacaaatgcctctgaccccacccagatttgaccacgatgagggggatcaatgttcaagactgctggaacttgtaaaggatatcagttcacacctcgacgtaactgcactttgccataaaatattcctacacatccatggcttgatttccgccgatcgctattctttatttctggtatgtgaggatagttcaaatgataaattcctgatttcacgactgtttgacgttgctgaaggctccacactggaggaggtgtctaacaattgtattagactcgagtggaataaggggatagtgggccatgtggctgctctgggcgagcccctaaacatcaaagacgcctatgaagatcccaggtttaacgccgaggtggatcaaataaccggttacaagacgcagagcatcctttgcatgcccattaaaaaccatcgggaggaagttgtgggagtagcccaggccatcaataaaaagtccggaaatggcggtacttttactgagaaggacgaaaaagacttcgccgcatacctcgcgttttgtggcattgtgctccataatgcccaactgtatgagacttctttgctggagaacaaaaggaaccaggtgctcctggacctagcatcgctgatcttcgaggagcaacagtcccttgaggtgattctcaaaaagattgcagccaccattatttcttttatgcaagtacagaagtgcacaatctttatcgtcgacgaagattgcagtgattccttcagcagcgtattccatatggagtgcgaggagctcgaaaaaagctctgataccctcacgcgggaacacgatgctaataagataaattatatgtatgcccaatacgtgaaaaacaccatggaaccccttaatatccccgacgtaagtaaagacaaaaggttcccatggacaaccgaaaacacgggaaacgtgaatcagcagtgcattcgttctctgttatgcactccgatcaagaatggaaagaagaataaggtgatcggcgtgtgtcagctggtgaacaaaatggaggaaaatacaggaaaggtgaaaccttttaatcgaaacgacgaacagttcctagaggcattcgtgatattttgtggtttgggaatacagaacacccagatgtacgaagccgtggagcgggctatggccaagcagatggtgacgctggaagtgttaagttaccacgcgagcgctgcagaagaggagacaagagaactgcaaagtctggccgctgctgttgttcctagcgcccagacgctaaaaattacagacttctctttcagcgacttcgagctgagcgatctggagacggccctttgcacgattagaatgttcaccgatctaaatctggttcagaacttccagatgaaacatgaagtcctctgccggtggattttatcagtgaagaaaaactaccgcaagaatgtagcgtatcacaattggcgtcatgctttcaacacagctcaatgtatgtttgctgctcttaaagcaggcaagatccagaacaagctgaccgacttggaaatcctcgctcttctcattgccgctctctcccacgatctcgatcaccgaggtgtcaacaacagttacattcagaggtccgagcatcccctcgcccagctgtactgtcactccatcatggagcaccaccactttgaccagtgcctgatgatcctgaactcccctggcaaccagatcctgagcggactgtccatcgaggaatacaagacaacccttaaaattatcaaacaagcaatcttagcgacagacttagcattgtacatcaagcgacgaggcgagtttttcgagttaattcgaaagaatcagttcaacttggaggatccgcaccagaaggagctgttcctggccatgttgatgaccgcgtgtgatctctcggctatcactaaaccctggccaatccaacagcgaattgccgaactggtcgccacagagttcttcgaccagggggacagggagcggaaagagctgaatattgaacctaccgatcttatgaacagagagaagaaaaacaagatcccctcgatgcaagtaggctttatagatgctatctgtctgcagttgtatgaggcactgactcacgtgtcagaggattgcttccctcttcttgacggctgcagaaagaatcgacaaaagtggcaggctctcgccgagcagcaagaaaagatgttgataaacggagaaagtggccaggcaaaacgcaattag

SEQ ID NO: 228667 - DNA, 2502 bp, Artificial Sequence
  derived and/or modified sequence
atgctgcccttcggcgacaagaccagagagatggtgaacgcctggttcgccgagagagtgcacaccatccccgtgtgcaaggagggcatcagaggccacaccgagagctgcagctgccccctgcagcagagccccagagccgacaacagcgcccccggcacccccaccagaaagatcagcgccagcgagttcgacagacccctgagacccatcgtggtgaaggacagcgagggcaccgtgagcttcctgagcgacagcgagaagaaggagcagatgcccctgaccccccccagattcgaccacgacgagggcgaccagtgcagcagactgctggagctggtgaaggacatcagcagccacctggacgtgaccgccctgtgccacaagatcttcctgcacatccacggcctgatcagcgccgacagatacagcctgttcctggtgtgcgaggacagcagcaacgacaagttcctgatcagcagactgttcgacgtggccgagggcagcaccctggaggaggtgagcaacaactgcatcagactggagtggaacaagggcatcgtgggccacgtggccgccctgggcgagcccctgaacatcaaggacgcctacgaggaccccagattcaacgccgaggtggaccagatcaccggctacaagacccagagcatcctgtgcatgcccatcaagaaccacagagaggaggtggtgggcgtggcccaggccatcaacaagaagagcggcaacggcggcaccttcaccgagaaggacgagaaggacttcgccgcctacctggccttctgcggcatcgtgctgcacaacgcccagctgtacgagaccagcctgctggagaacaagagaaaccaggtgctgctggacctggccagcctgatcttcgaggagcagcagagcctggaggtgatcctgaagaagatcgccgccaccatcatcagcttcatgcaggtgcagaagtgcaccatcttcatcgtggacgaggactgcagcgacagcttcagcagcgtgttccacatggagtgcgaggagctggagaagagcagcgacaccctgaccagagagcacgacgccaacaagatcaactacatgtacgcccagtacgtgaagaacaccatggagcccctgaacatccccgacgtgagcaaggacaagagattcccctggaccaccgagaacaccggcaacgtgaaccagcagtgcatcagaagcctgctgtgcacccccatcaagaacggcaagaagaacaaggtgatcggcgtgtgccagctggtgaacaagatggaggagaacaccggcaaggtgaagcccttcaacagaaacgacgagcagttcctggaggccttcgtgatcttctgcggcctgggcatccagaacacccagatgtacgaggccgtggagagagccatggccaagcagatggtgaccctggaggtgctgagctaccacgccagcgccgccgaggaggagaccagagagctgcagagcctggccgccgccgtggtgcccagcgcccagaccctgaagatcaccgacttcagcttcagcgacttcgagctgagcgacctggagaccgccctgtgcaccatcagaatgttcaccgacctgaacctggtgcagaacttccagatgaagcacgaggtgctgtgcagatggatcctgagcgtgaagaagaactacagaaagaacgtggcctaccacaactggagacacgccttcaacaccgcccagtgcatgttcgccgccctgaaggccggcaagatccagaacaagctgaccgacctggagatcctggccctgctgatcgccgccctgagccacgacctggaccacagaggcgtgaacaacagctacatccagagaagcgagcaccccctggcccagctgtactgccacagcatcatggagcaccaccacttcgaccagtgcctgatgatcctgaacagccccggcaaccagatcctgagcggcctgagcatcgaggagtacaagaccaccctgaagatcatcaagcaggccatcctggccaccgacctggccctgtacatcaagagaagaggcgagttcttcgagctgatcagaaagaaccagttcaacctggaggacccccaccagaaggagctgttcctggccatgctgatgaccgcctgcgacctgagcgccatcaccaagccctggcccatccagcagagaatcgccgagctggtggccaccgagttcttcgaccagggcgacagagagagaaaggagctgaacatcgagcccaccgacctgatgaacagagagaagaagaacaagatccccagcatgcaggtgggcttcatcgacgccatctgcctgcagctgtacgaggccctgacccacgtgagcgaggactgcttccccctgctggacggctgcagaaagaacagacagaagtggcaggccctggccgagcagcaggagaagatgctgatcaacggcgagagcggccaggccaagagaaactag

SEQ ID NO: 228668 - protein, 823 aa, Artificial Sequence
  derived and/or modified sequence
MVNAWFAERVHTIPVCKEGIRGHTESCSCPLQQSPRADNSAPGTPTRKISASEFDRPLRPIVVKDSEGTVSFLSDSEKKEQMPLTPPRFDHDEGDQCSRLLELVKDISSHLDVTALCHKIFLHIHGLISADRYSLFLVCEDSSNDKFLISRLFDVAEGSTLEEVSNNCIRLEWNKGIVGHVAALGEPLNIKDAYEDPRFNAEVDQITGYKTQSILCMPIKNHREEVVGVAQAINKKSGNGGTFTEKDEKDFAAYLAFCGIVLHNAQLYETSLLENKRNQVLLDLASLIFEEQQSLEVILKKIAATIISFMQVQKCTIFIVDEDCSDSFSSVFHMECEELEKSSDTLTREHDANKINYMYAQYVKNTMEPLNIPDVSKDKRFPWTTENTGNVNQQCIRSLLCTPIKNGKKNKVIGVCQLVNKMEENTGKVKPFNRNDEQFLEAFVIFCGLGIQNTQMYEAVERAMAKQMVTLEVLSYHASAAEEETRELQSLAAAVVPSAQTLKITDFSFSDFELSDLETALCTIRMFTDLNLVQNFQMKHEVLCRWILSVKKNYRKNVAYHNWRHAFNTAQCMFAALKAGKIQNKLTDLEILALLIAALSHDLDHRGVNNSYIQRSEHPLAQLYCHSIMEHHHFDQCLMILNSPGNQILSGLSIEEYKTTLKIIKQAILATDLALYIKRRGEFFELIRKNQFNLEDPHQKELFLAMLMTACDLSAITKPWPIQQRIAELVATEFFDQGDRERKELNIEPTDLMNREKKNKIPSMQVGFIDAICLQLYEALTHVSEDCFPLLDGCRKNRQKWQALAEQQEKMLINGESGQAKRN

SEQ ID NO: 228669 - protein, 270 aa, Artificial Sequence
  derived and/or modified sequence
MKPKMKYSTNKISTAKWKNTASKALCFKLGKSQQKAKEVCPMYFMKLRSGLMIKKEACYFRRETTKRPSLKTGRKHKRHLVLAACQQQSTVECFAFGISGVQKYTRALHDSSITGISPITEYLASLSTYNDQSITFALEDESYEIYVEDLKKDEKKDKVLLSYYESQHPSNESGDGVDGKMLMVTLSPTKDFWLHANNKEHSVELHKCEKPLPDQAFFVLHNMHSNCVSFECKTDPGVFIGVKDNHLALIKVDSSENLCTENILFKLSET

SEQ ID NO: 228670 - DNA, 813 bp, Artificial Sequence
  derived and/or modified sequence
atgaagcccaagatgaagtacagcaccaacaagatcagcaccgccaagtggaagaacaccgccagcaaggccctgtgcttcaagctgggcaagagccagcagaaggccaaggaggtgtgccccatgtacttcatgaagctgagaagcggcctgatgatcaagaaggaggcctgctacttcagaagagagaccaccaagagacccagcctgaagaccggcagaaagcacaagagacacctggtgctggccgcctgccagcagcagagcaccgtggagtgcttcgccttcggcatcagcggcgtgcagaagtacaccagagccctgcacgacagcagcatcaccggcatcagccccatcaccgagtacctggccagcctgagcacctacaacgaccagagcatcaccttcgccctggaggacgagagctacgagatctacgtggaggacctgaagaaggacgagaagaaggacaaggtgctgctgagctactacgagagccagcaccccagcaacgagagcggcgacggcgtggacggcaagatgctgatggtgaccctgagccccaccaaggacttctggctgcacgccaacaacaaggagcacagcgtggagctgcacaagtgcgagaagcccctgcccgaccaggccttcttcgtgctgcacaacatgcacagcaactgcgtgagcttcgagtgcaagaccgaccccggcgtgttcatcggcgtgaaggacaaccacctggccctgatcaaggtggacagcagcgagaacctgtgcaccgagaacatcctgttcaagctgagcgagacctag

SEQ ID NO: 228671 - DNA, 813 bp, Artificial Sequence
  derived and/or modified sequence
atgaaacctaagatgaaatactctactaataagatctcaacagccaagtggaagaataccgccagcaaggctttgtgcttcaagctgggaaagagccagcagaaggcgaaggaggtatgtcccatgtatttcatgaagcttcggtccggattaatgatcaaaaaggaggcctgttatttccggagggaaacaacaaaacggcccagcctcaagaccggaaggaagcacaagcgtcacctcgtcctggcggcatgccagcagcagtctaccgtggagtgtttcgcattcggcatctcaggtgttcagaagtacaccagagcacttcatgacagttcgatcacaggcattagcccgattacggagtatctggcgagtctgtctacctataacgatcagtcgataacatttgccctcgaggacgagagttacgaaatttacgtcgaggacctcaagaaagacgaaaagaaagataaggtgctgctgagctactacgagtctcagcaccccagcaacgaaagcggcgacggcgtggatgggaagatgcttatggtgactctctctcctacaaaagacttttggctccatgctaataacaaggagcacagtgtggaactccacaagtgtgaaaagccactgcctgaccaagcattttttgtcttacataatatgcacagtaattgcgtgtcctttgagtgcaagacggaccctggggtcttcatcggggtcaaagacaatcacctggccctcatcaaggttgacagcagtgagaatctctgcaccgagaacatcctgttcaaactctccgagacttag

SEQ ID NO: 228672 - DNA, 813 bp, Artificial Sequence
  derived and/or modified sequence
atgaagcccaagatgaagtacagcaccaacaagatcagcacagccaagtggaagaacacagccagcaaggccctgtgcttcaagctgggcaagagccagcagaaggccaaggaggtgtgccccatgtacttcatgaagctgcggagcggcctgatgatcaagaaggaggcctgctacttcagaagagagaccaccaagaggcccagcctgaagacaggcaggaagcacaagaggcacctggtgctggccgcctgccagcagcagagcacagtggagtgctttgccttcggcatctctggagtgcagaagtacacccgggccctgcatgacagcagcatcaccggcatcagccccatcacagagtacctggccagcctgagcacctacaatgaccagagcatcacctttgccctggaggatgagagctatgagatctacgtggaggacctgaagaaggatgagaagaaggacaaggtgctgctgagctactatgagagccagcaccccagcaatgaaagtggagatggagtggatggcaagatgctgatggtgaccctgagccccaccaaggacttctggctgcacgccaacaacaaggagcacagcgtggagctgcacaagtgtgagaagcccctgcctgaccaggccttctttgtgctgcacaacatgcacagcaactgtgtgtcctttgagtgcaagacagaccccggggtcttcatcggcgtgaaggacaaccacctggccctgatcaaggtggacagcagcgagaacctgtgcacagagaacatcctcttcaagctgtctgagacctag

SEQ ID NO: 228673 - DNA, 813 bp, Artificial Sequence
  derived and/or modified sequence
atgaagcccaagatgaagtacagcaccaacaagatcagcaccgccaagtggaagaatactgcttcaaaggcactctgtttcaaactcggcaagagtcagcagaaggcgaaggaagtgtgtccaatgtacttcatgaagttgcggagcgggctgatgattaagaaagaggcttgttactttcggagagagactaccaagagaccgagcctgaaaactggccgaaagcataagaggcatcttgtgctggctgcctgccagcagcaatcaactgttgagtgtttcgcgtttggcattagcggggtgcagaagtacaccagggccctccatgactcctcaatcactggaatcagtcctataactgagtacctagcctcactgtctacgtataatgaccagtcaattacttttgcactggaagacgaaagttacgagatttatgtggaggacttaaaaaaggatgaaaaaaaggataaggtactgctgagttactacgagagtcaacacccaagcaacgagtctggagacggggtggacggtaagatgttgatggtgaccctgtctcctaccaaggacttttggctccacgcaaataataaggagcactccgtcgaactccacaaatgcgagaaaccattgccggatcaagcgttttttgtcttacataatatgcatagtaattgcgttagcttcgagtgcaaaacagacccaggcgtcttcattggagtaaaagacaaccacttagccttgattaaagtggattcttccgaaaacctctgtacagaaaacatcctgtttaagttgtcggagacttag

SEQ ID NO: 228674 - DNA, 813 bp, Artificial Sequence
  derived and/or modified sequence
atgaagccgaaaatgaagtactcgaccaataagatctcgacagccaaatggaaaaacactgcctccaaagccttgtgctttaagctgggtaaatcccagcagaaagccaaagaggtgtgtccgatgtatttcatgaagttgcgttccggactcatgattaagaaggaggcctgttattttaggcgtgagactacaaagcgaccttctctcaagacaggacggaaacataaacgccacttagtgctggcggcatgccagcagcagtctaccgtggagtgcttcgcctttgggattagtggagtgcagaagtacactcgcgcattgcatgactcctccattactggtatctctcctatcacagaataccttgcgtccctgagtacctacaatgatcagtctatcaccttcgctctagaagatgagagctatgagatatatgtggaagatctcaaaaaggatgaaaagaaggataaagtactactcagctattatgagtcacaacatcctagcaacgaaagcggcgacggagtcgatgggaagatgctcatggtaactctctctcctacgaaagatttctggctgcacgctaataataaagaacactccgtggaattacataaatgcgaaaaacccctgcctgatcaggcgttctttgttctgcacaatatgcactctaactgcgtgagctttgagtgcaaaactgatccaggggtgttcataggagttaaggacaaccacctggccttgataaaggtggattcgtcggaaaacctctgcacagaaaacattcttttcaagctgtccgaaacctag

SEQ ID NO: 228675 - DNA, 2641 bp, Artificial Sequence
  derived and/or modified sequence
agaatactgaaaaatgaagcctaaaatgaagtattcaaccaacaaaatttccacagcaaagtggaagaacacagcaagcaaagccttgtgtttcaagctgggaaaatcccaacagaaggccaaagaagtttgccccatgtactttatgaagctccgctctggccttatgataaaaaaggaggcctgttactttaggagagaaaccaccaaaaggccttcactgaaaacaggtagaaagcacaaaagacatctggtactcgctgcctgtcaacagcagtctactgtggagtgctttgcctttggtatatcaggggtccagaaatatactagagcacttcatgattcaagtatcacaggaatttcacctattacagagtatcttgcttctctaagcacatacaatgatcaatccattacttttgctttggaggatgaaagttatgagatatatgttgaagacttgaaaaaagatgaaaagaaagataaggtgttactgagttactatgagtctcaacacccctcaaatgaatcaggtgacggtgttgatggtaagatgttaatggtaaccctgagtcctacaaaagacttctggttgcatgccaacaacaaggaacactctgtggagctccataagtgtgaaaaaccactgccagaccaggccttctttgtccttcataatatgcactccaactgtgtttcatttgaatgcaagactgatcctggagtgtttataggtgtaaaggataatcatcttgctctgattaaagtagactcttctgagaatttgtgtactgaaaatatcttgtttaagctctctgaaacttagttgatggaaacctgtgagtcttgggttgagtacccaaatgctaccactggagaaggaatgagagataaagaaagagacaggtgacatctaagggaaatgaagagtgcttagcatgtgtggaatgttttccatattatgtataaaaatattttttctaatcctccagttattcttttatttccctctgtataactgcatcttcaatacaagtatcagtatattaaatagggtattggtaaagaaacggtcaacattctaaagagatacagtctgacctttacttttctctagtttcagtccagaaagaacttcatatttagagctaaggccactgaggaaagagccatagcttaagtctctatgtagacagggatccattttaaagagctacttagagaaataattttccacagttccaaacgataggctcaaacactagagctgctagtaaaaagaagaccagatgcttcacagaattatcattttttcaactggaataaaacaccaggtttgtttgtagatgtcttaggcaacactcagagcagatctcccttactgtcaggggatatggaacttcaaaggcccacatggcaagccaggtaacataaatgtgtgaaaaagtaaagataactaaaaaatttagaaaaataaatccagtatttgtaaagtgaataacttcatttctaattgtttaatttttaaaattctgatttttatatattgagtttaagcaaggcattcttacacgaggaagtgaagtaaattttagttcagacataaaatttcacttattaggaatatgtaacatgctaaaacttttttttttttaaagagtactgagtcacaacatgttttagagcatccaagtaccatataatccaactatcatggtaaggccagaaatcttctaacctaccagagcctagatgagacaccgaattaacattaaaatttcagtaactgactgtccctcatgtccatggcctaccatcccttctgaccctggcttccagggacctatgtcttttaatactcactgtcacattgggcaaagttgcttctaatccttatttcccatgtgcacaagtctttttgtattccagcttcctgataacactgcttactgtggaatattcatttgacatctgtctcttttcatttcttttaactaccatgcccttgatatatcttttgcacctgctgaacttcatttctgtatcacctgacctctggatgccaaaacgtttattctgctttgtctgttgtagaattttagataaagctattaatggcaatatttttttgctaaacgtttttgttttttactgtcactagggcaataaaatttatactcaaccatataataacattttttaactactaaaggagtagtttttattttaaagtcttagcaatttctattacaacttttcttagacttaacacttatgataaatgactaacatagtaacagaatctttatgaaatatgaccttttctgaaaatacatacttttacatttctactttattgagacctattagatgtaagtgctagtagaatataagataaaagaggctgagaattaccatacaagggtattacaactgtaaaacaatttatctttgtttcattgttctgtcaataattgttaccaaagagataaaaataaaagcagaatgtatatcatcccatctgaaaaacactaattattgacatgtgcatctgtacaataaacttaaaatgattattaaataatcaaatatatctactacattgtttatattattgaataaagtatattttccaaatgta

SEQ ID NO: 228676 - protein, 319 aa, Artificial Sequence
  derived and/or modified sequence
MRSCFCVRRSRDPPPPQPPPPPPQRGTDQSTMPEVKDLSEALPETSMDPITGVGVVASRNRAPTGYDVVAQTADGVDADLWKDGLFKSKVTRYLCFTRSFSKENSHLGNVLVDMKLIDIKDTLPVGFIPIQETVDTQEVAFRKKRLCIKFIPRDSTEAAICDIRIMGRTKQAPPQYTFIGELNSMGIWYRMGRVPRNHDSSQPTTPSQSSAASTPAPNLPRHISLTLPATFRGRNSTRTDYEYQHSNLYAISAMDGVPFMISEKFSCVPESMQPFDLLGITIKSLAEIEKEYEYSFRTEQSAAARLPPSPTRCQQIPQS

SEQ ID NO: 228677 - DNA, 960 bp, Artificial Sequence
  derived and/or modified sequence
atgagaagctgcttctgcgtgagaagaagcagagaccccccccccccccagcccccccccccccccccccagagaggcaccgaccagagcaccatgcccgaggtgaaggacctgagcgaggccctgcccgagaccagcatggaccccatcaccggcgtgggcgtggtggccagcagaaacagagcccccaccggctacgacgtggtggcccagaccgccgacggcgtggacgccgacctgtggaaggacggcctgttcaagagcaaggtgaccagatacctgtgcttcaccagaagcttcagcaaggagaacagccacctgggcaacgtgctggtggacatgaagctgatcgacatcaaggacaccctgcccgtgggcttcatccccatccaggagaccgtggacacccaggaggtggccttcagaaagaagagactgtgcatcaagttcatccccagagacagcaccgaggccgccatctgcgacatcagaatcatgggcagaaccaagcaggcccccccccagtacaccttcatcggcgagctgaacagcatgggcatctggtacagaatgggcagagtgcccagaaaccacgacagcagccagcccaccacccccagccagagcagcgccgccagcacccccgcccccaacctgcccagacacatcagcctgaccctgcccgccaccttcagaggcagaaacagcaccagaaccgactacgagtaccagcacagcaacctgtacgccatcagcgccatggacggcgtgcccttcatgatcagcgagaagttcagctgcgtgcccgagagcatgcagcccttcgacctgctgggcatcaccatcaagagcctggccgagatcgagaaggagtacgagtacagcttcagaaccgagcagagcgccgccgccagactgccccccagccccaccagatgccagcagatcccccagagctag

SEQ ID NO: 228678 - DNA, 4819 bp, Artificial Sequence
  derived and/or modified sequence
cggtgaggctcgcgctcgagctgcggcgccggctcctgccgcctgggccccgggcccggcccctcccgcgccgcccgggcgatgagaagctgcttctgcgtgagacggagccgggacccgccgccgccgcagccaccgccgccgccgccccagcggggaacagaccagtccaccatgcctgaagtcaaagacctctcagaagccttgccagaaacgtcaatggatcccatcacgggagtcggggtggtggcttctcggaaccgagccccgacaggctatgacgtagttgcacagacagcagatggtgtggatgctgacctctggaaagacggcttatttaaatccaaggttaccagatacctgtgtttcacaagatcattttccaaagaaaatagtcatctggggaacgtgttagtagatatgaagctcattgacatcaaggacacactgcctgtgggcttcatcccaattcaggagacggtggacacacaggaagtggcttttaggaagaagaggctgtgcattaaatttattccacgggattcaacggaagctgcgatttgtgacattcggatcatgggccggaccaagcaggccccgcctcagtacacgtttattggggaactgaacagcatggggatctggtatcgaatgggcagagtaccaagaaatcatgactcatctcaacccacaacgccttcccagtcatcagctgcctccaccccagcccccaaccttcccaggcacatctccctaacacttcctgccaccttccgaggcaggaacagcacccggacggactacgagtaccagcactccaatttgtatgccatatcagcaatggatggtgtgccttttatgatttcagagaagttttcttgtgttccagaaagtatgcagccctttgatctcctgggaatcaccatcaaatctctagcagaaatcgaaaaagagtacgagtacagcttccgcacagagcagagcgcagccgccaggctcccgcccagccccaccaggtgtcagcagatcccgcagtcctgaggagccagcggccacctgcggggagaccaccgccgcccagactactgacggcaggggctgctgcccccgcctcctcctgccgcctccgccagccctccctcccacactgccccagcagggctggcccggagactgggcagctaagtgggcgcatcctgtcttcagctggcctcactgacaccccggcctccctggggacattgttcataaccatgactaatctgtgtgtgctgtagtgaccagcggctcctaacgtgtctgtgtgatgaccagttgtcctccaaaaacctcactcaccacggagtcaccctgagggccccgggcagttgccctggccgcccagtgacgcccaccggctccctccgctccctcctgtcacctaccagggcagaccccactaagccgttgagtctcttcctggaagaccctgagggccggcagctttgcctaggactctccagggtcgctgatcctccccggcccagggctgccaggaacaagttcctctctgcaggatctcacagcagccctgagaagacatgggaggaagaagccagtggccctggggtggaccctgccctttggacatcccatggacttgtcacccagtcgcctggaagtcggggagcagcacccctgcccccggtggaggggttgttgctttctggggaggaggacggttgacggccctgcttggatccaccaccaggacgctgtgctcggccatggcgcgcctcccccaagggctcatctgtgcaacaaccacatgccaacaatagctccaggtgcctcagccccgtgccctgacccggggaccacagggacaccctctgagacgtgctggccccaggaggatacaggcacacgggcacccagcccctctcagagccaggcgtgtcttgacggtatctgctgacgggaacaagtcattctgaaaggtccctctgacccaggtcaccaaatttgggccagaactggcacttccgagtgcccactggtgctggcgtcctcaaagtgccgggcgccaagttcagccccaggtgcgtttgcctaggcagtggtggctgccatccctcggggcccaggccctcacccgaagggctgcctcactctgtggtgtcaggcactgggctgtgtcctgattcctcagagtatggggacctgacatctttgggtccccaagagttggctcttggatgtggaggcttgatgctgcggttgggggctgcactacctgcgtccgtggaagcctctgcctcagcggggacggcctcctgctgcaggtcctgggcagcccacagtagtgctagctgaggcccagaggaacgggaggaaagggaggcagcgccggacggcgcagctggccaagaggcgggcggggccagaaatacctcatgcccctgcaccagcccctccgtctccaggccccaggcctctttgtggacccatcttcctcctctgccaccccgatcttcactcggatacctcttgatttctgtggataagggaagcggccacttctccctccctgagacccgaggatgcccctggtgggggtggccttctcaggactcctgggtggcacagcagcaggaccttgtcatgggactgatgctgagcagggagggggctgccaggctggctgccgatgctccgttcacataagccagtgtggttctggggacctgaggagccctgtggcacccacagggggcacctatgtctgccgtggctcctcgggtggtgccctgtgtgacaaagcccaacagcaagggtgactcctggcaggtgggggcagcaggagggcagagggcagagctctggccacttctgcccacttcattagggtttgtgaactttgtccttcacctcttttcgtgccctggttgtgagattgcctctaacaggtaatgccaggggcccttcactccgcccccatgactgggaagaggcctgtggcagcgccgctggaccctaggaggctcagaggcagtggtgtgggagccctgtctgcaaggacgcagaataagcagtgagggcggctgcaggagaggaaggggctcccacagcccccactgatgccgctgcaggcccctgtcgagctggggtcccagccaggtgcccccgcatgccctcctgcagttgctggatggatagggacaccaggaagaggacaaactgcatggactcaagcgagctggagccatcttctccatagcattacggacttagcataagagtaaatgactgtgaacgttgtagtaaacggcagcttaagataagtaagcagagacagtgttaaggacgagttggtgtctgtggtagcttttaggctgctcctaacccaccatttattgccttctgagaggtgggtgaggacaagcatgtgcctgtgtgtgtgtgtgtgtgtgtgtgtatatgtgtgtgtgtgcacgcacatgcgtgtgtataagcccacctgagtggggctcgtgcaggagaactgaggcatgaaactctggctcaaacctaggaattgagagcgtttctgtcttttgggagagtacttttctccacgagccctctggccactgtgggagggaaggacaagggttcccttggaaatgtgaagggtcttggcctcatccctcaggtccccccacagcacttcccactactgcttctgtccctgctggcagcctctgtccctccagaacggctaaccagagcacactgtccccaccgcctcccctttctctctggaaagttgaagtatctccaaaggccttggaaatggcacaaaggtgataaggagcaggtgctttgctgcagtctcccttgcaaatgtataattaaggcctttcttcccaccccaagtccaagaacaaatgccagccacgtcctccgccacttggagagatgagaacccagtggggtcacgtaaaggaattgcaggtcggtgagaggacaagagggactcccatgttctaagcacctgttcctggccaggctctaggccaggctctctaagcacatttctcctttcattccccctaaaaacagagtgacctggaagtagatgttctttgctccttgtcagagttgaagaggctgacttggcccactgctaagcggcagaggcagggccagccatcctgtcgcaagcccgtgctggggctgccctttctgtttccagtccagttacggacttcccggccgccactgggccctgccggtcaccaggccactgtgcagtgggcgcagagcatggtcaggagtggcctgcccgtactcctccacccagatgagggccctccagagcctgcaggcatctgtggggaatcccagcctgcaggttcttggagaagcaggtgaacctaaggatgaaagcaaaggagggccttgaggaagcagcccccaggcctggcagccacgcagcggctgagctcatgaacttggttcgcagcctgccttgcccctggaggccacgccaggcgctcacccctgagcccacagcccctgcttgggctgcctggcaccctcagggtggcccggcctcctcctgccactctgagcacatgtccgggggttgccaccagagacggctttgttctcccagctaaggccgtggagctgctgtgtgactgtgtcaggcctggacaaggaagacccttagggatgacgtccccgctgcatatttattcaaggtgactcttgtacttggcaagggaagtccactgtgtgattgtctgtattcttaatataatttgttaaataaacgtttgttttaacctctttc

SEQ ID NO: 228679 - DNA, 960 bp, Artificial Sequence
  derived and/or modified sequence
atgaggagctgcttttgtgttcggcgtagtcgagatcctcctcctccacagccacctcctccacctccgcagagaggtacagaccagtcaactatgcccgaagtgaaagacctcagtgaagctctgccagagacatctatggaccccatcactggtgtcggggtagtagccagtcggaacagagctcctacaggatacgatgtggtggcgcagaccgccgatggcgtggacgccgacctttggaaagatggactattcaaatctaaagttacacgatacctctgctttactagaagcttttctaaagagaattctcatctcggtaacgtcctggttgacatgaaactcattgacatcaaagatacgctgcctgtgggtttcatccctattcaggagacggtggacacacaagaagtggcgttcaggaaaaaacggctttgcatcaagtttatcccgagagatagcacagaagctgccatatgtgatattaggataatggggcggaccaagcaagccccaccccagtacacattcattggggaactaaattctatgggtatttggtacagaatggggagggtgcccagaaatcacgacagcagtcagcccacgactccatcccagagtagtgctgctagcacccctgccccaaatttgcctcgccacatttccctaactctccccgcaacattccgggggcggaacagtacgcggaccgattacgagtatcagcacagtaacctctatgctatttcggcaatggacggcgtcccatttatgatctcagagaagttttcctgtgtaccagagtccatgcagccattcgatctcctgggcattacaatcaagtccttagctgagatcgagaaggaatatgaatacagcttccggacagagcaatctgcagcagcgcggctgccgccctctccgacccgatgccaacagatcccccagagctag

SEQ ID NO: 228680 - DNA, 960 bp, Artificial Sequence
  derived and/or modified sequence
atgaggagctgcttctgtgtgcggcgcagccgggaccccccaccaccccagcccccacctcctccaccccagaggggcacagaccagagcaccatgcctgaggtgaaggacctgtctgaggccctgcctgagacctccatggaccccatcactggagtgggcgtggtggccagcaggaacagagcccccaccggctatgatgtggtggcccagacagcagatggagtggatgctgacctgtggaaggatggcctcttcaagagcaaggtgacccgctacctgtgcttcaccaggagcttcagcaaagaaaacagccacctgggcaatgtgctggtggacatgaagctgattgacatcaaggacaccctgcctgtgggcttcatccccatccaggagaccgtggacacccaggaggtggccttcaggaagaagaggctgtgcatcaagttcatcccccgggacagcacagaggccgccatctgtgacatccgcatcatgggccgcaccaagcaggccccaccccagtacaccttcatcggggagctgaacagcatgggcatctggtacaggatgggccgggtgcccaggaaccacgacagcagccagcccaccacccccagccagagcagcgctgccagcaccccagcccccaacctgcccaggcacatcagcctgaccctgcctgccaccttccggggcaggaacagcaccaggacagattatgagtaccagcacagcaacctgtatgccatcagcgccatggatggagtgcccttcatgatcagcgagaagttcagctgtgtgcctgagagcatgcagccctttgacctgctgggcatcaccatcaagagcctggccgagattgagaaggagtatgagtacagcttcagaacagagcagagcgctgctgcccggctgccccccagccccacccgctgccagcagatcccccagagctag

SEQ ID NO: 228681 - DNA, 960 bp, Artificial Sequence
  derived and/or modified sequence
atgcggagctgcttctgcgtgcggcggagccgggaccccccccccccccagcctccccccccgccccctcagcggggcacagatcagtcaaccatgccggaagtgaaagatctgtctgaagcgttaccagagacttcaatggacccaattaccggcgtgggggtggttgcctctaggaatcgggccccaaccggatacgatgtggtcgcccaaacagccgacggggtggacgctgacctgtggaaagacggcctcttcaaatctaaggtgacccgctatctttgcttcacacgaagttttagcaaggaaaactcgcacctgggcaatgtgctcgtggatatgaaacttatcgatatcaaagatacccttcctgtaggtttcatcccaattcaggagactgtcgacacacaggaggttgctttccgaaagaagcggctttgcataaaattcattcctcgtgatagtaccgaggctgctatctgcgatattcggattatgggacggaccaagcaggccccgccccagtacacttttattggggagctgaactctatgggcatttggtatagaatgggcagagttcccagaaaccacgattcctcgcagcccaccaccccaagccagagctccgcagccagtactcctgctcccaatctgccccgccacatctccctgaccctaccagcaaccttccgagggcggaattctaccaggaccgactacgaataccagcacagcaacttgtatgccatttcagctatggacggcgttccctttatgatctcggagaaattcagttgcgttccagaatcgatgcagcctttcgaccttctaggtatcaccatcaagagccttgcagagatcgagaaggaatatgaatatagcttccggacggaacagagcgctgccgcccgtcttcccccatcccccacacgttgtcagcagatcccacagtcctag

SEQ ID NO: 228682 - DNA, 960 bp, Artificial Sequence
  derived and/or modified sequence
atgcggagctgcttctgtgtccggagaagcagagatcctccaccccctcagccaccaccccctccgccacagcgcggaaccgaccagagtacaatgcccgaggttaaagacctgagtgaggccctgccggagacatccatggacccgatcactggcgtgggagtggtcgcttccaggaaccgggcaccaaccggctacgatgtcgtcgcgcagactgccgacggggtcgatgccgatctgtggaaggatggattattcaaaagcaaggttacgaggtacctgtgtttcacacggtcattctccaaggaaaattcccacctcggtaacgttctggtcgacatgaagctcatagacataaaggataccttgccagtggggttcatccccatccaggagactgttgatactcaggaggttgcctttcgaaagaaacgactgtgcatcaaatttattcctcgggacagcaccgaggccgctatctgcgacatcaggattatgggccgtaccaagcaggctcccccacagtataccttcatcggcgaattgaacagcatgggcatttggtaccgcatgggccgagtgccgagaaatcatgacagctcccagccaaccacgccatcgcagagctctgctgcatccacacctgccccaaatcttcctaggcatattagtctgacattaccagcaaccttcaggggaaggaactcgacccggacagactacgagtaccagcacagtaacctgtatgccatttcagccatggacggtgtgccattcatgatctccgaaaagttctcttgtgtccccgagtcgatgcaaccattcgatctgctgggtatcacaattaagagtttagctgagatcgaaaaagagtacgaatattctttccgaaccgaacagtcagctgccgctaggctaccaccatctcccacacgatgccaacagatccctcaaagttag

SEQ ID NO: 228683 - protein, 523 aa, Artificial Sequence
  derived and/or modified sequence
MSRQFTCKSGAAAKGGFSGCSAVLSGGSSSSFRAGSKGLSGGFGSRSLYSLGGVRSLNVASGSGKSGGYGFGRGRASGFAGSMFGSVALGPVCPTVCPPGGIHQVTVNESLLAPLNVELDPEIQKVRAQEREQIKALNNKFASFIDKVRFLEQQNQVLETKWELLQQLDLNNCKNNLEPILEGYISNLRKQLETLSGDRVRLDSELRNVRDVVEDYKKRYEEEINKRTAAENEFVLLKKDVDAAYANKVELQAKVESMDQEIKFFRCLFEAEITQIQSHISDMSVILSMDNNRNLDLDSIIDEVRTQYEEIALKSKAEAEALYQTKFQELQLAAGRHGDDLKNTKNEISELTRLIQRIRSEIENVKKQASNLETAIADAEQRGDNALKDARAKLDELEGALHQAKEELARMLREYQELMSLKLALDMEIATYRKLLESEECRMSGEFPSPVSISIISSTSGGSVYGFRPSMVSGGYVANSSNCISGVCSVRGGEGRSRGSANDYKDTLGKGSSLSAPSKKTSR

SEQ ID NO: 228684 - DNA, 1572 bp, Artificial Sequence
  derived and/or modified sequence
atgtctcggcagttcacatgcaagagcggagccgctgcaaaaggaggattcagcgggtgctcagccgtactgtcgggcgggtcatcatcctccttcagggctggatcaaaggggcttagtgggggctttggctcaaggtcactttattcactcgggggggtccgatccctgaatgttgcgtccggcagcggtaaaagcggagggtacgggttcggcagaggcagagcctctggttttgccgggagcatgttcggtagcgtggcactaggtcccgtgtgtccaacagtttgtccacctggcgggattcaccaggtgactgtgaacgagtccctactggccccccttaatgtcgaactcgaccctgagatccaaaaggtgagagcccaggaacgagagcagataaaggctctgaataacaagttcgctagtttcatcgataaagtacgatttctagaacagcagaaccaagtgctcgagactaagtgggaactgttacagcagcttgacctgaacaattgcaagaataatcttgaacctatactggaaggatatatctcaaacctccggaagcaactggagacgctttcaggggatcgggtaaggctcgactccgaactgcggaacgtgagggatgtggttgaggactataagaaacgctacgaggaagagatcaacaagaggacggctgccgaaaatgaattcgtgctgcttaagaaagatgtcgatgcggcttacgccaataaagttgaactgcaggccaaggtggaatcaatggatcaagagatcaagttcttcaggtgtctgttcgaggctgagatcacacagatccagagccatattagcgacatgtctgtcattctgtctatggacaataaccgcaacctagatcttgattccattatagatgaagtgcgcacgcagtatgaggaaatcgcgctgaagtcaaaagccgaggctgaggcgctgtaccagactaagttccaggaactccagttggccgccgggcgtcacggcgatgacctcaagaataccaaaaatgagatatcagagctgactcggctgattcagcggatccggtctgaaattgaaaatgtaaagaagcaggcatccaacctggagacagccattgctgacgcggaacagcggggcgataacgcgctcaaggatgctagggcaaagctggacgaactggaaggcgctctgcaccaggcgaaagaagagctcgctaggatgttgagagaataccaagaacttatgtctctgaagctcgcccttgatatggagatagccacataccggaagttactcgaatcagaagaatgcagaatgagtggcgaatttcccagtcctgttagcataagcatcatctcctccacaagtggcggaagtgtctatggtttccggccttccatggtatccggcggctatgttgctaacagttccaattgtatttcaggagtgtgttcagtgcgaggcggcgagggccggtcccgcgggtcagcaaatgactacaaggatacgctcggaaagggtagctctctcagcgccccctctaaaaaaacatcgcggtag

SEQ ID NO: 228685 - DNA, 2265 bp, Artificial Sequence
  derived and/or modified sequence
acaaccagcagaaccttttgggattttgccttcctccctcctgcatctgagctttgtctccaccagcaacatgagccgccaattcacctgcaagtcgggagctgccgccaaggggggcttcagtggctgctcagctgtgctctcagggggcagctcatcctccttccgggcagggagcaaagggctcagtgggggctttggcagccggagcctctacagcctggggggtgtccggagcctcaatgtggccagtggcagcgggaagagtggaggctatggatttggccggggccgggccagtggctttgctggaagcatgtttggcagtgtggccctggggcctgtgtgcccaactgtatgcccacctggaggcatccaccaggttaccgtcaatgagagcctcctggcccccctcaacgtggagctggaccccgagatccagaaagtgcgtgcccaggagcgagagcagatcaaggctctgaacaacaagttcgcctccttcatcgacaaggtgcggttcctggagcagcagaaccaggtactggagaccaagtgggagctgctgcagcagctggacctgaacaactgcaagaacaacctggagcccatcctcgagggctacatcagcaacctgcggaagcagctggagacgctgtctggggacagggtgaggctggactcggagctgaggaatgtgcgggacgtagtggaggactacaagaagaggtatgaggaggaaatcaacaagcggacagcagcagagaacgagtttgtgctgctcaagaaggatgtggatgctgcttacgccaataaggtggaactgcaggccaaggtggaatccatggaccaggagatcaagttcttcaggtgtctctttgaagccgagatcactcagatccagtcccacatcagtgacatgtctgtcatcctgtccatggacaacaaccggaacctagacctggacagcatcattgacgaagtccgcacccagtatgaggagattgccttgaagagtaaggccgaggctgaggccctgtaccagaccaagttccaagagcttcagctggcagctggcaggcatggggacgacctcaaaaacaccaagaatgaaatctcggagctcactcggctcatccagagaatccgctcagagatcgagaacgtgaagaagcaggcttccaacctggagacagccatcgctgatgctgagcagcggggagacaacgccctgaaggatgcccgggccaagctggacgagctggagggcgccctgcaccaggccaaggaggagctggcgcggatgctgcgcgagtaccaggagctcatgagcctgaagctggccctggacatggagatcgccacctatcgcaagctactggagagcgaggagtgcaggatgtcaggagaatttccctcccctgtcagcatctccatcatcagcagcaccagtggcggcagtgtctatggcttccggcccagcatggtcagcggtggctatgtggccaacagcagcaactgcatctctggagtgtgcagcgtgagaggcggggagggcaggagccggggcagtgccaacgattacaaagacaccctagggaagggttccagcctgagtgcaccctccaagaaaaccagtcggtagagaagactgccccgggccccgcctcattccatgacccggctctggatcccacactgtacttcccacagcccactctcagctccatctccaccctgctggtcctgctcccatacacctggcactggccttggccacccacttctcccagcctgtgtcttcctgatcctgggaaggcctggatgaccaagcttggtgaaattcctccctgtacacaccctattaactccttggctgtggtcccccagctacaccaccagcccaggtcctggctgccagctttcctcctctgcccggcctctagcgcagtcgctaactactctgctgggctccctgggtctctgcccaaggccccgcacacactgggacctagcatagttcctgcctatgccaggagctggctctgtgtttaagaaaaggaggactgaaggacaaacaaccaagagtggcccagtccccacccccacatctagctcagtctcaaatctgagtgggaccaagtgcaattcagggcctttttctccactcacctgcacccagaagcagagaaaagcaggcactgttcacttttcctttattcttaatggccttcctctgttgcaacctcaataaacagcacaatctca

SEQ ID NO: 228686 - DNA, 1572 bp, Artificial Sequence
  derived and/or modified sequence
atgagccggcagttcacctgcaagtctggagctgctgccaagggcggcttcagcggctgcagcgctgtgctgagcggcggcagcagcagcagcttccgggccggcagcaagggcctgagcggcggcttcggcagccgcagcctgtacagcctgggcggcgtgcgcagcctgaatgtggccagcggcagcggcaagagcggcggctacggcttcggccggggccgggccagcggctttgctggctccatgtttggatctgtggccctgggccctgtgtgccccaccgtgtgccccccaggcggcatccaccaggtgacagtgaatgaaagcctgctggcccccctgaatgtggagctggaccctgagatccagaaggtgcgggcccaggagcgggagcagatcaaggccctgaacaacaagtttgccagcttcatcgacaaggtgcgcttcctggagcagcagaaccaggtgctggagaccaagtgggagctgctgcagcagctggacctgaacaactgcaagaacaacctggagcccatcctggagggctacatcagcaacctgaggaagcagctggagaccctgagcggggacagagtgcggctggacagcgagctgagaaatgtgagagatgtggtggaggactacaagaagagatatgaggaggagatcaacaagaggacagctgctgaaaatgaatttgtgctgctgaagaaggatgtggatgctgcctatgccaacaaggtggagctgcaggccaaggtggagagcatggaccaggagatcaagttcttccgctgcctgtttgaagctgagatcacccagatccagagccacatcagtgacatgtctgtcatcctgtccatggacaacaacagaaacctggacctggacagcatcattgatgaggtgaggacccagtatgaggagatcgccctgaagagcaaggccgaggccgaggccctgtaccagaccaagttccaggagctgcagctggccgccggcagacatggagatgacctgaagaacaccaagaatgagatcagcgagctgaccaggctcatccagaggatccgctcagaaattgaaaatgtgaagaagcaggccagcaacctggagacagccatcgcagatgctgagcagagaggagacaatgccctgaaggatgcccgggccaagctggatgagctggagggcgccctgcaccaggccaaggaggagctggccaggatgctgcgggagtaccaggagctgatgagcctgaagctggccctggacatggagatcgccacctacaggaagctgctggagagcgaggagtgcaggatgtctggagagttccccagccctgtgtccatcagcatcatcagcagcaccagcggcggctctgtgtatggcttccggcccagcatggtgtctgggggctacgtggccaacagcagcaactgcatctctggagtgtgcagcgtgcggggcggggagggccgcagccggggcagcgccaatgactacaaggacaccctgggcaagggcagcagcctgagcgcccccagcaagaagaccagcaggtag

SEQ ID NO: 228687 - DNA, 1572 bp, Artificial Sequence
  derived and/or modified sequence
atgagccggcagttcacctgcaagagcggcgccgccgccaagggcggctttagcggatgcagcgccgtcctgagcggcggctcttctagcagcttcagagcaggctcaaagggcctctcaggtggctttgggagccgatcactgtactcacttggaggagtccgctctctaaacgtcgcctccggatccggcaagagcggcgggtatggcttcggacggggaagagcctcagggtttgccgggtcaatgttcggatcagtggccctgggtccagtatgtccaaccgtctgtccaccgggtgggatccatcaggtgacagtcaacgagtcactgctggccccgttaaatgtcgagctcgatcccgagattcagaaggtgcgggcgcaagaacgagaacagatcaaagctctaaataacaaatttgcctccttcatcgacaaagtgcgattcttggaacagcaaaaccaagttctcgagactaaatgggagttgctgcagcagctcgatttaaacaactgtaagaataatctggagcctatcctggagggttatatatcaaatctccgcaaacagctcgaaacactctcaggagaccgcgtgcgcctcgatagcgaattacgcaatgttcgtgatgtggtggaagactataaaaaacgatacgaggaggagatcaacaaacgcaccgccgcagaaaacgagttcgttttgttaaagaaagacgtggacgctgcatatgccaacaaggtcgagttacaggctaaagtcgagagcatggaccaggaaataaagttcttccgctgcctgttcgaggcagaaatcacacagatccagtcacacatatccgatatgtccgtgatcctgagcatggataacaataggaacctggatcttgatagtataattgacgaagtacggacccagtatgaagaaattgccttgaaatctaaggccgaagctgaggctttatatcagaccaaatttcaggagctgcaactcgcagctgggcggcacggagacgatctaaaaaataccaagaacgaaattagcgagctcaccaggctgatccagcgtattcgatctgagatcgagaatgttaagaaacaggccagcaacctggagaccgcaatcgccgatgcggagcagcgcggagataatgctctcaaggatgccagggcgaaactggacgaacttgagggcgcattacatcaggccaaggaggagctcgcccgtatgcttagagaataccaggagctcatgtcccttaagctggcactagacatggagatcgccacctaccgaaagctgctggaatccgaggaatgtcgtatgagcggtgagtttccttcaccggtttctattagtatcatctcgagcacctcaggcggctcagtgtacggcttccgaccctccatggtttccggcgggtacgttgctaacagtagcaactgcatctccggcgtgtgctctgtgagagggggtgaagggagatcaagaggtagcgccaacgactataaggacaccctaggcaaggggagctcactgtcagctccctcaaaaaaaaccagcaggtag

SEQ ID NO: 228688 - DNA, 1572 bp, Artificial Sequence
  derived and/or modified sequence
atgtccagacagtttacctgtaagagtggcgcagctgctaaaggcggttttagcgggtgcagtgctgtcttatccgggggaagctcttcaagtttcagggctgggagtaaggggctgtccggcggttttggttctcgttccctgtactccttgggaggagtcaggagtttgaatgtggcctctggctcaggtaaaagcggaggctacgggttcggtagagggagggcctccggatttgcgggatccatgttcggcagtgtcgcactgggccctgtgtgcccaactgtgtgtcccccaggtggcatacaccaggtaacagttaatgagtccttactggctccacttaacgtcgaactcgatccagaaatccagaaggtgcgtgctcaggagcgcgagcagatcaaggcacttaacaataaatttgcctccttcattgataaggtgcggttcctggagcaacagaaccaagtgcttgagactaaatgggaactcctgcagcagcttgacctgaacaactgcaaaaataacctcgaaccgatacttgagggttacatcagtaatctcaggaagcagctcgaaactttgtcgggagatcgagtgcgcctggattccgaactgaggaacgtccgcgacgtggttgaggattataaaaagcggtacgaagaggaaatcaataagaggactgcggctgagaatgagtttgtccttctgaaaaaagacgttgacgccgcatacgctaataaagtggaacttcaggctaaggtggaaagcatggaccaggagattaaattctttcgatgtttattcgaggccgagatcacccagatacaatctcatatctcagatatgtctgtcatcctttctatggataacaaccgcaacctggacttggattctatcatcgacgaggtacgaactcagtatgaagaaatcgctctgaaaagcaaagccgaagccgaggccctctaccagacaaagttccaggaattgcaactggctgctgggaggcacggagacgacctcaaaaataccaaaaacgagattagtgaacttacaaggctgattcagcgaatccgcagtgagattgagaacgtgaagaagcaggctagtaacctcgagaccgccatcgcagatgctgagcagcgaggggataatgctcttaaggacgctcgggctaaactggatgaactcgaaggcgctctccatcaggcaaaggaggagctggctcggatgttgagagagtaccaggagctcatgtccctcaaactggcgctggatatggaaatcgcgacatatcgcaaattgctggaatctgaagaatgccggatgtcaggagagtttccctctcccgtgtctatcagtatcatatcaagtacctccggcggaagcgtttacggatttcgcccaagcatggtctcgggaggctatgtggcaaactcctcaaactgcatctccggtgtgtgttctgtccgaggcggagaggggaggagtcggggaagcgcaaatgactacaaggataccctggggaaagggagtagcctgtcagccccaagcaaaaaaactagcaggtag

SEQ ID NO: 228689 - DNA, 1572 bp, Artificial Sequence
  derived and/or modified sequence
atgagcagacagttcacctgcaagagcggcgccgccgccaagggcggcttcagcggctgcagcgccgtgctgagcggcggcagcagcagcagcttcagagccggcagcaagggcctgagcggcggcttcggcagcagaagcctgtacagcctgggcggcgtgagaagcctgaacgtggccagcggcagcggcaagagcggcggctacggcttcggcagaggcagagccagcggcttcgccggcagcatgttcggcagcgtggccctgggccccgtgtgccccaccgtgtgcccccccggcggcatccaccaggtgaccgtgaacgagagcctgctggcccccctgaacgtggagctggaccccgagatccagaaggtgagagcccaggagagagagcagatcaaggccctgaacaacaagttcgccagcttcatcgacaaggtgagattcctggagcagcagaaccaggtgctggagaccaagtgggagctgctgcagcagctggacctgaacaactgcaagaacaacctggagcccatcctggagggctacatcagcaacctgagaaagcagctggagaccctgagcggcgacagagtgagactggacagcgagctgagaaacgtgagagacgtggtggaggactacaagaagagatacgaggaggagatcaacaagagaaccgccgccgagaacgagttcgtgctgctgaagaaggacgtggacgccgcctacgccaacaaggtggagctgcaggccaaggtggagagcatggaccaggagatcaagttcttcagatgcctgttcgaggccgagatcacccagatccagagccacatcagcgacatgagcgtgatcctgagcatggacaacaacagaaacctggacctggacagcatcatcgacgaggtgagaacccagtacgaggagatcgccctgaagagcaaggccgaggccgaggccctgtaccagaccaagttccaggagctgcagctggccgccggcagacacggcgacgacctgaagaacaccaagaacgagatcagcgagctgaccagactgatccagagaatcagaagcgagatcgagaacgtgaagaagcaggccagcaacctggagaccgccatcgccgacgccgagcagagaggcgacaacgccctgaaggacgccagagccaagctggacgagctggagggcgccctgcaccaggccaaggaggagctggccagaatgctgagagagtaccaggagctgatgagcctgaagctggccctggacatggagatcgccacctacagaaagctgctggagagcgaggagtgcagaatgagcggcgagttccccagccccgtgagcatcagcatcatcagcagcaccagcggcggcagcgtgtacggcttcagacccagcatggtgagcggcggctacgtggccaacagcagcaactgcatcagcggcgtgtgcagcgtgagaggcggcgagggcagaagcagaggcagcgccaacgactacaaggacaccctgggcaagggcagcagcctgagcgcccccagcaagaagaccagcagatag

SEQ ID NO: 228690 - protein, 1464 aa, Artificial Sequence
  derived and/or modified sequence
MCLLVFPLVPRSPDYILPCSPGWRLRLAASFLLSVFPLLDLLPVALPPGAGPGPIGLEVLAGCVAAVAWISHSLALWVLAHSPHGHSRGPLALALVALLPAPALVLTVLWHCQRGTLLPPLLPGPMARLCLLILQLAALLAYALGWAAPGGPREPWAQEPLLPEDQEPEVAEDGESWLSRFSYAWLAPLLARGACGELRQPQDICRLPHRLQPTYLARVFQAHWQEGARLWRALYGAFGRCYLALGLLKLVGTMLGFSGPLLLSLLVGFLEEGQEPLSHGLLYALGLAGGAVLGAVLQNQYGYEVYKVTLQARGAVLNILYCKALQLGPSRPPTGEALNLLGTDSERLLNFAGSFHEAWGLPLQLAITLYLLYQQVGVAFVGGLILALLLVPVNKVIATRIMASNQEMLQHKDARVKLVTELLSGIRVIKFCGWEQALGARVEACRARELGRLRVIKYLDAACVYLWAALPVVISIVIFITYVLMGHQLTATKVFTALALVRMLILPLNNFPWVINGLLEAKVSLDRIQLFLDLPNHNPQAYYSPDCGRLGAQIKWLLCSDPPAEPSTVLELHGALFSWDPVGTSLETFISHLEVKKGMLVGIVGKVGCGKSSLLAAIAGELHRLRGHVAVRGLSKGFGLATQEPWIQFATIRDNILFGKTFDAQLYKEVLEACALNDDLSILPAGDQTEVGEKGVTLSGGQRARIALARAVYQEKELYLLDDPLAAVDADVANHLLHRCILGMLSYTTRLLCTHRTEYLERADAVLLMEAGRLIRAGPPSEILPLVQAVPKAWAENGQESDSATAQSVQNPEKTKEGLEEEQSTSGRLLQEESKKEGAVALHVYQAYWKAVGQGLALAILFSLLLMQATRNAADWWLSHWISQLKAENSSQEAQPSTSPASMGLFSPQLLLFSPGNLYIPVFPLPKAAPNGSSDIRFYLTVYATIAGVNSLCTLLRAVLFAAGTLQAAATLHRRLLHRVLMAPVTFFNATPTGRILNRFSSDVACADDSLPFILNILLANAAGLLGLLAVLGSGLPWLLLLLPPLSIMYYHVQRHYRASSRELRRLGSLTLSPLYSHLADTLAGLSVLRATGATYRFEEENLRLLELNQRCQFATSATMQWLDIRLQLMGAAVVSAIAGIALVQHQQGLANPGLVGLSLSYALSLTGLLSGLVSSFTQTEAMLVSVERLEEYTCDLPQEPQGQPLQLGTGWLTQGGVEFQDVVLAYRPGLPNALDGVTFCVQPGEKLGIVGRTGSGKSSLLLVLFRLLEPSSGRVLLDGVDTSQLELAQLRSQLAIIPQEPFLFSGTVRENLDPQGLHKDRALWQALKQCHLSEVITSMGGLDGELGEGGRSLSLGQRQLLCLARALLTDAKILCIDEATASVDQKTDQLLQQTICKRFANKTVLTIAHRLNTILNSDRVLVLQAGRVVELDSPATLRNQPHSLFQQLLQSSQQGVPASLGGP

SEQ ID NO: 228691 - DNA, 4395 bp, Artificial Sequence
  derived and/or modified sequence
atgtgtctgctggtgttcccgctagtcccgaggtcccctgactatatccttccgtgcagcccaggctggagacttcgcttagccgcttcatttcttctctctgtattccccctcctggacttgctgcctgttgccctgccgccgggggctggccccggccctatagggctcgaggttcttgcaggctgcgttgcagcagtggcatggatatcccatagcttggcgttgtgggtactggcccacagcccacatggccattcacgaggccccctggccctggctcttgtggcgctactacctgcacccgccctggtcttgactgtcctctggcactgccagcgcggcacccttttaccaccacttctccccggaccgatggcccgcctgtgcctgctcatattacagttagcagcgctattagcctatgcattaggatgggccgctccaggcggtcctagggaaccatgggctcaagagcccctcttacccgaagaccaggagcccgaggtcgccgaggacggtgagtcatggctgagccgcttctcctacgcttggctggccccgctcctcgcccgaggggcctgcggtgagttaaggcagccccaggatatttgtagattgcctcaccgactgcaaccgacgtatctggctcgagtatttcaggctcattggcaggagggagcacggctctggcgagcactctacggggccttcggaaggtgctatctggccctcgggctgctgaagctggtgggcaccatgcttggattttcagggccgttattgctcagccttctcgtgggattccttgaggagggtcaggagccactctctcatgggctcctgtatgccctggggttggccggtggcgccgtcttgggcgcggtattacagaatcagtacggttacgaggtctataaagtgaccttgcaggcccgtggcgccgttctcaatatcctgtactgtaaagccctgcaactgggaccctctcgacctccaaccggcgaggctctcaatctgctgggtacagactctgagagacttcttaacttcgcagggtctttccatgaggcttggggcctgccactccagctggcaattacactttacttgctctatcagcaggtcggcgtggcctttgtcggcggcctgatactggctcttctgcttgtgccggtaaacaaagtgattgccacccgaatcatggcaagtaatcaggaaatgctccagcataaagacgctagggttaaattagtgacggaacttttgagcgggatcagagtgattaaattttgcggatgggagcaggcactgggtgctcgcgtggaggcatgcagagcacgggagttaggcagactcagagtgataaagtatctcgacgcagcctgcgtgtacctctgggccgccttgccagtcgttataagcatcgtgattttcatcacctacgtcctaatgggacatcagctgaccgccaccaaggtcttcacagcactggccctggtgagaatgttgatccttccattgaataatttcccttgggtcatcaacggcttgctggaggctaaagtatcactggaccgaatacaactgtttcttgatctgccaaatcataatccacaagcgtactactctccggactgcggcagactcggcgctcagatcaagtggttactttgttctgacccccccgcagagccctctaccgtgctggaattgcatggggccctattctcctgggatcccgtgggcacctcattagaaacctttatctctcatctggaagtgaagaagggaatgctggtaggcatagtggggaaagtcggttgcggaaagtcctcattgctcgcggctatagccggggagttacaccgtctgaggggtcacgtggccgtgaggggtcttagtaaaggatttggacttgcaacgcaggaaccatggatccagttcgcgacaattcgggataacatcttgtttggaaagacttttgatgcgcagctgtataaggaggttctggaagcttgcgcccttaatgacgacctaagcatattaccggcaggcgaccagaccgaagtgggcgagaagggcgttacactcagtgggggccagagagcccgcattgccctcgcacgtgctgtgtaccaggaaaaagaattgtatttactcgacgacccactcgccgctgtggacgccgatgtggctaatcatctattacatagatgtatcttgggcatgctgagctacaccactcgactcctatgcacccataggaccgagtatctggagagggcggacgctgtgttactgatggaagcaggtcgtctgatccgcgcaggcccccccagcgaaatattgcccctagtccaggccgttcccaaggcttgggccgagaatgggcaggaatctgactcagccaccgcccagagcgttcaaaacccagaaaagacgaaagaaggtctcgaggaggaacagagtacgtctgggcggttactccaggaggaaagcaagaaggagggcgctgtagccctgcacgtgtaccaggcctattggaaggccgtcgggcaaggccttgctctggcgattctgttctctctactactaatgcaggctacacgaaacgccgctgactggtggctgtctcactggataagtcagttgaaggccgaaaactctagccaggaggcacagccctcaaccagtcccgcatccatgggactgttctcaccgcagctcctgctcttttcccccggtaatctatatatcccggtgtttccattaccaaaggcagccccgaacgggagctccgacattcggttctacctgacagtgtatgccactatcgccggcgtgaattctctctgtaccttattgcgggctgtgttattcgctgcaggtacactccaagccgctgcgaccctgcacaggaggcttctacatagggttctcatggcgcctgtgaccttttttaatgccacccccacaggccgcatcctgaatcggttctcctcagacgtggcatgcgcagacgatagccttcccttcatacttaatattttgttggccaacgctgccggcctgctgggccttttagccgtcctcgggtctggcctgccttggctgttgctgctgctgccccccttgagcatcatgtattatcacgtgcagaggcactaccgcgccagttctcgcgagctacgaagattaggcagcttaacattgagcccactgtactcacatttggccgataccctggccggattgtccgtattacgcgctaccggtgccacttataggttcgaagaggaaaacctgagacttctggagctcaatcagcgctgccagtttgcaaccagtgcaacgatgcagtggctggacattagactccagctgatgggggcagcagtggtatcagcgatagccggaatcgctctggttcagcatcaacagggcctggccaatccgggattggtaggcttgtcattatcctacgccttatcattaaccggcctgcttagcggcctggtgtcttcctttacccagaccgaagcaatgttggtttccgtggagagactggaagaatacacctgcgacttgcctcaggagccccagggacaacccttgcagctgggtactggatggctgactcagggaggtgtggaatttcaagacgtagtgctagcttaccggcctggcttgccgaatgctttggatggcgtgacattctgcgtgcagccgggtgaaaaactgggaatcgtgggtagaacagggtccggtaaatcttctctcctgctcgtgctctttcgtctcctggagccctcctctggaagagtcctgctggatggggtggatacctctcagctcgagctggcccagctccgaagccagctcgccattatcccccaagaaccctttctgttttccggaaccgtgcgcgagaatctggatccgcaagggctacataaggacagagccctgtggcaggcgctgaaacagtgccacctgtcagaagtgatcacttcgatgggcggcctcgatggcgaactgggcgaggggggacggtctttgtctctgggacaacggcagttgctctgcttagctagagccctgcttactgacgccaaaatactgtgcattgatgaggcgaccgcctctgtagaccagaagactgatcagctgctgcaacagacaatttgcaaacggtttgccaataagactgtcttaactatcgcccaccgccttaacactattctcaacagtgaccgagtacttgtgctgcaggccggcagagtagtggagctggactcccctgctacactgcggaaccagccgcactcactctttcagcagctccttcagagtagtcagcaaggagtccccgcttcgctcgggggcccttag

SEQ ID NO: 228692 - DNA, 4395 bp, Artificial Sequence
  derived and/or modified sequence
atgtgcctgctggtgttccccctggtgcccaggagcccagactacatcctgccctgcagccctggctggaggctgcggctggccgccagcttcctgctgagcgtcttccccctgctggacctgctgcctgtggccctgcccccaggggccggccctggccccatcggcctggaggtgctggccggctgtgtggccgctgtggcctggatcagccacagcctggccctgtgggtgctggcccacagcccccacggccacagccggggccccctggccctggccctggtggccctgctgcctgccccagccctggtgctgactgtgctgtggcactgccagaggggcaccctgctgccccccctgctgcccggccccatggcccggctgtgcctgctgatcctgcagctggccgccctgctggcctatgccctgggctgggccgcccctgggggcccccgggagccctgggcccaggagcccctgctgcctgaggaccaggagcctgaggtggccgaggatggagagagctggctgagccgcttctcctatgcctggctggcccccctgctggcccggggggcctgtggggagctgcggcagccccaggacatctgccgcctgccccaccggctgcagcccacctacctggcccgggtcttccaggcccactggcaggagggcgcccggctgtggagggccctgtatggagccttcggccgctgctacctggccctgggcctgctgaagctggtgggcaccatgctgggcttcagcggccccctgctgctgagcctgctggtgggcttcctggaggagggccaggagcccctgagccacggcctgctgtatgccctgggcctggccggcggcgctgtgctgggcgctgtgctgcagaaccagtatggctatgaggtgtacaaggtgaccctgcaggcccggggagctgtgctgaacatcctgtactgcaaggccctgcagctgggccccagccggccccccaccggggaggccctgaacctgctgggcacagattctgagcggctgctgaactttgctggcagcttccacgaggcctggggcctgcccctgcagctggccatcaccctgtacctgctgtaccagcaggtgggcgtggcctttgtgggcggcctcatcctggccctgctgctggtgcctgtgaacaaggtgattgccacccgcatcatggccagcaaccaggagatgctgcagcacaaggatgcccgggtgaagctggtgacagagctgctgagcggcatccgggtcatcaagttctgtggctgggagcaggccctgggcgcccgggtggaggcctgccgggcccgggagctgggccgcctgcgggtcatcaagtacctggatgctgcctgtgtgtacctgtgggccgccctgcctgtggtgatcagcatcgtcatcttcatcacctacgtgctgatgggccaccagctgacagccaccaaggtgttcaccgccctggccctggtgaggatgctgatcctgcccctgaacaacttcccctgggtgatcaatggcctgctggaggccaaggtgtccctggaccgcatccagctgttcctggacctgcccaaccacaacccccaggcctactacagcccagactgtggccgcctgggcgcccagatcaagtggctgctgtgcagcgaccccccagctgagcccagcacagtgctggagctgcatggagccctcttctcctgggaccctgtgggcaccagcctggagaccttcatcagccacctggaggtgaagaagggcatgctggtgggcatcgtgggcaaggtgggctgcggcaagagcagcctgctggccgccatcgccggggagctgcaccggctgcggggccacgtggccgtgcggggcctgagcaagggcttcggcctggccacccaggagccctggatccagtttgccaccatccgggacaacatcctgtttgggaagacctttgatgcccagctgtacaaggaggtgctggaggcctgtgccctgaatgatgacctgagcatcctgcctgctggggaccagacagaggtgggggagaagggcgtgaccctgagcggcggccagagggcccgcatcgccctggcccgggctgtgtaccaggagaaggagctgtacctgctggatgaccccctggccgctgtggatgctgatgtggccaaccacctgctgcaccgctgcatcctgggcatgctgagctacaccacccggctgctgtgcacccacaggacagagtacctggagcgggcagatgctgtgctgctgatggaggccggccgcctcatccgggccggccccccatctgagatcctgcccctggtgcaggccgtgcccaaggcctgggccgagaatggccaggagagtgacagcgccacagcccagagcgtgcagaaccctgagaagaccaaggagggcctggaggaggagcagagcaccagcggccgcctgctgcaggaggagagcaagaaggagggcgctgtggccctgcacgtgtaccaggcctactggaaggctgtgggccagggcctggccctggccatcctcttcagcctgctgctgatgcaggccaccagaaatgctgctgactggtggctgagccactggatcagccagctgaaggccgagaacagcagccaggaggcccagcccagcaccagccctgcctccatgggcctcttcagcccccagctgctgctcttcagccctggcaacctgtacatccctgtgttccccctgcccaaggccgccccaaatggcagcagtgacatccgcttctacctgactgtgtatgccaccatcgccggcgtgaacagcctgtgcaccctgctgcgggctgtgctgtttgctgctggcaccctgcaggccgccgccaccctgcaccggcggctgctgcaccgggtgctgatggcccctgtgaccttcttcaatgccacccccaccggccgcatcctgaaccgcttcagcagtgatgtggcctgtgctgatgacagcctgcccttcatcctgaacatcctgctggccaatgctgctggcctgctgggcctgctggccgtgctgggcagcggcctgccctggctgctgctgctgctgccccccctgagcatcatgtactaccacgtgcagaggcactaccgggccagcagccgggagctgcggcggctgggcagcctgaccctgagccccctgtacagccacctggccgacaccctggccggcctgtctgtgctgcgggccaccggggccacctacagatttgaggaggagaacctgcggctgctggagctgaaccagcgctgccagtttgccaccagcgccaccatgcagtggctggacatccggctgcagctgatgggcgctgctgtggtgtctgccatcgccggcatcgccctggtgcagcaccagcagggcctggccaaccctggcctggtgggcctgagcctgtcctatgccctgagcctgaccggcctgctgagcggcctggtgagcagcttcacccagacagaggccatgctggtgtctgtggagcggctggaggagtacacctgtgacctgccccaggagccccagggccagcccctgcagctgggcaccggctggctgacccagggcggcgtggagttccaggatgtggtgctggcctacagacctggcctgcccaatgccctggatggagtgaccttctgtgtgcagcccggggagaagctgggcatcgtgggccgcacaggcagcggcaagagcagcctgctgctggtgctcttccggctgctggagcccagcagcggccgggtgctgctggatggagtggacaccagccagctggagctggcccagctgcggagccagctggccatcatcccccaggagcccttcctgttcagcggcaccgtgcgggagaacctggacccccagggcctgcacaaggaccgggccctgtggcaggccctgaagcagtgccacctgtctgaggtgatcacctccatgggcggcctggatggagagctgggggagggcggccgcagcctgagcctgggccagaggcagctgctgtgcctggcccgggccctgctgacagatgccaagatcctgtgcattgatgaggccacagcctctgtggaccagaagacagaccagctgctgcagcagaccatctgcaagagatttgccaacaagacagtgctgaccatcgcccaccggctgaacaccatcctgaacagcgacagagtgctggtgctgcaggccggccgggtggtggagctggacagccctgccaccctgaggaaccagccccacagcctcttccagcagctgctgcagagcagccagcagggcgtgcctgccagcctgggcggcccctag

SEQ ID NO: 228693 - DNA, 4395 bp, Artificial Sequence
  derived and/or modified sequence
atgtgcctgctggtgttccccctggtgccccggagccccgactacatattgccatgtagccccggctggaggctgagattggccgcctcatttctgttgtctgtgttccccctgttggacctcctcccagttgctctgccccccggcgcgggcccaggcccgatcgggctggaggtccttgctggctgtgtggcagctgtggcatggatctcccattctctcgccctctgggttctggcccattctccacacggccactccaggggtccccttgccctcgcactcgtggccttgcttccggctccagcccttgtacttactgtcctgtggcattgccagaggggtaccctgcttcccccactgctcccgggacctatggctcgcctgtgtctcctgatcctccagcttgcagcactgttggcctatgccctggggtgggctgcaccaggtggcccccgtgaaccatgggctcaggagcccctcctgcccgaggaccaggagccggaagttgctgaggatggcgaaagctggctgagccggttctcatacgcttggttagcccccttactggcccgaggtgcttgcggagaactgcgacaacctcaggacatctgtaggctgcctcaccggctgcagcccacctatctcgcccgggtgttccaggcacactggcaggagggcgccagactctggagagcattatacggtgcatttggtaggtgctatctcgctttgggcctgctcaagcttgttggaaccatgttgggtttcagtggccccctgttattgtctcttcttgttggctttctggaagaaggacaggaacctctgtctcatggactgctgtacgccctagggctggcagggggggctgtgttaggcgccgtgctgcagaatcagtacggatacgaggtctataaagtcacccttcaggcccgtggggcagtgctgaatattctctactgcaaagccttacagctgggaccatctcgtccgcccaccggcgaagcactgaacctgctcggaaccgattccgagcgactgttgaacttcgccggcagtttccacgaggcatggggcctgcctctccagctcgcaataacgctgtatcttctctatcaacaagtaggagtggccttcgtggggggattaattttggccttactcctggttcctgtcaataaggtcatagcaacgcggatcatggcttccaaccaggagatgctccagcataaggacgcccgcgtgaagctcgttaccgagctgctctccggcatccgcgtgattaagttctgcggctgggaacaagcgctgggggccagggtggaagcatgccgggcccgggagctgggccggctgcgagtcataaaatatctggacgctgcgtgtgtgtatctttgggcggccctgccagttgtgatctccatcgtgatctttatcacatacgtcctgatggggcaccagctaaccgctactaaggtgtttacagccctcgccctcgtccgcatgctcatcctgccgcttaacaactttccttgggttatcaatggcctgcttgaggcgaaggtgtctctcgataggatccagttgtttcttgatctacctaatcacaacccccaggcatactactctccagattgcgggcgcctgggcgcccaaataaagtggctgttgtgtagcgatcctccagccgaacctagtaccgtgctggaactgcatggcgctctgttcagctgggatcccgtcggcacgagcctcgaaactttcatttcacatttagaagtaaaaaaaggtatgttagtcggaatagtgggcaaagtagggtgcggcaagtctagtttgcttgctgctatcgctggagagctgcacagattacgcggacacgtggcggttaggggactctcaaaagggtttggcctcgccacccaagaaccttggatacaatttgcgactatacgggacaacatactgtttggcaagacatttgatgcgcagctttacaaagaagtattggaagcttgcgcactgaacgatgacctgtccattttaccagcaggtgatcaaaccgaggttggagagaagggcgttacgctctcaggcggtcaacgcgctaggattgcgcttgccagggcagtctatcaggaaaaagaactgtacctcttggatgaccctctggccgcggtggatgcagacgtggctaatcatctgctgcatcggtgcatccttggaatgttgtcatacaccaccaggctcttgtgcacgcaccgaaccgaatacctcgagcgagccgacgctgttctccttatggaggctggacgcctgatcagggcaggaccaccctccgagatattgcccctggtccaggctgtgcctaaggcctgggccgaaaacggccaagagagtgactcagcaaccgcgcagagcgtgcaaaaccctgaaaaaaccaaagaaggactggaagaggagcagagcacttcgggtaggcttctgcaggaagagtccaaaaaagagggcgcagtcgcactccatgtgtatcaagcctattggaaggcagtgggccaggggctggcattagccatcttattttccctgttgctgatgcaagcaactagaaatgccgccgactggtggctctcccactggatctctcagctgaaagctgagaactccagtcaggaagcacagccatctactagcccagcctcaatgggattattcagcccccagttgctcttgttttctcctggcaacctgtacattcccgtgtttccactgcctaaagccgcaccaaacggctccagcgacattcggttttacctgactgtctacgccaccatagctggggtaaacagcctgtgcacactgctgcgcgctgtcctctttgccgcaggcaccttgcaggccgcagccaccctgcaccggcgccttttgcatagagtgcttatggcaccagtaaccttttttaatgccaccccaacaggacgcatcctgaacaggttctcctctgacgtcgcctgtgctgatgatagcctgcccttcatactgaacatattgctggcgaatgccgctggcctgctcggcctcctagctgtgctagggtccgggctgccttggcttctcctgcttctgccccctttgtctataatgtattatcacgtgcaacgccactaccgagcgtccagtcgggagctgaggcgcctcggatctcttacacttagccccctttactcccacctggcagatactttagctgggctgtctgtactgagagccacaggcgctacctacagatttgaggaagagaatctgcgcctcctggagctgaatcagcgttgtcagtttgcaactagtgcaacaatgcagtggctggatataaggctccagctgatgggagccgccgtcgtgagtgctatcgccggcattgctctcgtgcagcaccagcagggactcgcaaatcccggcctggtcggactctctctgagctacgccctgagcctcaccggcctgttgtccggtctcgtgagcagcttcacacagaccgaagccatgctcgtttccgtcgagaggttagaggagtacacctgcgacctgccacaggaaccccaaggccagccactacagttgggtaccggctggctcacccaaggcggtgtcgaattccaggatgtggtcctcgcctaccggcccggtttgccaaatgccctggacggagtgaccttctgtgtgcagcctggggagaaattaggcatcgtaggccgcacagggtctggtaaatccagtctccttctggtgctcttccgtctgctggagcctagcagcggaagagttttgctcgatggggttgacacatcccagttagagctggcacagttgcgatcccaactggccatcattcctcaggaaccgtttttattctctgggactgtccgcgagaatctagaccctcagggtcttcataaagacagggctctctggcaggctctgaagcaatgccatctgagcgaggtgattacgagcatgggggggcttgatggggagttgggagagggagggaggtcactttctctcggccaaagacagttgctgtgccttgctcgcgcgctcctgactgacgccaagattctgtgcattgatgaagccaccgcatccgttgatcagaagacagatcagctgttacagcaaaccatttgtaagcgcttcgccaataaaactgtcctgaccattgctcatcggcttaacacaatcctgaactccgaccgggtgctagtgctgcaggctgggcgcgttgtcgaattagatagcccggccactttacggaaccagccacactccctattccagcagctgctacagtcctctcagcaaggcgtcccagcaagcttggggggcccgtag

SEQ ID NO: 228694 - DNA, 4395 bp, Artificial Sequence
  derived and/or modified sequence
atgtgccttctggtcttccctcttgtaccgaggagccccgactatatcttgccttgctcccccggatggcgcctgagactggccgctagctttttgctctctgttttccctcttctggatctactgcccgtagccttgcccccaggggctggtcctggtcctattggcttggaggtgcttgcagggtgcgtggctgccgtggcttggattagtcactcactggctttgtgggtgttggcacatagcccacacggccatagccgcggacctctggctctagcccttgtggcactcctgcccgctcctgccctggtcctgacagttctttggcactgtcagcggggaaccctgttgccccctcttctccctggtccaatggcaaggctgtgcctgttaatccttcagctggcagcgttgctcgcttacgctctgggatgggctgcacccggaggaccacgtgagccctgggctcaggagcctcttttgcccgaggaccaggaacccgaagtagctgaggacggcgaatcatggctgtcccggtttagctatgcttggttagcccctctactggccaggggggcatgtggtgaacttcggcaaccacaggacatctgtcgcctgccacataggttacagcctacctatcttgcaagagtgtttcaagctcactggcaggaaggtgccaggctctggagggccctctacggggcttttggccgttgctatctggctcttgggctgctgaagctagttggaacaatgcttggcttcagcggacccctgctgctcagcctcctggtcggcttcctggaggaaggacaggagcccctgagtcacgggctcttgtacgcactaggtctggccggaggggctgttctgggcgcagtgcttcaaaatcagtatggctacgaggtgtacaaagttacccttcaagccagaggagctgtactcaacattctgtattgcaaggcactgcagctcggcccatcgagaccacccacaggggaagctcttaatttgctaggtacagattccgagcgcttgctgaatttcgctggttcttttcatgaggcctggggtctcccacttcaactcgcgatcaccttgtatctgctgtaccagcaggtgggggtggcattcgtcgggggactcatcctggcgctgctgctggtgcccgtcaataaggtgattgcaacgaggattatggcttccaaccaggaaatgttacagcataaagatgctcgcgtaaagctcgtgacagagctgctaagcggcatccgggtcataaaattctgtggatgggagcaggccctgggcgctcgtgtcgaggcgtgtagggccagggagctcggccgactccgagtgatcaagtaccttgacgcagcgtgtgtgtatttgtgggcagctctcccagtggtgatttctatagtcatctttattacttacgttcttatgggacaccagctcacagctaccaaagttttcaccgcactggcactggtaagaatgctgatactgcccctaaataacttcccatgggttatcaacggcctgctggaagccaaggtgagcctcgatcgtatccagctcttcctggacctgccaaaccacaaccctcaggcttactatagccctgactgtggccgtctgggagcccaaatcaagtggctcctctgttccgatcctccggcagagccatccacagtcctggaactgcatggcgctctgttctcttgggaccccgtggggaccagcttggagacgttcatcagtcaccttgaggttaaaaaaggcatgctggttggcattgtgggcaaggtcgggtgcgggaaaagttctttgctggcggcaatcgcgggtgaattgcacagactcagaggccatgtggccgttcggggattgtcaaaagggttcggactggcaacacaggagccttggatacagttcgccaccatacgggataatatcctctttggaaaaacatttgatgcccagctgtacaaagaggttctggaggcatgtgcgctgaatgatgatctgtcgatcctccctgctggtgatcagacagaggtcggtgaaaaaggagtgacacttagtgggggtcagcgtgcaagaatcgcactcgctagggcagtgtaccaggaaaaggagctgtatctgttggacgacccactggctgccgtcgatgcagatgtagcaaatcacctgctgcacagatgcatcctgggaatgctcagttacacgacaaggcttctgtgcacccataggacagaatacctagaacgagccgacgccgtccttttaatggaagcaggcaggctgattcgggcaggccctccgtcagaaattctcccattagtgcaggcggtgcctaaggcatgggccgagaacgggcaggagtcagactcggcaaccgcacagagtgtccagaaccctgaaaaaaccaaagaggggctggaagaagagcagagtactagtggacgcttactacaagaagagagcaagaaggagggcgcagtggcattacacgtctaccaggcctattggaaagccgtcggccagggcctcgccctggcaatcctcttcagcctattgttgatgcaggctacaaggaatgccgcagactggtggctgagccattggattagccagttgaaggcggagaattctagccaggaggcgcagccaagtacctctccagcatccatggggctattcagcccgcagttgttactattctcccctgggaatttgtatatccctgtgttccccctgccgaaggccgcacccaatggatcttctgacattcgcttttacctgaccgtctacgctacaatcgcgggtgtgaactcactatgtaccctactcagggccgtgctgtttgccgctggaaccttgcaggccgctgcaaccttacatcgtcgcctgctgcaccgtgtcttgatggcccctgtgaccttttttaacgctacaccaacaggcaggattctgaacagattttctagtgatgtggcctgcgctgacgactctctgccatttatccttaatatactgctggccaacgcggcagggctgctggggctcctggctgtgctgggatcgggcctcccctggctgctgctgctgcttccccctctgagtattatgtattaccatgtccagaggcattatagggcctcttctcgggaattacgtcgactggggagtctgactctgagcccactctactcccacctggccgacaccctggcgggactgtctgtgttacgggcaacaggagcgacctatcggtttgaggaggaaaatttacgactcttggaactgaatcaacggtgtcagttcgccaccagcgctaccatgcagtggcttgacattcgcctgcagttgatgggagcagctgtagtcagtgctatagcgggaatcgccctagttcagcatcaacagggtttagctaaccccggtctggttggactctcgcttagttacgcgctgtccctcactggtctcctgtccgggctggtttctagtttcacccaaactgaagctatgctcgtgagtgtggagagactcgaggagtacacatgtgatctcccgcaggagcctcagggccagccacttcaactgggcacagggtggctcacacagggtggggtggagtttcaggatgtggtcctggcctatcgccctggtcttcccaacgccttggacggcgtgaccttttgtgtgcaaccgggtgagaaattgggcatcgtcgggagaacaggatctggcaagagttccctcctcttggtcctgtttcggctcctggagccttcctccggacgcgtactgctcgacggcgtggacacaagccagctggagctggcacagctgagaagccaactggcaatcatccctcaagagcccttcctatttagtggaaccgtccgcgagaacttggacccacaaggcctacacaaagatcgggcactttggcaggctctgaaacaatgccatctatcagaagtgattacaagtatggggggtctcgacggagagctcggtgaaggcggtcggagtctctcactgggacagcggcagctcctttgcctggcccgagcgctgctgacggatgctaagattctctgtattgacgaggccactgcctctgtagatcagaaaaccgaccaattactgcaacagaccatctgcaagcgctttgccaataaaaccgtccttactatagcccacaggcttaacaccatcctgaactcagaccgggtgctggtgctgcaggcagggagagtcgtggagttggatagcccagctaccctacggaaccagcctcatagcctgtttcagcagctgctccagagctcgcagcaaggcgtccccgcatcccttggcggtccctag

SEQ ID NO: 228695 - DNA, 5088 bp, Artificial Sequence
  derived and/or modified sequence
ttctaatgatcccatcaccaaagtagcaaacgtagtacccaggattttttttttcctagttagtcttcatgttaagtacaatcttacctcaaaattgttaatgtctgtggtttaaaaaaaaacatgaatcagaaatggtgtgggtagtttagaaaatgagttaggttcaggtggccggttagctcagttggtcagaaaatgagttaggttcatctgggaagacttcctgggagaaaagaccctgggttctgaggtaaagtggagtagggataagatgtgcaaggcaggaagggagttgattccttaggtaagtgaattattggaggtgaggggtatgtctggctcctgagtcagccacgatgtgcctccttgtcttcccccttgtccccaggagtccagattacatcctaccctgcagtcctggatggcgcctccgacttgcagcttccttcctgctttccgtcttcccgctgctagaccttcttccagttgctttgccaccaggggcaggcccaggacccatagggctagaggtgttggcagggtgcgtggcagctgtggcctggatcagccacagcctggccctgtgggtgttggcacattcccctcatggccactcccggggtcccttggccttggccctggtagccttgctgccagctccagccctagtgctgaccgtgttgtggcattgccagcgaggcacacttctgcccccacttctcccagggcccatggcccgcctatgcttgctcatcctgcagctggctgcactcttggcctatgcactgggatgggcagctcctgggggaccacgagaaccctgggctcaggagcccctcctgcccgaggatcaagaacctgaggtggctgaagatggggagagttggctgtcacgcttttcctatgcctggctggcacccttgctggcccgtggggcctgtggagagctccggcagcctcaggacatttgccgcctcccccacagactgcagccaacctacctggctcgtgtcttccaggcacactggcaggagggggcacggctgtggagggccttgtatggggcctttggacggtgctatctggcacttggactgctgaagctggtggggaccatgttgggattctcagggcccctgttgctctccctactggtgggcttcctggaagaggggcaggagccactaagccacggcctgctctatgctctggggctagccggtggggctgtgctgggtgctgtgctgcagaatcagtatgggtatgaggtatataaggtaacacttcaggcacggggggctgtgctgaacatcctgtactgcaaggctttacagctggggcccagccgccctcctactggggaggccctgaacctactaggcactgactctgaacggctgcttaactttgctgggagcttccatgaagcctggggcctgcccctgcaactggccatcaccctctacctgctgtaccagcaggtaggcgtggccttcgtgggtggtctcatcttggcactgctgctggtacccgtcaacaaagtgattgccacccgcatcatggccagcaaccaggaaatgctacagcacaaggatgcgcgggttaagcttgtgacagagctgctgagtggcattcgggtcatcaagttctgcgggtgggagcaggcactgggagcccgagtagaggcctgccgggctcgagagctggggcgactccgggtcatcaaatacctggatgcggcctgtgtatacctgtgggctgccctaccggttgtcatctccatcgttatcttcatcacctatgtcctcatggggcaccagctcactgccaccaaggtgttcacggccctggcactggtgcgaatgctcattcttcctctcaacaacttcccttgggtgatcaatggtctcctggaggccaaagtgtccttggaccggatccagcttttcctcgaccttccaaaccacaacccccaggcctactacagcccagattgtggtagattaggagcccaaatcaagtggcttctctgttcagatccccctgcagagccatctacagtattggagctgcatggagccttgttctcctgggacccagttggaaccagcctggagaccttcatcagtcatctcgaagtgaaaaagggtatgctggtgggcatcgtggggaaggtcggctgtgggaagagctccctgctggctgccatcgctggagagctccacaggctgcgtgggcatgtggcagtgcgggggctgtccaagggctttggcctggccacccaggaaccctggatccagtttgccaccatccgagacaacatcctctttgggaagacatttgatgcacagctgtacaaggaggtgctagaagcctgcgccctcaatgatgacctcagtatcctgcctgctggagaccagacagaggtgggggagaagggtgtcacccttagcggaggacagcgtgcccggattgcccttgctcgtgctgtctaccaggaaaaggagctctatctcctcgatgaccctctggccgctgtggatgcagatgtggccaaccacctgctgcacaggtgcatcctgggcatgctgagctacaccacacggctgctctgcacccaccgcactgagtacctggagagggctgacgcggtgctgctgatggaggccgggcgcctcatccgggctggacctccctctgagattctgccactggtacaagctgtccccaaagcctgggctgagaatggacaagagtctgactcagccacagcccagtcagtacagaacccagagaaaacaaaggaggggctggaggaggagcagagcacatctggtcgcctgctgcaggaagaaagcaagaaggagggcgccgtggccttgcacgtgtaccaagcttactggaaggccgtgggccagggcttggccttagccatcctcttctctctgcttctcatgcaagccacgcggaacgctgctgactggtggctctcccactggatctctcagctgaaggctgagaatagctcccaggaggcgcaaccctccaccagcccagcttctatggggctcttctctccgcagctgctcctcttttcccctggaaacctctacatcccagtgttcccactgcccaaagctgcccccaatggctcctcagacatccgtttctacctcaccgtgtatgcgaccattgctggtgtaaattccctctgcacccttctccgggcagtgctctttgcagcaggcacccttcaagcagctgccactctgcatcgccgcctgctgcatcgagtccttatggcaccagtgactttcttcaatgccacacccacgggccggatcctaaaccgcttctcctctgatgtggcctgtgcggatgacagcctgcccttcatcctcaacatcctcctggccaacgcggcaggcctgctggggctcctggccgtgctgggctctggcctgccctggctgctgctcctgctgccgcctttgagcatcatgtactatcacgtgcagcgccactacagggcctcctcacgggagctgcggcgcctgggcagcctcaccctgtctccactgtatagccatctggccgataccttggctggcctctctgtgctccgggccacaggggccacctacaggtttgaggaggagaacctgcgactccttgagctaaaccagaggtgccagtttgccaccagtgccacaatgcagtggctggacattcggctacagctcatgggggcggcagtggtcagcgctatcgcaggcatcgctctggtgcagcaccagcagggcctcgctaacccagggctggtgggcttgtcgctgtcttatgccctgtccctgacgggcctgctctcgggcctggtgagcagcttcacacagacagaggccatgctggtgagcgtcgagcggctggaagagtacacctgtgacctgccccaggaaccccagggccagccactgcagctgggcaccggctggctgacccaggggggcgtggagttccaggacgtggtgttggcgtaccggccagggctgccgaatgccctggatggagtgaccttctgcgtgcagcctggagagaagttgggcatcgtgggccgcacaggctccggcaagtcttccctgttgttggtgctcttccggctgctagagcccagttcagggcgagtgctgctggacggcgtggacaccagccagctggagctggcccagctcagatcccagttggctatcatcccccaggagccctttttgttcagtgggactgttcgggaaaacctggacccccagggcctacataaggacagggccttgtggcaggccctgaagcagtgccacctgagtgaggtgattacatccatgggtggtctggatggtgagctgggtgaggggggccggagcttatctcttgggcagaggcagctgttgtgtttggccagggctctcctcacagatgccaagatcctgtgtatcgatgaggccacagcaagtgtggaccagaagacagaccagctgctccagcagaccatctgcaaacgctttgccaacaagacagtgctgaccattgcccataggctcaacacgatcctgaactcagaccgggtgctggtgctacaagcggggagagtggtagagctggactccccggccaccctgcgcaaccagccccactccctgttccagcagctgctgcagagcagccagcagggagtccctgcctcactcggaggtccctgagcccaatcccacaccctgcagagttctcccctctctctgatccaggccgggcctatacagaggtgctggctgcttgtttacattctcctctggggctctacctctccacacttccccagaagggaaaagggcaccctggattactctttggaaatcactccttggtgggcagcatcctgaggcttccccagaaccaggcctctgctctggccctcttgcatctggaacgccaggtgggtttttctggcataggagcccacttgcattttcatagttttatttgataaaattccatcttacattctgtgtattaaaaaaataatatttctggtgt

SEQ ID NO: 228696 - DNA, 4395 bp, Artificial Sequence
  derived and/or modified sequence
atgtgcctgctggtgttccccctggtgcccagaagccccgactacatcctgccctgcagccccggctggagactgagactggccgccagcttcctgctgagcgtgttccccctgctggacctgctgcccgtggccctgccccccggcgccggccccggccccatcggcctggaggtgctggccggctgcgtggccgccgtggcctggatcagccacagcctggccctgtgggtgctggcccacagcccccacggccacagcagaggccccctggccctggccctggtggccctgctgcccgcccccgccctggtgctgaccgtgctgtggcactgccagagaggcaccctgctgccccccctgctgcccggccccatggccagactgtgcctgctgatcctgcagctggccgccctgctggcctacgccctgggctgggccgcccccggcggccccagagagccctgggcccaggagcccctgctgcccgaggaccaggagcccgaggtggccgaggacggcgagagctggctgagcagattcagctacgcctggctggcccccctgctggccagaggcgcctgcggcgagctgagacagccccaggacatctgcagactgccccacagactgcagcccacctacctggccagagtgttccaggcccactggcaggagggcgccagactgtggagagccctgtacggcgccttcggcagatgctacctggccctgggcctgctgaagctggtgggcaccatgctgggcttcagcggccccctgctgctgagcctgctggtgggcttcctggaggagggccaggagcccctgagccacggcctgctgtacgccctgggcctggccggcggcgccgtgctgggcgccgtgctgcagaaccagtacggctacgaggtgtacaaggtgaccctgcaggccagaggcgccgtgctgaacatcctgtactgcaaggccctgcagctgggccccagcagaccccccaccggcgaggccctgaacctgctgggcaccgacagcgagagactgctgaacttcgccggcagcttccacgaggcctggggcctgcccctgcagctggccatcaccctgtacctgctgtaccagcaggtgggcgtggccttcgtgggcggcctgatcctggccctgctgctggtgcccgtgaacaaggtgatcgccaccagaatcatggccagcaaccaggagatgctgcagcacaaggacgccagagtgaagctggtgaccgagctgctgagcggcatcagagtgatcaagttctgcggctgggagcaggccctgggcgccagagtggaggcctgcagagccagagagctgggcagactgagagtgatcaagtacctggacgccgcctgcgtgtacctgtgggccgccctgcccgtggtgatcagcatcgtgatcttcatcacctacgtgctgatgggccaccagctgaccgccaccaaggtgttcaccgccctggccctggtgagaatgctgatcctgcccctgaacaacttcccctgggtgatcaacggcctgctggaggccaaggtgagcctggacagaatccagctgttcctggacctgcccaaccacaacccccaggcctactacagccccgactgcggcagactgggcgcccagatcaagtggctgctgtgcagcgacccccccgccgagcccagcaccgtgctggagctgcacggcgccctgttcagctgggaccccgtgggcaccagcctggagaccttcatcagccacctggaggtgaagaagggcatgctggtgggcatcgtgggcaaggtgggctgcggcaagagcagcctgctggccgccatcgccggcgagctgcacagactgagaggccacgtggccgtgagaggcctgagcaagggcttcggcctggccacccaggagccctggatccagttcgccaccatcagagacaacatcctgttcggcaagaccttcgacgcccagctgtacaaggaggtgctggaggcctgcgccctgaacgacgacctgagcatcctgcccgccggcgaccagaccgaggtgggcgagaagggcgtgaccctgagcggcggccagagagccagaatcgccctggccagagccgtgtaccaggagaaggagctgtacctgctggacgaccccctggccgccgtggacgccgacgtggccaaccacctgctgcacagatgcatcctgggcatgctgagctacaccaccagactgctgtgcacccacagaaccgagtacctggagagagccgacgccgtgctgctgatggaggccggcagactgatcagagccggcccccccagcgagatcctgcccctggtgcaggccgtgcccaaggcctgggccgagaacggccaggagagcgacagcgccaccgcccagagcgtgcagaaccccgagaagaccaaggagggcctggaggaggagcagagcaccagcggcagactgctgcaggaggagagcaagaaggagggcgccgtggccctgcacgtgtaccaggcctactggaaggccgtgggccagggcctggccctggccatcctgttcagcctgctgctgatgcaggccaccagaaacgccgccgactggtggctgagccactggatcagccagctgaaggccgagaacagcagccaggaggcccagcccagcaccagccccgccagcatgggcctgttcagcccccagctgctgctgttcagccccggcaacctgtacatccccgtgttccccctgcccaaggccgcccccaacggcagcagcgacatcagattctacctgaccgtgtacgccaccatcgccggcgtgaacagcctgtgcaccctgctgagagccgtgctgttcgccgccggcaccctgcaggccgccgccaccctgcacagaagactgctgcacagagtgctgatggcccccgtgaccttcttcaacgccacccccaccggcagaatcctgaacagattcagcagcgacgtggcctgcgccgacgacagcctgcccttcatcctgaacatcctgctggccaacgccgccggcctgctgggcctgctggccgtgctgggcagcggcctgccctggctgctgctgctgctgccccccctgagcatcatgtactaccacgtgcagagacactacagagccagcagcagagagctgagaagactgggcagcctgaccctgagccccctgtacagccacctggccgacaccctggccggcctgagcgtgctgagagccaccggcgccacctacagattcgaggaggagaacctgagactgctggagctgaaccagagatgccagttcgccaccagcgccaccatgcagtggctggacatcagactgcagctgatgggcgccgccgtggtgagcgccatcgccggcatcgccctggtgcagcaccagcagggcctggccaaccccggcctggtgggcctgagcctgagctacgccctgagcctgaccggcctgctgagcggcctggtgagcagcttcacccagaccgaggccatgctggtgagcgtggagagactggaggagtacacctgcgacctgccccaggagccccagggccagcccctgcagctgggcaccggctggctgacccagggcggcgtggagttccaggacgtggtgctggcctacagacccggcctgcccaacgccctggacggcgtgaccttctgcgtgcagcccggcgagaagctgggcatcgtgggcagaaccggcagcggcaagagcagcctgctgctggtgctgttcagactgctggagcccagcagcggcagagtgctgctggacggcgtggacaccagccagctggagctggcccagctgagaagccagctggccatcatcccccaggagcccttcctgttcagcggcaccgtgagagagaacctggacccccagggcctgcacaaggacagagccctgtggcaggccctgaagcagtgccacctgagcgaggtgatcaccagcatgggcggcctggacggcgagctgggcgagggcggcagaagcctgagcctgggccagagacagctgctgtgcctggccagagccctgctgaccgacgccaagatcctgtgcatcgacgaggccaccgccagcgtggaccagaagaccgaccagctgctgcagcagaccatctgcaagagattcgccaacaagaccgtgctgaccatcgcccacagactgaacaccatcctgaacagcgacagagtgctggtgctgcaggccggcagagtggtggagctggacagccccgccaccctgagaaaccagccccacagcctgttccagcagctgctgcagagcagccagcagggcgtgcccgccagcctgggcggcccctag

SEQ ID NO: 228697 - protein, 194 aa, Artificial Sequence
  derived and/or modified sequence
MAASLVGKKIVFVTGNAKKLEEVVQILGDKFPCTLVAQKIDLPEYQGEPDEISIQKCQEAVRQVQGPVLVEDTCLCFNALGGLPGPYIKWFLEKLKPEGLHQLLAGFEDKSAYALCTFALSTGDPSQPVRLFRGRTSGRIVAPRGCQDFGWDPCFQPDGYEQTYAEMPKAEKNAVSHRFRALLELQEYFGSLAA

SEQ ID NO: 228698 - DNA, 585 bp, Artificial Sequence
  derived and/or modified sequence
atggccgcgtccctggtgggaaagaagatagtgttcgtgacgggaaatgctaaaaaattggaagaagttgtgcagattctgggcgacaagtttccttgcaccctcgtcgcacagaagatcgatctgccagagtaccagggggaaccagatgagatttcgattcagaaatgccaggaagccgtcaggcaagtgcagggaccagtgctggttgaagatacttgcctatgtttcaatgctttgggaggcctccctggaccttatattaagtggtttctcgaaaaactcaaacccgaaggcttgcaccagttgctagctgggtttgaggacaaaagtgcctacgcattatgcacctttgcgctgagtacaggggatcccagccagcctgtgcggcttttcagaggtaggaccagcgggaggattgtcgcaccgagagggtgccaggattttggctgggacccatgtttccagcccgacggctacgaacagacatacgctgagatgcctaaggccgaaaagaatgccgtgtcacatagattcagggccctgcttgagctccaggagtatttcgggtcactggctgcctag

SEQ ID NO: 228699 - DNA, 1185 bp, Artificial Sequence
  derived and/or modified sequence
gcaaatcggacgctgtgggctaggccgccaccgcgagcccactcgcccgatacgcgccttggggtccgggtcggctttccccgggacccctggccggaaactgagccgttcacttccgccaccagccggaagttttctgtcactggacgccaaggagttttcggtggctcagctgggtaaccggggatcaccatggcggcctcattggtggggaagaagatcgtgtttgtaacggggaacgccaagaagctggaggaggtcgttcagattctaggagataagtttccatgcactttggtggcacagaaaattgacctgccggagtaccagggggagccggatgagatttccatacagaaatgtcaggaggcagttcgccaggtacaggggcccgtgctggttgaggacacttgtctgtgcttcaatgcccttggagggctccccggcccctacataaagtggtttctggagaagttaaagcctgaaggtctccaccagctcctggccgggttcgaggacaagtcagcctatgcgctctgcacgtttgcactcagcaccggggacccaagccagcccgtgcgcctgttcaggggccggacctcgggccggatcgtggcacccagaggctgccaggactttggctgggacccctgctttcagcctgatggatatgagcagacgtacgcagagatgcctaaggcggagaagaacgctgtctcccatcgcttccgggccctgctggagctgcaggagtactttggcagtttggcagcttgacttctgcagctggaggaggcccctcaggccggggatctggggagggctagcccaaaacctcccgcatcgggcaggcaccccctgaagtacttccttcagggtttcccctttgtgagggtgtcgagtagcctcaccggcctgtctggaggagcagctggctctgctctgagaaactctggcaagtggacgccattctcttgcccttaggattcactgctctctcctacagccgccaggcctggggtcctgaaaggaccttgggtggtaaagctgtacttggtgggagtgagggcgtggggaggaaccatgcaaatcgccttccatggtttttaaatgcagtaaataacatttctggatgagacttgtttccaaaataaaccagctatatctgttttgaaccctgcccca

SEQ ID NO: 228700 - DNA, 585 bp, Artificial Sequence
  derived and/or modified sequence
atggccgccagcctggtgggcaagaagatcgtgtttgtgactggaaatgccaagaagctggaggaggtggtgcagatcctgggggacaagttcccctgcaccctggtggcccagaagattgacctgcctgagtaccagggcgagccagatgagatcagcatccagaagtgccaggaggccgtgcggcaggtgcagggccctgtgctggtggaggacacctgcctgtgcttcaatgccctgggcggcctgcccggcccctacatcaagtggttcctggagaagctgaagccagagggcctgcaccagctgctggccggctttgaggacaagagcgcctatgccctgtgcacctttgccctgagcactggagaccccagccagcctgtgcggctcttccggggccgcaccagcggccgcatcgtggccccccggggctgccaggactttggctgggacccctgcttccagccagatggctatgagcagacctatgcagagatgcccaaggccgagaagaatgctgtgagccaccgcttccgggccctgctggagctgcaggagtacttcggcagcctggccgcctag

SEQ ID NO: 228701 - DNA, 585 bp, Artificial Sequence
  derived and/or modified sequence
atggccgccagcctggtgggcaagaagatcgtgttcgtgaccggcaatgctaagaagttagaggaagtagtgcaaatcctgggcgacaaattcccttgcactctggttgcacagaagatcgatctgcccgagtaccagggcgaacctgacgaaattagtatccagaagtgtcaggaggccgttcggcaggtacaggggccggttctggtggaagacacctgcctctgtttcaacgcccttggtggccttcccggaccatacattaagtggtttctggaaaaattgaagccagaggggctgcaccagctgctggccggcttcgaagataaatcggcatacgcactgtgtacgttcgccctttccactggcgatccctcacagccggtaaggctatttagggggcggacttcaggcaggatcgtcgcacctcgtggctgccaggatttcgggtgggacccctgcttccaaccggatggatacgagcagacttatgccgagatgcccaaggcggagaagaacgctgtgtcccaccggttcagggcactgctggagctgcaagaatactttggaagcctcgccgcatag

SEQ ID NO: 228702 - DNA, 585 bp, Artificial Sequence
  derived and/or modified sequence
atggcagcttccctcgtaggaaagaagatcgtatttgtgaccggcaatgccaaaaagcttgaagaggtggtgcagatccttggggataaatttccttgcactctggtggcccagaaaattgacctgccagagtaccagggcgagcctgacgaaatctccattcagaagtgccaggaagcggttcgccaggtccaaggccctgtactggtagaagacacctgcctctgcttcaatgcccttggcggtcttcctggaccatacataaagtggttcctcgaaaaactgaaaccggaaggtctccatcagctgctcgccggattcgaagacaagagcgcctatgcactctgcacatttgctctgagcacaggcgacccgagtcaacctgtccgtctgtttcgcggacgaacctccgggagaattgtagctcccaggggttgccaggatttcggttgggacccatgctttcaaccagacgggtatgagcagacttacgccgagatgcctaaggcggagaagaacgccgtttcccacagattccgtgccctcctagagctgcaagagtatttcggaagcttagccgcttag

SEQ ID NO: 228703 - DNA, 585 bp, Artificial Sequence
  derived and/or modified sequence
atggccgccagcctggtgggcaagaagatcgtgttcgtgaccggcaacgccaagaagctggaggaggtggtgcagatcctgggcgacaagttcccctgcaccctggtggcccagaagatcgacctgcccgagtaccagggcgagcccgacgagatcagcatccagaagtgccaggaggccgtgagacaggtgcagggccccgtgctggtggaggacacctgcctgtgcttcaacgccctgggcggcctgcccggcccctacatcaagtggttcctggagaagctgaagcccgagggcctgcaccagctgctggccggcttcgaggacaagagcgcctacgccctgtgcaccttcgccctgagcaccggcgaccccagccagcccgtgagactgttcagaggcagaaccagcggcagaatcgtggcccccagaggctgccaggacttcggctgggacccctgcttccagcccgacggctacgagcagacctacgccgagatgcccaaggccgagaagaacgccgtgagccacagattcagagccctgctggagctgcaggagtacttcggcagcctggccgcctag

SEQ ID NO: 228704 - protein, 437 aa, Artificial Sequence
  derived and/or modified sequence
MAEAEEDCHSDTVRADDDEENESPAETDLQAQLQMFRAQWMFELAPGVSSSNLENRPCRAARGSLQKTSADTKGKQEQAKEEKARELFLKAVEEEQNGALYEAIKFYRRAMQLVPDIEFKITYTRSPDGDGVGNSYIEDNDDDSKMADLLSYFQQQLTFQESVLKLCQPELESSQIHISVLPMEVLMYIFRWVVSSDLDLRSLEQLSLVCRGFYICARDPEIWRLACLKVWGRSCIKLVPYTSWREMFLERPRVRFDGVYISKTTYIRQGEQSLDGFYRAWHQVEYYRYIRFFPDGHVMMLTTPEEPQSIVPRLRTRNTRTDAILLGHYRLSQDTDNQTKVFAVITKKKEEKPLDYKYRYFRRVPVQEADQSFHVGLQLCSSGHQRFNKLIWIHHSCHITYKSTGETAVSAFEIDKMYTPLFFARVRSYTAFSERPL

SEQ ID NO: 228705 - protein, 403 aa, Artificial Sequence
  derived and/or modified sequence
MFRAQWMFELAPGVSSSNLENRPCRAARGSLQKTSADTKGKQEQAKEEKARELFLKAVEEEQNGALYEAIKFYRRAMQLVPDIEFKITYTRSPDGDGVGNSYIEDNDDDSKMADLLSYFQQQLTFQESVLKLCQPELESSQIHISVLPMEVLMYIFRWVVSSDLDLRSLEQLSLVCRGFYICARDPEIWRLACLKVWGRSCIKLVPYTSWREMFLERPRVRFDGVYISKTTYIRQGEQSLDGFYRAWHQVEYYRYIRFFPDGHVMMLTTPEEPQSIVPRLRTRNTRTDAILLGHYRLSQDTDNQTKVFAVITKKKEEKPLDYKYRYFRRVPVQEADQSFHVGLQLCSSGHQRFNKLIWIHHSCHITYKSTGETAVSAFEIDKMYTPLFFARVRSYTAFSERPL

SEQ ID NO: 228706 - DNA, 3418 bp, Artificial Sequence
  derived and/or modified sequence
gtccggggtctccagtagggctgacgctccggtgctcgcacaatcccccgcctcggctggcaacgggcgtccctccactccccgagtccccggcagccgccgccaccccagcgcgccccgatctggccccctgccccgcgaagatggctgccgtacgccgggcccgcagttattgccgctgcctggtgcgcttctccgaccgagaactctgctaagctccgctgcagagacaggcaggagtagacacccggacacccagcacccctcctccggggggcggtgcagagggggcacggagagcccctcgagcgcagcaggccgccccgccagcatggcagaagctgaggaagattgtcattctgatactgtcagagcagatgatgatgaagaaaatgaaagtcctgctgaaacagatctgcaggcacaactccagatgttccgagctcagtggatgtttgaacttgctccaggtgtaagctctagcaatttagaaaatcgaccttgcagagcagcaagaggctctctccagaaaacatcggcagataccaaaggaaaacaagaacaggcaaaagaagaaaaggctcgagaactcttcctaaaagcagtagaagaagaacaaaatggagctctctatgaagccatcaagttttatcgtagggctatgcaacttgtacctgatatagagttcaagattacttatacccggtctccagatggtgatggcgttggaaacagctacattgaagataatgatgatgacagcaaaatggcagatctcttgtcctacttccagcagcaactcacatttcaggagtctgtgcttaaactgtgtcagcctgagcttgagagcagtcagattcacatatcagtgctgccaatggaggtcctgatgtacatcttccgatgggtggtgtctagtgacttggacctcagatcattggagcagttgtcgctggtgtgcagaggattctacatctgtgccagagaccctgaaatatggcgtctggcctgcttgaaagtttggggcagaagctgtattaaacttgttccgtacacgtcctggagagagatgtttttagaacggcctcgtgttcggtttgatggcgtgtatatcagtaaaaccacatatattcgtcaaggggaacagtctcttgatggtttctatagagcctggcaccaagtggaatattacaggtacataagattctttcctgatggccatgtgatgatgttgacaacccctgaagagcctcagtccattgttccacgtttaagaactaggaataccaggactgatgcaattctactgggtcactatcgcttgtcacaagacacagacaatcagaccaaagtatttgctgtaataactaagaaaaaagaagaaaaaccacttgactataaatacagatattttcgtcgtgtccctgtacaagaagcagatcagagttttcatgtggggctacagctatgttccagtggtcaccagaggttcaacaaactcatctggatacatcattcttgtcacattacttacaaatcaactggtgagactgcagtcagtgcttttgagattgacaagatgtacacccccttgttcttcgccagagtaaggagctacacagctttctcagaaaggcctctgtagagcctcaagtccagtcctctatcacttttgcatgaattaaagtatatagcgcaaaagagcacctaagttataaatgtgtgtgtgtgcgtgtgtgtgtatatatatatatatatatatatatatatatatatatatatatatatatggaattggaacttattttaaattgttggagttcttttaagaagaatataaattgattattttttttatttaaagggatagttgattcctggggtgttttgaaattaagttggaattaagttgcttaagcatatttatgttgtgagaaaccttaatatgaggtttatcatgccctttttcaagcagatttatgagcagatttctgtcacataagtcgtcttctgcttgagtatcctaatatttcaatgcatcaggggagcgctccactggataagcattttatttcccgcatggcataatgtttttgcactaaaggctcaaagtgtgagaacctgttctggatttgtttgaaattatttcaccaataaagatcataaataaatgtttctttcaagaaaatatatttggatggcctttttaaagtaacaggatatttaataagagtcctagatagccagcggagactttaagaatcattgcctctagctgggtgtggtggcatgcacctgtagtcccagctatttgggaggctgatgcaggagaatagcttaagcccaggaatttgagtctgggagtttgagtccagcatgggcaacataacaagaccccatcccttattaaaagaaaaaaaaataattcctcatttcatcattggtctttatatgtagccacaaacactgacctcatgtaggcaccttaccaatatatgacattaagtgagagtgaatcccttaggactggaacacttcaagctcaaccaactgactcagttgtcattcttcacaaaagaatagtagaggatcatgtaaacctgagcctaactcttgttccagtatgaaagttgggggagagcaccagccacctaggaaaactgtatgttacctttttactcaaaggagtcccccctgcccagtaacagtcctattagtgtttaatttcagagtttgtgtctggtagacctctacctgattcagatttggttttgttgtttcaaccatagttagagacaaattctcatgtactttcagaaatcaatatctgcagccactgttacttttaattgacattaagagacacttcataggttcccacaattcagtatgggataggctttttaaaaagcacatacagaccaggcgtggtggctcatgcctataatcccagcactttgggaggctaagacaggcagatcacctgagctcaggagtccaagaccagcctgggcaacatggcaaaacaccgtctctacaaaaaaaaaaaaaaaaaaaattagccaagtacagtggggcacacctatagtcgcagctacttgggaggctggggcaggagaattgcctgagcctgggaagtggaagttgcagtgagccaagatcgtgccattccactccagcctgagcaacacagtgagaccctatctcaaaaaaataatgatgatagtacacgttatgttaaaggtgaaatgtgcatacagaaggaagagagttggccaggtgtggtgactcacacctataatcccaatactttgggaggccaaggcaggaggattgcttgaggtcaggagttttagaccagcctggacaacatagcaagacctcatctcttctaaaaattaaaaaaaaaaaaaatagg

SEQ ID NO: 228707 - DNA, 451 bp, Artificial Sequence
  derived and/or modified sequence
atacgtatgccatggaggtttgctgcacctattgacccgtcctatgagatccaactaagaagaacagaatacttgctatcttcagagtagaatattttgaaatgtatgtgtgctttacagtgtgcccagcattttaccatatactaactggttcaagtctgaaaggcacctctgctttgagtctgcttgccagagataagataggaggcaaggctaatttatattgtcattctgatactgtcagagcagatgatgatgaagaaaatgaaagtcctgctgaaacagatctgcaggcataactccagatgttccgagctcagtggatgtttgaacttgctccaggtgtaagctctagcaatttagaaaatcgaccttgcagagcagcaagaggctctctccagaaaacatcggcagataccaaaggaaaacaagaacaggcaaaagaagaaaa

SEQ ID NO: 228708 - DNA, 569 bp, Artificial Sequence
  derived and/or modified sequence
gaggagggtttgcaggacagccggggaaaatgtcccttctcggctcactgagtatattgaaccagtctcggtcctctcaagggattttatcagaagcattgagcatagattgaggcagaagctgaggaagattgtcattctgatactgtcagagcagatgatgatgaagaaaatgaaagtcctgctgaaacagatctgcaggcataactccagatgttccgagctcagtggatgtttgaacttgctccaggtgtaagctctagcaatttagaaaatcgaccttgcagagcagcaagaggctctctccagaaaacatcggcagataccaaaggaaaacaagaacaggcaaaagaagaaaaggctcgagaactcttcctaaaagcagtagaagaagaacaaaatggagctctctatgaagccatcaagttttatcgtagggctatgcaacttgtacctgatatagagttcaagattacttatacccggtctccagatggtgatggcgttggaaacagctacattgaagataatgatgatgacagcaaaatggcagatctcttgtcctactt

SEQ ID NO: 228709 - DNA, 728 bp, Artificial Sequence
  derived and/or modified sequence
agtgaataccacagaatagctggggcaggcaggcagcctgggccctcccacaacaatgccaagatgactgagtctcagaggatcacagaaagtccccctccatgcggtcagatcaggcctttggcctttggatgagatccaactaagaagaacagaatacttgctatcttcagagtagaatattttgaaatgtgcagaagctgaggaagattgtcattctgatactgtcagagcagatgatgatgaagaaaatgaaagtcctgctgaaacagatctgcaggcacaactccagatgttccgagctcagtggatgtttgaacttgctccaggtgtaagctctagcaatttagaaaatcgaccttgcagagcagcaagaggctctctccagaaaacatcggcagataccaaaggaaaacaagaacaggcaaaagaagaaaaggctcgagaactcttcctaaaagcagtagaagaagaacaaaatggagctctctatgaagccatcaagttttatcgtagggctatgcaacttgtacctgatatagagttcaagattacttatacccggtctccagatggtgatggcgttggaaacagctacattgaagataatgatgatgacagcaaaatggcagatctcttgtcctacttccagcagcaactcacatttcaggagtctgtgcttaaactgtgtcagcctgagcttgagagcagtcagattcacatatcag

SEQ ID NO: 228710 - DNA, 1314 bp, Artificial Sequence
  derived and/or modified sequence
atggccgaggctgaggaggactgtcattccgacactgtcagagcggacgatgacgaggagaacgaatcccccgctgagacagatctgcaggcacaactccagatgttcagggcccaatggatgtttgagttggctccaggggtgagctcaagcaatctggaaaatagaccatgccgggctgcacgcggcagtctgcagaaaacgtccgccgatacaaagggtaaacaagagcaggccaaagaggagaaagcgagggaactgtttttaaaggccgtggaagaagagcagaacggcgcactgtacgaggctattaagttttaccgaagagctatgcagctcgtaccagatattgaattcaagataacctacactaggtctcccgatggcgacggagtcggtaattcctacatcgaggacaacgatgacgacagtaaaatggctgacctgttgagttactttcagcagcagctcacgttccaggaatctgtgcttaagctctgccagccggaactggagtcaagtcagattcatattagcgtgttacccatggaagtgttaatgtacatattcaggtgggttgtgtcttcggatctggatctccgcagcctggaacagttatctctcgtatgtagaggattctacatctgtgcccgtgatcctgagatctggaggctcgcttgccttaaagtgtggggccgaagctgcatcaagctcgttccttacacatcctggagggaaatgtttctggagcggcctagagtgcgcttcgacggtgtctacatcagtaaaacgacatatatccgacagggggaacagtccctggatggtttctatagggcgtggcaccaagtcgagtattatagatacataaggttctttcccgacggacatgtcatgatgctgactacccccgaggagcctcaatccatagtgcctcggctgcgaaccaggaacactcgcacggacgcgattctgctcggccattatcgcctgtcccaggataccgataatcagacaaaagtgttcgccgtaatcacgaaaaaaaaggaggaaaaaccgttagattataagtatagatacttccgccgggtccctgtccaggaggccgaccaaagcttccacgtaggactgcagctgtgctcttccggacaccagaggttcaataagctcatttggatccatcactcctgtcacatcacatacaaatctacaggggagactgccgttagcgcatttgagatcgacaagatgtacacgcccctgttcttcgcccgtgtgagaagttacactgcttttagtgaaagacccctgtag

SEQ ID NO: 228711 - DNA, 1314 bp, Artificial Sequence
  derived and/or modified sequence
atggccgaggccgaggaggactgccacagcgacacagtgcgggcagatgatgatgaggagaatgaaagccctgctgagacagacctgcaggcccagctgcagatgttccgggcccagtggatgtttgagctggcccctggggtgagcagcagcaacctggagaaccggccctgccgggccgcccggggcagcctgcagaagaccagcgctgacaccaagggcaagcaggagcaggccaaggaggagaaggcccgggagctgttcctgaaggctgtggaggaggagcagaatggagccctgtatgaggccatcaagttctaccgccgggccatgcagctggtgcctgacatcgagttcaagatcacctacaccaggagcccagatggagatggagtgggcaacagctacatcgaggacaatgatgatgacagcaagatggctgacctgctgagctacttccagcagcagctgaccttccaggagagcgtgctgaagctgtgccagcctgagctggagagcagccagatccacatctctgtgctgcccatggaggtgctgatgtacatcttccgctgggtggtgtccagtgacctggacctgcggagcctggagcagctgagcctggtgtgccggggcttctacatctgtgcccgggaccctgagatctggaggctggcctgcctgaaggtgtggggccgcagctgcatcaagctggtgccctacacctcctggagggagatgttcctggagcggccccgggtgcgctttgatggagtgtacatcagcaagaccacctacatccggcagggcgagcagagcctggatggcttctaccgggcctggcaccaggtggagtactaccgctacatccgcttcttcccagatggccacgtgatgatgctgaccaccccagaggagccccagagcatcgtgccccggctgcggaccaggaacaccaggacagatgccatcctgctgggccactaccgcctgagccaggacacagacaaccagaccaaggtgtttgctgtgatcaccaagaagaaggaggagaagcccctggactacaagtaccgctacttccggcgggtgcctgtgcaggaggccgaccagagcttccacgtgggcctgcagctgtgcagcagcggccaccagcgcttcaacaagctgatctggatccaccacagctgccacatcacctacaagagcactggagaaacagctgtgtctgcctttgaaattgacaagatgtacacccccctcttctttgcccgggtgcgcagctacacagccttcagcgagcggcccctgtag

SEQ ID NO: 228712 - DNA, 1314 bp, Artificial Sequence
  derived and/or modified sequence
atggccgaggccgaggaggactgccacagcgacaccgtgcgggccgatgatgatgaagaaaatgagtctccagcggaaaccgacttgcaagcccagctacaaatgtttagagcgcagtggatgttcgaactcgcgcccggagtgtcatcctccaatcttgaaaatcgcccgtgccgagccgcgcgaggatctttacagaaaacatcagctgataccaagggaaagcaagagcaagcaaaggaggaaaaggctcgcgagctgtttttgaaagcagttgaagaggaacaaaacggcgcactgtacgaggcaatcaagttctatagaagggctatgcagcttgtgccagacattgaattcaagatcacctatactcggtccccggacggcgatggagtaggcaattcctacatcgaagacaacgatgatgattcaaagatggccgacttgcttagctactttcagcaacagttgacatttcaggagtctgtgttgaagctgtgtcagccagagctcgaatctagccaaatccacattagtgtcctaccaatggaagtcctcatgtacatctttcgctgggtggtttccagcgatctggacttacgaagtctcgagcagctgtctcttgtgtgccgaggtttctatatctgcgcacgcgatcccgaaatttggcgcctggcctgcctgaaggtatggggacgaagttgcataaagctagttccatacaccagttggagggagatgttcttggagcgcccaagggtaaggtttgacggagtgtacattagcaaaactacttacattagacagggtgaacaatcattggacggcttttacagggcatggcaccaggtggagtactatcgttatattcggtttttcccagacggtcacgtgatgatgctcactacccctgaggagcctcagtccatagttcctcgccttcgtacacgtaacacccgtactgacgctatcctgctgggccactacagactgtctcaggatactgataatcaaacgaaggttttcgccgtcattaccaaaaagaaagaagagaagcccttggactataagtaccggtacttcagacgcgttcccgttcaggaagcagaccagtcattccacgtcggtctgcagctgtgtagctcaggccatcaacgtttcaataagctgatatggattcaccatagctgccacataacctacaaatcgactggggagacagctgtgtccgctttcgagattgacaaaatgtacactcctctcttctttgcacgggtccggtcttatacggcattttctgagcgtcctctgtag

SEQ ID NO: 228713 - DNA, 1314 bp, Artificial Sequence
  derived and/or modified sequence
atggcggaggcggaggaggactgccactctgacacagtgagggctgacgacgatgaagagaacgaatcaccagccgaaacagacttgcaagcccagctacagatgtttagggcccaatggatgttcgaactggcccctggggtgtcctccagcaatctggagaataggccttgtcgcgcagcaagaggcagcctgcaaaagacttccgccgacacaaaaggcaaacaggagcaagccaaggaggaaaaggctcgcgagttgtttttgaaggctgtggaggaggaacagaacggagcactgtatgaggcgatcaaattttaccgtagagcaatgcaattagtgcccgacattgagtttaaaatcacatataccaggtcacctgacggggatggcgtcgggaatagctacatcgaggacaatgatgacgattctaagatggctgatctacttagctactttcagcagcagctgacattccaggagagcgtgctgaagctgtgtcagcccgagcttgagagtagccaaattcacataagcgtgctgccaatggaagtactgatgtatatcttccggtgggtcgtctcttccgatttagacctgaggagcctggaacagctgagcctagtttgtcgcggattctacatttgcgcccgagatcctgagatctggagacttgcctgcctcaaagtgtggggaagatcctgtatcaaactagtgccttatacttcgtggcgggaaatgttcttggagagaccaagagtccggtttgatggggtgtatattagtaaaacaacatatatacgccaaggggaacagtccctggatggtttctacagagcctggcatcaggttgaatattaccggtatatccgattttttccagacggacacgtgatgatgctgacaacacctgaagagcctcagtcgatcgtacccagactgagaacaaggaacacccgcacagacgccatactgttaggacactatagacttagccaggatactgacaaccagaccaaggtgtttgccgtgatcacaaagaagaaggaggagaaaccactggactacaaataccgctactttcgcagggtgccggtgcaggaagctgaccagtcatttcatgtgggtttgcagctgtgctcatccggccatcaacggttcaataagcttatttggatccatcattcctgtcatatcacctataagagtactggtgagaccgccgtatcagcttttgagatcgacaagatgtacacacccctgttttttgcccgagttcgctcttacaccgccttttccgagaggccactttag

SEQ ID NO: 228714 - DNA, 1314 bp, Artificial Sequence
  derived and/or modified sequence
atggccgaggccgaggaggactgccacagcgacaccgtgagagccgacgacgacgaggagaacgagagccccgccgagaccgacctgcaggcccagctgcagatgttcagagcccagtggatgttcgagctggcccccggcgtgagcagcagcaacctggagaacagaccctgcagagccgccagaggcagcctgcagaagaccagcgccgacaccaagggcaagcaggagcaggccaaggaggagaaggccagagagctgttcctgaaggccgtggaggaggagcagaacggcgccctgtacgaggccatcaagttctacagaagagccatgcagctggtgcccgacatcgagttcaagatcacctacaccagaagccccgacggcgacggcgtgggcaacagctacatcgaggacaacgacgacgacagcaagatggccgacctgctgagctacttccagcagcagctgaccttccaggagagcgtgctgaagctgtgccagcccgagctggagagcagccagatccacatcagcgtgctgcccatggaggtgctgatgtacatcttcagatgggtggtgagcagcgacctggacctgagaagcctggagcagctgagcctggtgtgcagaggcttctacatctgcgccagagaccccgagatctggagactggcctgcctgaaggtgtggggcagaagctgcatcaagctggtgccctacaccagctggagagagatgttcctggagagacccagagtgagattcgacggcgtgtacatcagcaagaccacctacatcagacagggcgagcagagcctggacggcttctacagagcctggcaccaggtggagtactacagatacatcagattcttccccgacggccacgtgatgatgctgaccacccccgaggagccccagagcatcgtgcccagactgagaaccagaaacaccagaaccgacgccatcctgctgggccactacagactgagccaggacaccgacaaccagaccaaggtgttcgccgtgatcaccaagaagaaggaggagaagcccctggactacaagtacagatacttcagaagagtgcccgtgcaggaggccgaccagagcttccacgtgggcctgcagctgtgcagcagcggccaccagagattcaacaagctgatctggatccaccacagctgccacatcacctacaagagcaccggcgagaccgccgtgagcgccttcgagatcgacaagatgtacacccccctgttcttcgccagagtgagaagctacaccgccttcagcgagagacccctgtag

SEQ ID NO: 228715 - protein, 48 aa, Artificial Sequence
  derived and/or modified sequence
MFRAQWMFELAPGVSSSNLENRPCRAARGSLQKTSADTKGKQEQAKEE

SEQ ID NO: 228716 - protein, 118 aa, Artificial Sequence
  derived and/or modified sequence
MFRAQWMFELAPGVSSSNLENRPCRAARGSLQKTSADTKGKQEQAKEEKARELFLKAVEEEQNGALYEAIKFYRRAMQLVPDIEFKITYTRSPDGDGVGNSYIEDNDDDSKMADLLSY

SEQ ID NO: 228717 - protein, 145 aa, Artificial Sequence
  derived and/or modified sequence
MFRAQWMFELAPGVSSSNLENRPCRAARGSLQKTSADTKGKQEQAKEEKARELFLKAVEEEQNGALYEAIKFYRRAMQLVPDIEFKITYTRSPDGDGVGNSYIEDNDDDSKMADLLSYFQQQLTFQESVLKLCQPELESSQIHIS

SEQ ID NO: 228718 - DNA, 1212 bp, Artificial Sequence
  derived and/or modified sequence
atgttcagggcccagtggatgttcgaacttgccccaggcgtgagcagttcaaacctggaaaacagaccctgtcgtgcagcgaggggatcgctacagaaaactagtgccgataccaagggcaagcaggaacaggcaaaagaagagaaggctcgagagctgtttctcaaggctgttgaggaggaacagaatggggccctgtacgaggcgatcaaattttatcgacgagctatgcagctcgtgcctgatatagagttcaagatcacatacacccgatcccccgacggggacggcgtgggaaacagctacatcgaagacaacgacgacgatagcaagatggccgaccttctttcctattttcagcagcagctaacctttcaggaaagtgtgctgaagctgtgccagcccgaactggaatcgagccagatccacatctcagtgcttccgatggaggtgctcatgtatattttccggtgggtggtgagctcagacttggatctgaggagtctcgaacagctgtccctggtatgcaggggcttttacatctgcgcccgcgatccagaaatttggcgactggcctgtttaaaagtctggggccgatcctgcatcaagctggtgccctataccagttggcgggaaatgtttctcgagaggccaagagtgaggtttgatggcgtgtatattagcaaaacaacttacatcaggcagggcgagcagtcccttgatgggttttatagagcatggcatcaggttgagtattataggtatatccggtttttccctgatggtcacgttatgatgcttaccaccccagaggagcctcaatccattgtccctcggctgcgtactcgaaatacacggacagacgccattttattgggccactataggttgtctcaggacaccgataatcagactaaggtcttcgccgttatcacaaaaaagaaggaagagaaaccgctcgattataagtacaggtacttccgcagggtgcccgtgcaggaagccgaccagagtttccacgtgggcctgcagttgtgttcttctggccaccagagattcaacaaactaatatggattcatcacagctgtcatattacttacaaatcaactggggaaactgcagtatcagcattcgagattgataagatgtataccccgcttttcttcgctcgggtgcgctcgtatactgctttttctgagaggcctctctag

SEQ ID NO: 228719 - DNA, 147 bp, Artificial Sequence
  derived and/or modified sequence
atgtttcgtgcccagtggatgtttgaacttgctccgggtgtatcctcgtctaatctagaaaaccgcccctgcagagcagcccgaggatccctccaaaaaacgagtgccgatacaaagggtaagcaggagcaagccaaggaggagtag

SEQ ID NO: 228720 - DNA, 357 bp, Artificial Sequence
  derived and/or modified sequence
atgttcagagcacagtggatgttcgagctggcaccaggggtgagctcaagtaatctggagaacagaccctgccgggccgctcgtggctctctgcagaagacatctgccgatacaaaagggaagcaggaacaggctaaagaggagaaagcacgcgagctcttcctcaaagcagtggaagaggaacagaatggggctttgtatgaggcaatcaagttttatcgcagggccatgcagcttgtcccagatatcgagttcaaaatcacttatacacgcagcccagatggcgatggggtggggaatagctatattgaggacaatgacgatgacagtaagatggctgatctactctcctattag

SEQ ID NO: 228721 - DNA, 438 bp, Artificial Sequence
  derived and/or modified sequence
atgtttcgggctcaatggatgttcgaattggctcccggagtatcatcctcaaacttagaaaaccgcccttgtagagctgctagaggatctctgcagaagaccagcgcggacaccaaaggaaagcaggagcaggccaaggaagagaaagctcgagaattgttcctgaaggctgtagaggaagagcagaacggcgccctgtatgaagccattaagttctaccggcgcgcaatgcagttggtccccgatattgagttcaaaattacttacacacgcagtcctgacggggatggagtcggaaacagctatatagaggataacgatgacgattcaaagatggcagatttgctcagctattttcaacagcagctgacatttcaggagtctgtacttaaactgtgccagcctgaattggaatcgagccaaatacacattagctag

SEQ ID NO: 228722 - DNA, 1212 bp, Artificial Sequence
  derived and/or modified sequence
atgttccgggcccagtggatgtttgagctggcccctggggtgagcagcagcaacctggagaaccggccctgccgggccgcccggggcagcctgcagaagaccagcgctgacaccaagggcaagcaggagcaggccaaggaggagaaggcccgggagctgttcctgaaggctgtggaggaggagcagaatggagccctgtatgaggccatcaagttctaccgccgggccatgcagctggtgcctgacatcgagttcaagatcacctacaccaggagcccagatggagatggagtgggcaacagctacatcgaggacaatgatgatgacagcaagatggctgacctgctgagctacttccagcagcagctgaccttccaggagagcgtgctgaagctgtgccagcctgagctggagagcagccagatccacatctctgtgctgcccatggaggtgctgatgtacatcttccgctgggtggtgtccagtgacctggacctgcggagcctggagcagctgagcctggtgtgccggggcttctacatctgtgcccgggaccctgagatctggaggctggcctgcctgaaggtgtggggccgcagctgcatcaagctggtgccctacacctcctggagggagatgttcctggagcggccccgggtgcgctttgatggagtgtacatcagcaagaccacctacatccggcagggcgagcagagcctggatggcttctaccgggcctggcaccaggtggagtactaccgctacatccgcttcttcccagatggccacgtgatgatgctgaccaccccagaggagccccagagcatcgtgccccggctgcggaccaggaacaccaggacagatgccatcctgctgggccactaccgcctgagccaggacacagacaaccagaccaaggtgtttgctgtgatcaccaagaagaaggaggagaagcccctggactacaagtaccgctacttccggcgggtgcctgtgcaggaggccgaccagagcttccacgtgggcctgcagctgtgcagcagcggccaccagcgcttcaacaagctgatctggatccaccacagctgccacatcacctacaagagcactggagaaacagctgtgtctgcctttgaaattgacaagatgtacacccccctcttctttgcccgggtgcgcagctacacagccttcagcgagcggcccctgtag

SEQ ID NO: 228723 - DNA, 147 bp, Artificial Sequence
  derived and/or modified sequence
atgttccgggcccagtggatgtttgagctggcccctggggtgagcagcagcaacctggagaaccggccctgccgggccgcccggggcagcctgcagaagaccagcgctgacaccaagggcaagcaggagcaggccaaggaggagtag

SEQ ID NO: 228724 - DNA, 357 bp, Artificial Sequence
  derived and/or modified sequence
atgttccgggcccagtggatgtttgagctggcccctggggtgagcagcagcaacctggagaaccggccctgccgggccgcccggggcagcctgcagaagaccagcgctgacaccaagggcaagcaggagcaggccaaggaggagaaggcccgggagctgttcctgaaggctgtggaggaggagcagaatggagccctgtatgaggccatcaagttctaccgccgggccatgcagctggtgcctgacatcgagttcaagatcacctacaccaggagcccagatggagatggagtgggcaacagctacatcgaggacaatgatgatgacagcaagatggctgacctgctgagctactag

SEQ ID NO: 228725 - DNA, 438 bp, Artificial Sequence
  derived and/or modified sequence
atgttccgggcccagtggatgtttgagctggcccctggggtgagcagcagcaacctggagaaccggccctgccgggccgcccggggcagcctgcagaagaccagcgctgacaccaagggcaagcaggagcaggccaaggaggagaaggcccgggagctgttcctgaaggctgtggaggaggagcagaatggagccctgtatgaggccatcaagttctaccgccgggccatgcagctggtgcctgacatcgagttcaagatcacctacaccaggagcccagatggagatggagtgggcaacagctacatcgaggacaatgatgatgacagcaagatggctgacctgctgagctacttccagcagcagctgaccttccaggagagcgtgctgaagctgtgccagcctgagctggagagcagccagatccacatctcctag

SEQ ID NO: 228726 - DNA, 1212 bp, Artificial Sequence
  derived and/or modified sequence
atgttccgggcccagtggatgttcgagctggcccccggcgtgagctccagcaatttagagaatagaccctgccgggccgcacgagggagcctgcagaagactagcgccgacactaaagggaagcaagagcaggccaaagaggagaaagctcgtgagctcttcttaaaggcagtggaggaagaacagaatggagccctctatgaggctattaagttttatcgcagagctatgcagctcgtcccagatatcgaatttaagatcacatatactagaagtccagacggcgatggtgttgggaactcatatatcgaggacaatgatgacgacagcaaaatggccgacctcctatcatatttccagcagcagttgacattccaagagtcagtgctaaagctgtgccagcccgagcttgagagctcacaaatacacatttccgtgttgccaatggaggtgcttatgtacatcttcaggtgggttgtgtctagtgatctggatcttcgctctctagagcaactgtcgttggtttgtagggggttctacatttgtgcacgcgaccctgaaatttggagacttgcatgcctgaaagtgtggggacgatcctgcatcaaactggtgccctatacgtcttggcgggagatgttcctcgaacgacctcgggtgcgtttcgacggagtctatatttctaaaacaacatatatccgacagggtgaacagagcttggacggtttctatcgtgcctggcatcaggttgagtactacagatatattcgctttttcccggatggccatgtgatgatgctgacaacccctgaggaacctcagtccattgtgcctcgtctacggactcggaatacacgtaccgatgcgatactactcggacattacagactttcccaggatactgacaatcagacaaaggtgtttgcagtgatcacaaaaaaaaaggaagaaaagcctttggactataaataccgttacttccgtagagtgcctgtgcaggaggccgatcagagctttcatgtgggccttcagctttgcagttctggtcaccaacgctttaacaagctcatatggatccatcactcatgccacattacttataagtctacaggtgaaacggccgttagtgctttcgagatcgataagatgtatacacccttgttttttgcccgggtgcggtcatacacagcctttagcgagagacccctatag

SEQ ID NO: 228727 - DNA, 147 bp, Artificial Sequence
  derived and/or modified sequence
atgttccgggcccagtggatgttcgagctggcccccggcgtgagcagctccaacctagaaaacagaccatgcagggccgctcgcggctcgttgcaaaagacttctgccgacaccaaaggaaaacaggagcaggctaaggaggaatag

SEQ ID NO: 228728 - DNA, 357 bp, Artificial Sequence
  derived and/or modified sequence
atgttccgggcccagtggatgttcgagctggcccccggcgtgagcagctctaatttggagaatcgaccttgtcgagctgccagaggttctttacagaagaccagcgccgacactaagggaaaacaggagcaggctaaagaggagaaggctagggaactctttctgaaagcagtggaagaggagcagaacggtgcactgtacgaagcaataaaattctatagacgagctatgcagctagtgcctgacatagaattcaaaatcacttatacaaggtcacctgacggggacggagtgggaaatagttacatagaagacaacgacgacgatagcaaaatggccgacctcctttcatactag

SEQ ID NO: 228729 - DNA, 438 bp, Artificial Sequence
  derived and/or modified sequence
atgttccgggcccagtggatgttcgagctggcccccggcgtgagcagctccaacctggaaaatcgcccctgcagggccgccagggggtcgctacaaaaaacttccgcagatactaaagggaaacaagagcaggccaaggaagaaaaggcaagggaactctttttaaaggctgtcgaagaagaacagaacggtgctctttacgaggctattaagttttatcggcgggctatgcagcttgtgcccgatatagaattcaagattacttacacgaggtctccagacggtgacggggttgggaacagctatatagaagacaacgacgatgacagcaaaatggctgacttgctgtcctactttcagcagcagttgaccttccaagaatccgtgctgaagctatgccaacccgaactggaatcatcgcagattcatatttcttag

SEQ ID NO: 228730 - DNA, 1212 bp, Artificial Sequence
  derived and/or modified sequence
atgttccgcgcacagtggatgttcgaactggcaccaggcgtgtctagctctaatctcgagaacaggccatgtagggcagcacggggttctttgcagaagacctctgccgatacaaaaggaaaacaggagcaggccaaggaggagaaagcccgtgagcttttcttgaaggccgtggaggaagaacagaatggagccctttacgaggcgatcaaattctatagaagggccatgcagctagtacccgacatcgaattcaaaattacgtatactcgtagcccagacggagacggcgtaggaaacagctatatcgaggacaatgacgacgattctaaaatggcggacttactctcatatttccaacagcaattgacctttcaagagtccgtgcttaagctgtgtcagcctgagctggagtccagtcaaattcatatctctgtgctccctatggaggtgctgatgtatattttcaggtgggtggtgtcgagcgacctcgacctccggtctcttgaacagctgtctctggtctgccgcggtttctacatctgcgcaagggatcctgaaatctggcgtctcgcttgtttgaaagtgtgggggagatcctgtataaagctggtcccctatacaagctggcgagaaatgttcctggagcgacctagggttcgtttcgatggcgtctatatcagtaaaaccacatacatccggcaaggcgaacagtctctcgatgggttctacagagcctggcaccaagtggagtactacaggtatatacgctttttccccgatggacacgtgatgatgctcaccacacctgaggaaccccaatccatagtcccccgactgcgcactcgcaacactcgaacggatgcgattctcttgggacattatcgtctcagccaagacactgataaccagacaaaggtgtttgccgtgatcacaaagaagaaagaagagaagccacttgactacaagtaccggtactttcgccgtgttccagtgcaagaagccgaccagtctttccacgtcggcctacaactctgttcatctggacaccagcgcttcaacaagttgatttggatccatcatagttgtcatattacatataaatctaccggggaaaccgctgtttccgctttcgagatagataaaatgtacactcccttgttctttgcccgtgtgcgcagctataccgcattttcggagcgtccattgtag

SEQ ID NO: 228731 - DNA, 147 bp, Artificial Sequence
  derived and/or modified sequence
atgtttagagcccagtggatgtttgagttagctccaggcgtttctagcagtaacctggaaaatcggccttgtcgcgctgccagggggagcttgcagaagacctcagcagataccaaggggaaacaagaacaggcgaaagaggaatag

SEQ ID NO: 228732 - DNA, 357 bp, Artificial Sequence
  derived and/or modified sequence
atgttccgagctcaatggatgtttgagttagctcccggagtctctagttccaacctagagaatcgcccatgtcgcgctgccagaggttctctgcaaaagacctctgccgacacaaaagggaaacaagaacaggcgaaggaggaaaaagccagagagttgttcttgaaggcagtggaagaggagcaaaacggcgctctctatgaagctatcaaattttatcgcagggctatgcagctagtacccgatattgaattcaaaatcacctacactagatcacctgacggcgacggggttggcaatagttatatcgaggataacgacgacgattccaagatggcagacctgctctcatattag

SEQ ID NO: 228733 - DNA, 438 bp, Artificial Sequence
  derived and/or modified sequence
atgtttagggcccagtggatgtttgagttggcccctggcgtgtcatctagcaacctcgagaaccgcccatgtagagccgcaagaggctccctgcagaaaacaagtgctgatactaaaggcaagcaggagcaggcgaaagaagaaaaggcacgtgagctgttcctcaaagcagtggaggaggaacaaaacggcgctctgtatgaagctattaaattttacaggcgcgcaatgcagcttgttcctgacatcgaatttaagatcacctatacaagaagtcctgacggtgacggcgttggcaactcttatattgaggacaatgacgacgactccaaaatggctgacttgctgagttactttcagcagcagctgaccttccaggagtccgtgcttaaactgtgccagcctgagttagagtccagccagatccacatttcctag

SEQ ID NO: 228734 - DNA, 1212 bp, Artificial Sequence
  derived and/or modified sequence
atgttcagagcccagtggatgttcgagctggcccccggcgtgagcagcagcaacctggagaacagaccctgcagagccgccagaggcagcctgcagaagaccagcgccgacaccaagggcaagcaggagcaggccaaggaggagaaggccagagagctgttcctgaaggccgtggaggaggagcagaacggcgccctgtacgaggccatcaagttctacagaagagccatgcagctggtgcccgacatcgagttcaagatcacctacaccagaagccccgacggcgacggcgtgggcaacagctacatcgaggacaacgacgacgacagcaagatggccgacctgctgagctacttccagcagcagctgaccttccaggagagcgtgctgaagctgtgccagcccgagctggagagcagccagatccacatcagcgtgctgcccatggaggtgctgatgtacatcttcagatgggtggtgagcagcgacctggacctgagaagcctggagcagctgagcctggtgtgcagaggcttctacatctgcgccagagaccccgagatctggagactggcctgcctgaaggtgtggggcagaagctgcatcaagctggtgccctacaccagctggagagagatgttcctggagagacccagagtgagattcgacggcgtgtacatcagcaagaccacctacatcagacagggcgagcagagcctggacggcttctacagagcctggcaccaggtggagtactacagatacatcagattcttccccgacggccacgtgatgatgctgaccacccccgaggagccccagagcatcgtgcccagactgagaaccagaaacaccagaaccgacgccatcctgctgggccactacagactgagccaggacaccgacaaccagaccaaggtgttcgccgtgatcaccaagaagaaggaggagaagcccctggactacaagtacagatacttcagaagagtgcccgtgcaggaggccgaccagagcttccacgtgggcctgcagctgtgcagcagcggccaccagagattcaacaagctgatctggatccaccacagctgccacatcacctacaagagcaccggcgagaccgccgtgagcgccttcgagatcgacaagatgtacacccccctgttcttcgccagagtgagaagctacaccgccttcagcgagagacccctgtag

SEQ ID NO: 228735 - DNA, 147 bp, Artificial Sequence
  derived and/or modified sequence
atgttcagagcccagtggatgttcgagctggcccccggcgtgagcagcagcaacctggagaacagaccctgcagagccgccagaggcagcctgcagaagaccagcgccgacaccaagggcaagcaggagcaggccaaggaggagtag

SEQ ID NO: 228736 - DNA, 357 bp, Artificial Sequence
  derived and/or modified sequence
atgttcagagcccagtggatgttcgagctggcccccggcgtgagcagcagcaacctggagaacagaccctgcagagccgccagaggcagcctgcagaagaccagcgccgacaccaagggcaagcaggagcaggccaaggaggagaaggccagagagctgttcctgaaggccgtggaggaggagcagaacggcgccctgtacgaggccatcaagttctacagaagagccatgcagctggtgcccgacatcgagttcaagatcacctacaccagaagccccgacggcgacggcgtgggcaacagctacatcgaggacaacgacgacgacagcaagatggccgacctgctgagctactag

SEQ ID NO: 228737 - DNA, 438 bp, Artificial Sequence
  derived and/or modified sequence
atgttcagagcccagtggatgttcgagctggcccccggcgtgagcagcagcaacctggagaacagaccctgcagagccgccagaggcagcctgcagaagaccagcgccgacaccaagggcaagcaggagcaggccaaggaggagaaggccagagagctgttcctgaaggccgtggaggaggagcagaacggcgccctgtacgaggccatcaagttctacagaagagccatgcagctggtgcccgacatcgagttcaagatcacctacaccagaagccccgacggcgacggcgtgggcaacagctacatcgaggacaacgacgacgacagcaagatggccgacctgctgagctacttccagcagcagctgaccttccaggagagcgtgctgaagctgtgccagcccgagctggagagcagccagatccacatcagctag

SEQ ID NO: 228738 - protein, 307 aa, Artificial Sequence
  derived and/or modified sequence
MAGSEPRSGTNSPPPPFSDWGRLEAAILSGWKTFWQSVSKERVARTTSREEVDEAASTLTRLPIDVQLYILSFLSPHDLCQLGSTNHYWNETVRDPILWRYFLLRDLPSWSSVDWKSLPDLEILKKPISEVTDGAFFDYMAVYRMCCPYTRRASKSSRPMYGAVTSFLHSLIIQNEPRFAMFGPGLEELNTSLVLSLMSSEELCPTAGLPQRQIDGIGSGVNFQLNNQHKFNILILYSTTRKERDRAREEHTSAVNKMFSRHNEGDDQQGSRYSVIPQIQKVCEVVDGFIYVANAEAHKSKYSYVHF

SEQ ID NO: 228739 - DNA, 1731 bp, Artificial Sequence
  derived and/or modified sequence
ggaggctgacgcgctagcgtggctctaagacgcgtcacccacgctgcgggcaagccatggcgggaagcgagccgcgcagcggaacaaactcgccgccgccgcccttcagcgactggggccgcctggaggcggccatcctcagcggctggaagaccttctggcagtcagtgagcaaggagagggtggcgcgtacgacctcacgggaggaggtggatgaggcggccagcaccctgacgcggctgccgattgatgtacagctatatattttgtcctttctttcacctcatgatctgtgtcagttgggaagtacaaatcattattggaatgaaactgtaagagatccaattctgtggagatactttttgttgagggatcttccttcttggtcttctgttgactggaagtctcttccagatctagaaatcttaaaaaagcctatatctgaggtcactgatggtgcattttttgactacatggcagtctatagaatgtgctgtccatacacaagaagagcttcaaaatccagccgtcctatgtatggagctgtcacttcttttttacactccctgatcattcagaatgaaccacgatttgctatgtttggaccaggtttggaagaattgaatacctctttggtgttgagcttgatgtcttcagaggaactttgcccaacagctggtttgcctcagaggcagattgatggtattggatcaggagtcaattttcagttgaacaaccaacataaattcaacattctaatcttatattcaactaccagaaaggaaagagatagagcaagggaagagcatacaagtgcagttaacaagatgttcagtcgacacaatgaaggtgatgatcaacaaggaagccggtacagtgtgattccacagattcaaaaagtgtgtgaagttgtagatgggttcatctatgttgcaaatgctgaagctcataaaagtaagtactcatatgtacatttttaagcacattgttcttttcaaagcaaatggaaaatacctttttagactttactgtggcttcttaagaatatgatggcttattttatcaatgtgattttctgacccttactattaatagtgtgttctcacacttttgtgtgtattaggatcacctgggaagcttgttaaacatgttaacaagctgattcctaccctggtggattttattcctagatttgggttgtgtgaatcagatttgggcatctgttttttccaagcacccagggaattctgatgcattccaaagtttggtactagagctatacaatatttttttgctttatgcttctgcatttttttgatactgacattttgtctgcttctggctttattcaaataatctatgcaaataactatgaaaaattttatctttgttttatccaaatagtaaagagatgtgatggtagggtgttaagtagattagttgagaacactattcatatattctgaataattgccattcagaatgctatttttgtgtgaaatcaaaatatcattgggccatgagctagtattataatatctttcccaaatcctttgtgaacaaggtagaatataaatacataatatattgtatatatattatagttctctaatacactggtttgaatttctattcaatttattttccctgtgatctgttaggcatgaaagcagttgcaattactttctgttattacagggctatctataaaaagaaaacttagaagcaaaa

SEQ ID NO: 228740 - DNA, 924 bp, Artificial Sequence
  derived and/or modified sequence
atggctggaagtgagcccaggtccggaacgaattccccaccgcctcctttttccgactggggccggctcgaggctgccattctgagcgggtggaagacgttctggcagagtgttagcaaggaaagagtcgcacgcacgacctccagagaagaagtcgatgaagctgccagcacattaacccggctccctattgatgttcagctctacatactttccttcttgtcacctcacgacctttgtcagttggggtctaccaaccactactggaacgagacggtgagggatccgatcctatggcggtactttctcctgagagacctgccttcttggagtagtgtggattggaaatccctgcccgatctggagatccttaagaagcctatctccgaagtgacagacggcgccttttttgactacatggccgtgtatcgaatgtgttgcccctacactcgtcgggcgtcgaaatcatctaggcccatgtacggcgctgtaacttcgtttctgcacagcctgatcatccagaatgaacctaggtttgcaatgttcggacccggcctggaagagttaaatacttccctggtgctgtcactcatgtcgtccgaggagctgtgccccacagccggtctgcctcaaagacaaattgacggaatcggctccggggtgaatttccagctcaataatcagcacaaattcaacatcctaattttgtattcaacgacacgtaaagaacgggacagagcccgggaagaacacacttctgccgtgaacaaaatgttttcaagacacaacgaaggagatgaccagcaaggttcacgatactcagttatcccacagatccagaaagtgtgcgaagtggtggacgggttcatttacgttgcaaacgccgaggcccataagtccaagtactcttacgtacacttctag

SEQ ID NO: 228741 - DNA, 924 bp, Artificial Sequence
  derived and/or modified sequence
atggccggcagcgagcccaggagcggcaccaacagccccccaccacccttcagtgactggggccgcctggaggccgccatcctgagcggctggaagaccttctggcagagcgtgtccaaggagcgggtggcccggaccaccagccgggaggaggtggatgaagctgccagcaccctgacccggctgcccattgatgtgcagctgtacatcctgtccttcctgagcccccatgacctgtgccagctgggcagcaccaaccactactggaatgagaccgtgcgggaccccatcctgtggagatacttcctgctgcgggacctgcccagctggagctctgtggactggaagagcctgcctgacctggagatcctgaagaagcccatcagcgaggtgacagatggagccttctttgactacatggctgtgtacaggatgtgctgcccctacacccggcgggccagcaagagcagccggcccatgtatggagctgtgaccagcttcctgcacagcctcatcatccagaatgagcccaggtttgccatgtttggacctggcctggaggagctgaacaccagcctggtgctgagcctgatgagcagcgaggagctgtgccccacagctggcctgccccagaggcagattgatggcatcggcagcggcgtgaacttccagctgaacaaccagcacaagttcaacatcctgatcctgtacagcaccaccaggaaggagcgggaccgggcccgggaggagcacaccagcgctgtgaacaagatgttcagccgccacaatgaaggagatgaccagcagggcagccgctacagcgtcatcccccagatccagaaggtgtgtgaggtggtggatggcttcatctacgtggccaatgctgaggcccacaagagcaagtacagctatgtgcacttctag

SEQ ID NO: 228742 - DNA, 924 bp, Artificial Sequence
  derived and/or modified sequence
atggccggcagcgagccccggagcggcaccaacagcccccccccccccttttccgactggggccggctggaagcagccatactatctggctggaagactttctggcaatcagtgtcaaaggagcgcgttgctcggactacttcccgggaagaagtcgacgaagcagcctccactctgactaggctccccattgatgtgcagctgtatattctgtcctttttgtccccacacgacctgtgtcaactcggatctacaaatcattactggaacgagactgtaagagaccccatcttgtggaggtatttcctccttcgagatctcccatcatggtcttcagtggattggaagtcactgcctgacctggaaattctgaaaaaaccaattagcgaggtaacagacggcgcattctttgattacatggccgtctataggatgtgctgcccctacacaagacgggccagtaagagtagtaggcccatgtacggtgctgtgactagcttcttacattcactgattatccagaacgaaccccgctttgccatgtttggaccaggattggaagagcttaatacgagcttagtactgtcccttatgagcagcgaagaactctgtcctaccgccggcctccctcagcggcagatagatggtattggtagcggagtcaacttccagctaaataaccaacacaaatttaatatcctgattctgtactccaccacgagaaaagagcgggaccgggccagggaagagcacaccagcgctgtcaacaaaatgttttctcggcacaatgaaggagacgatcagcagggatctcgatattccgttattcctcagattcagaaggtttgtgaagttgtcgacggcttcatctatgtggccaacgccgaggcgcacaagtctaaatattcatacgttcatttctag

SEQ ID NO: 228743 - DNA, 924 bp, Artificial Sequence
  derived and/or modified sequence
atggcaggctctgaaccacgcagcggcacgaatagccctccccctccattttcagactggggacggcttgaggctgctattctgtccggctggaaaaccttctggcagagcgtgtccaaggagcgcgttgctagaactacttctcgggaagaggtggatgaagccgcatctaccctgacaaggctgccaatcgatgtacagctctacattctgtcttttctaagccctcacgacttgtgtcaacttggtagcacaaatcattactggaatgagaccgtgcgagaccctattctgtggaggtacttccttctgagagatttgcccagctggtcatctgtggattggaagtctctcccggatctggagatcttgaagaaaccaatcagcgaggtgacagatggggcattctttgattacatggccgtgtacaggatgtgctgtccctacacacgcagagccagcaaatcaagtaggcccatgtacggtgctgtcacctccttccttcacagcctaataattcagaacgaacctcgttttgctatgtttggacccggtcttgaggaactgaacacgtccctggtcctgagcctcatgtcttccgaggaactgtgccccaccgctggtttgcctcagaggcagatcgacggcatcgggagcggcgtaaatttccagctcaataaccagcacaagtttaacatcctgattctgtactcaaccacacgtaaggaaagggacagagccagggaggagcacaccagtgcggttaacaaaatgttctcccgacataatgagggggatgaccaacaggggagtaggtactccgtcatcccgcagattcaaaaggtgtgtgaagtggtggatggcttcatctacgtggccaacgcagaggcgcacaaaagtaaatactcctacgtccatttttag

SEQ ID NO: 228744 - DNA, 924 bp, Artificial Sequence
  derived and/or modified sequence
atggccggcagcgagcccagaagcggcaccaacagcccccccccccccttcagcgactggggcagactggaggccgccatcctgagcggctggaagaccttctggcagagcgtgagcaaggagagagtggccagaaccaccagcagagaggaggtggacgaggccgccagcaccctgaccagactgcccatcgacgtgcagctgtacatcctgagcttcctgagcccccacgacctgtgccagctgggcagcaccaaccactactggaacgagaccgtgagagaccccatcctgtggagatacttcctgctgagagacctgcccagctggagcagcgtggactggaagagcctgcccgacctggagatcctgaagaagcccatcagcgaggtgaccgacggcgccttcttcgactacatggccgtgtacagaatgtgctgcccctacaccagaagagccagcaagagcagcagacccatgtacggcgccgtgaccagcttcctgcacagcctgatcatccagaacgagcccagattcgccatgttcggccccggcctggaggagctgaacaccagcctggtgctgagcctgatgagcagcgaggagctgtgccccaccgccggcctgccccagagacagatcgacggcatcggcagcggcgtgaacttccagctgaacaaccagcacaagttcaacatcctgatcctgtacagcaccaccagaaaggagagagacagagccagagaggagcacaccagcgccgtgaacaagatgttcagcagacacaacgagggcgacgaccagcagggcagcagatacagcgtgatcccccagatccagaaggtgtgcgaggtggtggacggcttcatctacgtggccaacgccgaggcccacaagagcaagtacagctacgtgcacttctag

SEQ ID NO: 228745 - protein, 916 aa, Artificial Sequence
  derived and/or modified sequence
MDCEHSLSLPCRGAEAWEIGIDKYLYAMRLSDETLIDIMTRFRKEMKNGLSRDFNPTATVKMLPTFVRSIPDGSEKGDFIALDLGGSSFRILRVQVNHEKNQNVHMESEVYDTPENIVHGSGSQLFDHVAECLGDFMEKRKIKDKKLPVGFTFSFPCQQSKIDEAILITWTKRFKASGVEGADVVKLLNKAIKKRGDYDANIVAVVNDTVGTMMTCGYDDQHCEVGLIIGTGTNACYMEELRHIDLVEGDEGRMCINTEWGAFGDDGSLEDIRTEFDREIDRGSLNPGKQLFEKMVSGMYLGELVRLILVKMAKEGLLFEGRITPELLTRGKFNTSDVSAIEKNKEGLHNAKEILTRLGVEPSDDDCVSVQHVCTIVSFRSANLVAATLGAILNRLRDNKGTPRLRTTVGVDGSLYKTHPQYSRRFHKTLRRLVPDSDVRFLLSESGSGKGAAMVTAVAYRLAEQHRQIEETLAHFHLTKDMLLEVKKRMRAEMELGLRKQTHNNAVVKMLPSFVRRTPDGTENGDFLALDLGGTNFRVLLVKIRSGKKRTVEMHNKIYAIPIEIMQGTGEELFDHIVSCISDFLDYMGIKGPRMPLGFTFSFPCQQTSLDAGILITWTKGFKATDCVGHDVVTLLRDAIKRREEFDLDVVAVVNDTVGTMMTCAYEEPTCEVGLIVGTGSNACYMEEMKNVEMVEGDQGQMCINMEWGAFGDNGCLDDIRTHYDRLVDEYSLNAGKQRYEKMISGMYLGEIVRNILIDFTKKGFLFRGQISETLKTRGIFETKFLSQIESDRLALLQVRAILQQLGLNSTCDDSILVKTVCGVVSRRAAQLCGAGMAAVVDKIRENRGLDRLNVTVGVDGTLYKLHPHFSRIMHQTVKELSPKCNVSFLLSEDGSGKGAALITAVGVRLRTEASS

SEQ ID NO: 228746 - protein, 291 aa, Artificial Sequence
  derived and/or modified sequence
MDCEHSLSLPCRGAEAWEIGIDKYLYAMRLSDETLIDIMTRFRKEMKNGLSRDFNPTATVKMLPTFVRSIPDGSEKGDFIALDLGGSSFRILRVQVNHEKNQNVHMESEVYDTPENIVHGSGSQLFDHVAECLGDFMEKRKIKDKKLPVGFTFSFPCQQSKIDEAILITWTKRFKASGVEGADVVKLLNKAIKKRGDYDANIVAVVNDTVGTMMTCGYDDQHCEVGLIIGTGTNACYMEELRHIDLVEGDEGRMCINTEWGAFGDDGSLEDIRTEFDREIDRGSLNPGKQL

SEQ ID NO: 228747 - DNA, 2751 bp, Artificial Sequence
  derived and/or modified sequence
atggactgtgagcattccctatcactgccttgtcgtggcgccgaggcttgggagatagggatcgataaatatctctacgccatgcggctaagtgatgagacccttatagacataatgactagatttcggaaagagatgaaaaacggtctgtccagggacttcaatcccactgctacagtgaaaatgctcccgaccttcgtgcgcagcattcccgacggaagtgagaaaggcgattttattgcattggacctgggcggtagtagctttcgaatcctgcgggttcaggtgaatcatgagaaaaatcagaatgtgcacatggaaagcgaggtctatgacaccccagaaaatatcgttcacggctctggtagccagctttttgaccatgtagcagaatgcttgggggatttcatggaaaagcgaaagattaaggacaagaagctgcctgtcggctttacattttcctttccctgccagcagtcgaaaatcgacgaggccatcttaatcacctggacaaaaaggtttaaggcctctggggttgagggcgccgacgtcgtgaaactcctgaacaaagcgatcaagaagcgcggtgactacgacgctaacatcgtggccgttgtgaatgatacagtgggaaccatgatgacatgcgggtacgacgatcagcactgtgaagtaggactgatcattggcaccgggactaacgcctgctatatggaggaactgcgccacatagatctggttgagggcgacgaaggtcgcatgtgtatcaacaccgaatggggggccttcggagacgatggaagcctggaggatatccggaccgagtttgacagggagatagaccgaggatctctgaatcctgggaagcagctgtttgaaaaaatggttagtggcatgtatctcggcgaattggtgagacttattctggtgaagatggccaaggagggattgctgtttgagggcagaataacacccgagctcctgacccgtggaaaattcaacacgtctgacgtgtccgctatcgagaagaataaagaaggactccataatgccaaagaaatcctaacccgattgggggtggagccctctgatgacgactgtgtgtctgttcaacacgtatgcactatagtgagcttccggagcgctaacctagtggccgctaccttaggcgccattctaaatcgcttgagggataataaaggcaccccaaggcttagaactactgtgggcgttgatggttccctctataagacccatccacagtacagcagacgcttccataaaaccctcaggaggctggtcccagattctgatgtacgattcctcttgagcgaaagtggcagcggcaaaggggctgccatggttactgcagtggcttaccgcctcgccgaacagcaccgacaaatcgaggagacgctggcccatttccatctgactaaagacatgctgctggaggtgaagaaacgcatgagagctgagatggaactcggccttaggaaacagactcataacaacgcagtcgttaagatgctaccttcctttgtccgccggacacctgatggcacagaaaatggggatttcttggcacttgacttgggaggcacgaactttcgggtgctgctcgtgaagattaggtcgggcaaaaagcgcacagtggagatgcacaataagatttacgccatcccgatcgaaattatgcaggggacaggagaagagctgttcgaccatattgttagctgcataagcgacttcttggactacatgggtatcaaaggaccccggatgcctctgggtttcacattcagttttccttgccagcagactagcctggacgctggcatacttatcacttggacgaagggattcaaggctaccgattgcgttgggcacgacgtggttaccttacttcgcgacgcaataaaacgaagggaagagttcgacttggacgtggtggctgtggttaatgataccgtaggcacaatgatgacatgcgcctacgaagagccgacttgtgaagtgggcttgatcgttgggactggatccaatgcctgttacatggaagaaatgaagaacgtggagatggtagaaggcgatcaggggcagatgtgtataaatatggagtggggggccttcggggacaacggttgtttagatgatattcgaacccattacgatcgtctggtggatgaatactcactcaacgccgggaagcagaggtacgagaaaatgatctctggaatgtacctgggggaaattgtgagaaacatattgattgactttaccaaaaaggggttcctgtttcgcggtcagattagtgagacgctcaagacacgaggcatcttcgaaaccaagttcctgagtcagatcgaaagcgacagattagcgctcttgcaggttcgcgcaatcctacagcagttgggactgaattccacatgcgacgacagtattttagtgaagactgtctgcggcgtcgtgagcaggcgcgctgcccagctgtgcggtgcagggatggcagcagtcgttgataagattcgggaaaatagggggctggataggctcaacgtgaccgtgggggtggacggcacgctgtacaagctgcacccacactttagtcgtattatgcaccaaacagtaaaggagctttcacctaagtgtaatgtgagttttttgctcagcgaggacggttccggaaaaggcgccgcccttatcactgcggtcggcgtgaggctaagaaccgaagctagttcatag

SEQ ID NO: 228748 - DNA, 876 bp, Artificial Sequence
  derived and/or modified sequence
atggactgcgagcattccctgtccctcccttgtcgcggtgcagaggcttgggaaatcgggattgataagtatttgtacgccatgaggctgtccgacgagaccctgattgacatcatgactcgattccgcaaagagatgaaaaatggactgtccagggactttaaccctaccgccacggtgaaaatgctgccaacttttgtacgttccattcctgacggctccgagaagggagacttcatagccctcgacctgggtggtagtagttttagaattttaagagttcaggtgaaccacgaaaaaaaccaaaacgtgcatatggagagcgaggtgtacgacacccctgaaaacattgttcacggctccgggtctcagttgtttgatcatgtggcagagtgcctcggcgactttatggaaaagaggaaaattaaggacaagaagctacctgtggggtttactttttcgtttccttgtcagcagagcaagatcgacgaagctatactgattacatggacaaagcgtttcaaggcctcgggagtcgaaggagccgatgtggttaaactgctaaataaagccataaagaaacggggtgactatgacgctaatatagtggcggttgtgaatgacacagtgggtacgatgatgacctgcggatatgacgatcaacactgcgaagtcggactaataataggcacgggcactaatgcttgctatatggaggaacttagacatattgacctcgtggagggggacgaaggacgcatgtgtataaacacagagtggggtgccttcggtgacgatggaagcttagaagacatcaggaccgagttcgacagagagatcgataggggctcactgaacccagggaagcaactttag

SEQ ID NO: 228749 - DNA, 3596 bp, Artificial Sequence
  derived and/or modified sequence
cctggctcaaaactctaccacaacctgacactgggcaagatggcccacctgtggcatcccaggttcctgccctgtaaagaggagtctgggtgtatatccagatggactgtgagcacagcctgagtttgccctgtcgaggtgctgaggcctgggagattgggattgacaagtatctctatgccatgcggctctccgatgaaactctcatagatatcatgactcgcttcaggaaggagatgaagaatggcctctcccgggattttaatccaacagccacagtcaagatgttgccaacattcgtaaggtccattcctgatggctctgaaaagggagatttcattgccctggatcttggtgggtcttcctttcgaattctgcgggtgcaagtgaatcatgagaaaaaccagaatgttcacatggagtccgaggtttatgacaccccagagaacatcgtgcacggcagtggaagccagctttttgatcatgttgctgagtgcctgggagatttcatggagaaaaggaagatcaaggacaagaagttacctgtgggattcacgttttcttttccttgccaacaatccaaaatagatgaggccatcctgatcacctggacaaagcgatttaaagcgagcggagtggaaggagcagatgtggtcaaactgcttaacaaagccatcaaaaagcgaggggactatgatgccaacatcgtagctgtggtgaatgacacagtgggcaccatgatgacctgtggctatgacgaccagcactgtgaagtcggcctgatcatcggcactggcaccaatgcttgctacatggaggaactgaggcacattgatctggtggaaggagacgaggggaggatgtgtatcaatacagaatggggagcctttggagacgatggatcattagaagacatccggacagagtttgacagggagatagaccggggatccctcaaccctggaaaacagctgtttgagaagatggtcagtggcatgtacttgggagagctggttcgactgatcctagtcaagatggccaaggagggcctcttatttgaagggcggatcaccccggagctgctcacccgagggaagtttaacaccagtgatgtgtcagccatcgaaaagaataaggaaggcctccacaatgccaaagaaatcctgacccgcctgggagtggagccgtccgatgatgactgtgtctcagtccagcacgtttgcaccattgtctcatttcgctcagccaacttggtggctgccacactgggcgccatcttgaaccgcctgcgtgataacaagggcacacccaggctgcggaccacggttggtgtcgacggatctctttacaagacgcacccacagtattcccggcgtttccacaagactctaaggcgcttggtgccagactccgatgtgcgcttcctcctctcggagagtggcagcggcaagggggctgccatggtgacggcggtggcctaccgcttggccgagcagcaccggcagatagaggagaccctggctcatttccacctcaccaaggacatgctgctggaggtgaagaagaggatgcgggccgagatggagctggggctgaggaagcagacgcacaacaatgccgtggttaagatgctgccctccttcgtccggagaactcccgacgggaccgagaatggtgacttcttggccctggatcttggaggaaccaatttccgtgtgctgctggtgaaaatccgtagtgggaaaaagagaacggtggaaatgcacaacaagatctacgccattcctattgaaatcatgcagggcactggggaagagctgtttgatcacattgtctcctgcatctctgacttcttggactacatggggatcaaaggccccaggatgcctctgggcttcacgttctcatttccctgccagcagacgagtctggacgcgggaatcttgatcacgtggacaaagggttttaaggcaacagactgcgtgggccacgatgtagtcaccttactaagggatgcgataaaaaggagagaggaatttgacctggacgtggtggctgtggtcaacgacacagtgggcaccatgatgacctgtgcttatgaggagcccacctgtgaggttggactcattgttgggaccggcagcaatgcctgctacatggaggagatgaagaacgtggagatggtggagggggaccaggggcagatgtgcatcaacatggagtggggggcctttggggacaacgggtgtctggatgatatcaggacacactacgacagactggtggacgaatattccctaaatgctgggaaacaaaggtatgagaagatgatcagtggtatgtacctgggtgaaatcgtccgcaacatcttaatcgacttcaccaagaagggattcctcttccgagggcagatctctgagacgctgaagacccggggcatctttgagaccaagtttctctctcagatcgagagtgaccgattagcactgctccaggtccgggctatcctccagcagctaggtctgaatagcacctgcgatgacagtatcctcgtcaagacagtgtgcggggtggtgtccaggagggccgcacagctgtgtggcgcaggcatggctgcggttgtggataagatccgcgagaacagaggactggaccgtctgaatgtgactgtgggagtggacgggacactctacaagcttcatccacacttctccagaatcatgcaccagacggtgaaggaactgtcaccaaaatgtaacgtgtccttcctcctgtctgaggatggcagcggcaagggggccgccctcatcacggccgtgggcgtgcggttacgcacagaggcaagcagctaagagtccgggatccccagcctactgcctctccagcacttctctcttcaagcggcgaccccctaccctcccagcgagttgcgctgggagacgctggcgccagggcctgccggcgcggggaggaaagcaaaatccaactaatggtatatattgtagggtacagaatagagcgtgtgctgttgataatatctctcacccggatccctcctcacttgccctgccactttgcatggtttgattttgacctggtcccccacgtgtgaagtgtagtggcatccatttctaatgtatgcattcatccaacagagttatttattggctggagatggaaaatcacaccacctgacaggccttctgggcctccaaagcccatccttggggttccccctccctgtgtgaaatgtattatcaccagcagacactgccgggcctccctcccgggggcactgcctgaaggcgagtgtgggcatagcattagctgcttcctcccctcctggcacccactgtggcctggcatcgcatcgtggtgtgtcaatgccacaaaatcgtgtgtccgtggaaccagtcctagccgcgtgtgacagtcttgcattctgtttgtctcgtggggggaggtggacagtcctgcggaaatgtgtcttgtctccatttggataaaaggaaccaaccaacaaacaatgccatcactggaatttcccaccgctttgtgagccgtgtcgtatgacctagtaaactttgtaccaattc

SEQ ID NO: 228750 - DNA, 1042 bp, Artificial Sequence
  derived and/or modified sequence
ccaggttgcatgaggggttgggggtgggatggacagagcactggctgggcatcaggactaggctggagtcctggctcaaaactctaccacaacctgacactgggcaagatggcccacctgtggcatcccaggttcctgccctgtaaagaggagtctgggtgtatatccagatggactgtgagcacagcctgagtttgccctgtcgaggtgctgaggcctgggagattgggattgacaagtatctctatgccatgcggctctccgatgaaactctcatagatatcatgactcgcttcaggaaggagatgaagaatggcctctcccgggattttaatccaacagccacagtcaagatgttgccaacattcgtaaggtccattcctgatggctctgaaaagggagatttcattgccctggatcttggtgggtcttcctttcgaattctgcgggtgcaagtgaatcatgagaaaaaccagaatgttcacatggagtccgaggtttatgacaccccagagaacatcgtgcacggcagtggaagccagctttttgatcatgttgctgagtgcctgggagatttcatggagaaaaggaagatcaaggacaagaagttacctgtgggattcacgttttcttttccttgccaacaatccaaaatagatgaggccatcctgatcacctggacaaagcgatttaaagcgagcggagtggaaggagcagatgtggtcaaactgcttaacaaagccatcaaaaagcgaggggactatgatgccaacatcgtagctgtggtgaatgacacagtgggcaccatgatgacctgtggctatgacgaccagcactgtgaagtcggcctgatcatcggcactggcaccaatgcttgctacatggaggaactgaggcacattgatctggtggaaggagacgaggggaggatgtgtatcaatacagaatggggagcctttggagacgatggatcattagaagacatccggacagagtttgacagggagatagaccggggatccctcaaccctggaaaacagct

SEQ ID NO: 228751 - DNA, 2751 bp, Artificial Sequence
  derived and/or modified sequence
atggactgtgagcacagcctgagcctgccctgccgcggggctgaggcctgggagattggaattgacaagtacctgtatgccatgaggctgagtgatgagaccctgattgacatcatgacccgcttcaggaaggagatgaagaatggcctgagccgggacttcaaccccacagccaccgtgaagatgctgcccacctttgtgcgcagcatcccagatggcagcgagaagggggacttcatcgccctggacctgggcggcagcagcttccgcatcctgcgggtgcaggtgaaccacgagaagaaccagaatgtgcacatggagagcgaggtgtatgacaccccagaaaatattgtgcacggcagcggcagccagctgtttgaccacgtggctgaatgtctgggggacttcatggagaagaggaagatcaaggacaagaagctgcctgtgggcttcaccttctccttcccctgccagcagagcaagattgatgaggccatcctgatcacctggaccaagcgcttcaaggccagcggcgtggagggcgcagatgtggtgaagctgctgaacaaggccatcaagaagagaggagactatgatgccaacatcgtggccgtggtgaatgacacagtgggcaccatgatgacctgtggctatgatgaccagcactgtgaggtgggcctcatcattggaacaggcaccaatgcctgctacatggaggagctgcggcacatcgacctggtggagggagatgagggccgcatgtgcatcaacacagagtggggcgcctttggagatgatggcagcctggaggacatcagaacagaatttgaccgggagattgaccggggcagcctgaaccctgggaagcagctgtttgagaagatggtgtctggcatgtacctgggggagctggtgcggctcatcctggtgaagatggccaaggagggcctgctgtttgagggccgcatcaccccagagctgctgacccggggcaagttcaacaccagtgatgtgtctgccatcgagaagaacaaggagggcctgcacaatgccaaggagatcctgacccggctgggcgtggagcccagtgatgatgactgtgtgtctgtgcagcacgtgtgcaccatcgtgtccttccgcagcgccaacctggtggccgccaccctgggcgccatcctgaaccggctgcgggacaacaagggcaccccccggctgcggaccaccgtgggcgtggatggcagcctgtacaagacccacccccagtacagccgccgcttccacaagaccctgcggcggctggtgcctgacagtgatgtgcgcttcctgctgtctgagagcggcagcggcaagggggccgccatggtgacagctgtggcctaccgcctggccgagcagcaccggcagatcgaggagaccctggcccacttccacctgaccaaggacatgctgctggaggtgaagaagaggatgagagctgagatggagctgggcctgaggaagcagacccacaacaatgctgtggtgaagatgctgcccagctttgtgcggaggaccccagatggaacagaaaatggagacttcctggccctggacctgggcggcaccaacttccgggtgctgctggtgaagatccgcagcggcaagaagaggacagtggagatgcacaacaagatctatgccatccccatcgagatcatgcagggcactggagaggagctgtttgaccacatcgtgtcctgcatcagtgacttcctggactacatgggcatcaagggccccaggatgcccctgggcttcaccttctccttcccctgccagcagaccagcctggatgctggcatcctgatcacctggaccaagggcttcaaggccacagactgtgtgggccatgatgtggtgaccctgctgagagatgccatcaagaggcgggaggagtttgacctggatgtggtggccgtggtgaatgacacagtgggcaccatgatgacctgtgcctatgaggagcccacctgtgaggtgggcctcatcgtgggcaccggcagcaatgcctgctacatggaggagatgaagaatgtggagatggtggagggggaccagggccagatgtgcatcaacatggagtggggcgcctttggagacaatggctgcctggatgacatccgcacccactatgaccggctggtggatgagtacagcctgaatgccggcaagcagagatatgagaagatgatcagcggcatgtacctgggggagatcgtgaggaacatcctgattgacttcaccaagaagggcttcctgttccggggccagatcagcgagaccctgaagacccggggcatctttgagaccaagttcctgagccagattgaaagtgaccggctggccctgctgcaggtgcgggccatcctgcagcagctgggcctgaacagcacctgtgatgacagcatcctggtgaagacagtgtgtggggtggtgtccagaagagctgcccagctgtgtggggccggcatggctgctgtggtggacaagatccgggagaacagaggcctggaccggctgaatgtgacagtgggcgtggatggcaccctgtacaagctgcacccccacttcagccgcatcatgcaccagacagtgaaggagctgagccccaagtgcaatgtgtccttcctgctgtctgaagatggcagcggcaagggggccgccctgatcacagctgtgggcgtgcggctgaggacagaggccagcagctag

SEQ ID NO: 228752 - DNA, 876 bp, Artificial Sequence
  derived and/or modified sequence
atggactgtgagcacagcctgagcctgccctgccgcggggctgaggcctgggagattggaattgacaagtacctgtatgccatgaggctgagtgatgagaccctgattgacatcatgacccgcttcaggaaggagatgaagaatggcctgagccgggacttcaaccccacagccaccgtgaagatgctgcccacctttgtgcgcagcatcccagatggcagcgagaagggggacttcatcgccctggacctgggcggcagcagcttccgcatcctgcgggtgcaggtgaaccacgagaagaaccagaatgtgcacatggagagcgaggtgtatgacaccccagaaaatattgtgcacggcagcggcagccagctgtttgaccacgtggctgaatgtctgggggacttcatggagaagaggaagatcaaggacaagaagctgcctgtgggcttcaccttctccttcccctgccagcagagcaagattgatgaggccatcctgatcacctggaccaagcgcttcaaggccagcggcgtggagggcgcagatgtggtgaagctgctgaacaaggccatcaagaagagaggagactatgatgccaacatcgtggccgtggtgaatgacacagtgggcaccatgatgacctgtggctatgatgaccagcactgtgaggtgggcctcatcattggaacaggcaccaatgcctgctacatggaggagctgcggcacatcgacctggtggagggagatgagggccgcatgtgcatcaacacagagtggggcgcctttggagatgatggcagcctggaggacatcagaacagaatttgaccgggagattgaccggggcagcctgaaccctgggaagcagctgtag

SEQ ID NO: 228753 - DNA, 2751 bp, Artificial Sequence
  derived and/or modified sequence
atggactgcgagcacagcctgagcctgccctgccggggcgccgaggcttgggaaatcggaatagataagtatctctatgccatgagactttctgatgaaaccctaatagacatcatgacgagatttcgcaaagaaatgaaaaatgggttgagtcgcgatttcaatcctaccgcaacagtcaaaatgcttccaaccttcgtgcgctccataccggacgggagcgagaagggggactttatagcattagatttgggtggttcatcctttcggatcctgcgagtgcaggtgaatcacgaaaagaaccagaatgtccatatggaaagtgaggtgtacgataccccggaaaatatagtgcacgggtcaggctcccagctcttcgaccatgtcgccgagtgtctgggagacttcatggaaaaaaggaaaataaaagacaagaagctgcccgtagggttcaccttttcgtttccctgccagcagtcgaagatagatgaggccatcctcataacatggacaaagcgctttaaagcttcaggcgtcgaaggggcagacgtggtcaagctgctgaataaggccattaagaagagaggcgattatgacgccaacatagttgctgtcgtgaacgacaccgtgggcacaatgatgacgtgtgggtatgatgaccagcattgcgaggtgggactcatcatcgggactggaactaacgcttgctacatggaagagttgcgccatatcgatctcgtggagggagacgagggaagaatgtgcatcaacactgaatggggggcctttggagatgacggatctcttgaggacatccggaccgagttcgatagggagattgaccgtggttccctaaacccaggcaagcagctttttgagaagatggtttcagggatgtacctgggggagctggtgcgtctcatcctcgtgaaaatggccaaagagggtctgctgtttgaaggacgaatcactcctgagctgttgactagggggaagttcaatacaagtgacgtctcggcaattgagaaaaataaggaagggctgcataatgccaaggagattctgactcgcctgggtgtcgaaccatcagatgacgactgtgtctccgtgcagcacgtatgtaccatcgtgtcattcagaagcgcaaatctcgttgcagcaaccctgggggctattctgaacagactgcgggataacaagggtacacctagactgagaaccactgtgggcgtggacggcagcctgtacaagacacacccccagtattcaaggcgcttccacaagacattaaggagactggtccctgactcagatgtgaggttcctgctttccgaatcgggcagtggcaagggcgcagccatggttaccgctgtagcctatcgccttgcagagcagcatcgtcagattgaggagaccctggctcacttccacctcaccaaggatatgttacttgaggtgaagaaacgaatgcgagcagagatggagctcggactccggaagcagacccacaacaatgctgtggtgaagatgctcccatccttcgttagacgcactccagacggaactgagaatggcgactttttagcgctcgatctgggcggcacgaatttcagggtgttactagtgaagatccgtagcggtaaaaagcggaccgtggaaatgcacaacaagatctatgcgatcccaatcgagatcatgcaagggaccggcgaggaattgttcgaccacattgtcagctgtatatctgacttcctggactatatgggtataaagggtccccgtatgcccctgggattcactttcagtttcccatgccagcaaacgtcgctggacgcaggaattctgattacttggacgaaggggtttaaggcaacggactgcgttggacacgacgtggtaaccctgttaagagatgccataaagagacgcgaagaattcgatttagacgttgtcgcagtggtcaatgatacagtggggaccatgatgacatgtgcatatgaagagcccacttgcgaagtagggcttatcgtcgggacaggcagcaacgcgtgctacatggaagagatgaagaacgtggaaatggtcgagggcgatcaaggccagatgtgcataaatatggaatggggagccttcggggacaatggctgtttggatgatattcggactcactatgaccggctggtggatgaatattctctcaacgcgggcaaacagagatatgagaagatgataagcggaatgtatctgggcgaaatcgtaagaaacatactgatcgactttaccaagaagggcttcctgtttagaggccagatttctgaaactcttaagacacgaggtatctttgagaccaaatttctctctcaaatcgaaagcgaccgactggcccttctacaagtgagggccattcttcagcagctcggcttgaattccacttgcgacgacagcattctcgttaagacagtgtgtggtgtggtgagtcgacgggccgctcagctgtgtggggcagggatggcggcagtagttgacaaaattcgggaaaaccgggggttggaccgactgaatgtgacagtaggcgtagatggcactctgtacaaattgcaccctcatttttcccgcattatgcaccagacagtaaaggaactctcacccaagtgcaacgtctcttttctgttgtcagaagatgggtccggcaaaggagccgccttgatcacagcggtcggtgtgagattgcgaaccgaagcgtccagttag

SEQ ID NO: 228754 - DNA, 876 bp, Artificial Sequence
  derived and/or modified sequence
atggactgcgagcacagcctgagcctgccctgccggggcgccgaggcctgggagattggaattgataaatacctatatgctatgcggctcagtgacgaaacacttatcgatattatgacccggtttcggaaggagatgaagaatggactgagccgagactttaatcctacagctacggtaaaaatgttgcccactttcgtgcgctctatacccgacgggtcagaaaagggggatttcatagccctggacctcggcggatcttcctttcggatcctccgggtacaggttaaccacgagaagaatcagaacgtccacatggaatcagaggtctacgacactccagagaacattgtccatggaagcggctctcaattatttgaccacgtcgcagaatgtctcggcgactttatggagaaaaggaaaattaaggacaaaaagctgcctgtcggcttcacattctcttttccttgccagcaaagcaagatcgatgaagcaattcttataacatggaccaagcggtttaaggcgtcaggcgtcgaaggagccgacgtagtgaaattgctcaataaggcaataaaaaagcgaggtgattatgatgccaatattgtggcggtggtaaatgacacagttggcactatgatgacctgcggctatgatgaccagcattgtgaggtcggcctcatcattgggacaggtacaaatgcatgttacatggaggaattaagacacattgatctggtggaaggggatgagggccgaatgtgcatcaacaccgaatggggcgctttcggagatgatggcagcctggaggacattagaaccgaatttgatagagaaattgaccggggatcattgaaccccggtaaacaactctag

SEQ ID NO: 228755 - DNA, 2751 bp, Artificial Sequence
  derived and/or modified sequence
atggactgcgaacactccctgtctctgccttgtcgaggagccgaggcgtgggaaataggaatcgacaagtatttatacgctatgcgcctctcagacgagaccctcattgacatcatgacccgtttccgaaaggaaatgaagaatgggctaagtcgggacttcaaccccactgcaacagtgaagatgctgcctaccttcgtccgttcgatacccgatgggtccgaaaagggggattttattgcccttgatctcggcggttcctcattcaggattctgagagtgcaggtaaatcacgagaagaatcaaaatgtgcacatggagagtgaggtttacgatacgcccgagaatattgtgcacggttccgggtcccagctgtttgatcacgtggccgagtgtctcggggatttcatggagaaacgcaagattaaggataaaaagttgcctgtcggctttaccttttcctttccgtgtcagcagagcaaaatagacgaagcgatattgatcacgtggacgaaacggtttaaagcttccggagtggagggcgcagacgtggtgaagttactgaataaagctataaaaaagcggggagattatgacgccaacatagtggctgtagtgaacgacactgttggcacaatgatgacatgcggatacgatgaccagcattgcgaggttgggcttatcattggcacaggcacaaacgcctgctacatggaggagctcagacacatagacttagttgagggagatgaaggtagaatgtgcattaataccgagtggggggcatttggtgatgatgggagcttagaggacataaggactgaattcgatcgtgagatcgaccgaggctctctcaaccctggtaagcagctcttcgagaaaatggtgagcggaatgtacctgggcgaactggtgcgcctcatcctcgtgaaaatggccaaggaaggccttctctttgaagggaggatcacgcccgaattgctgacacgcggtaagttcaacacgtcagacgtgagcgccatcgaaaagaacaaggaaggtctccacaacgctaaagagattttgacccggctgggggtggagccatcagatgacgactgtgtgtctgtccagcatgtgtgtaccattgtttctttccggagtgctaatctggtcgcagcaaccctgggagccatacttaaccgcctgagagacaataaggggactccacgtcttcgcactacagtgggggtggatggatctttatacaaaacacatcctcagtatagccgtcggttccataaaacacttagaaggctggtaccagactccgatgtgcgctttctcctgtcagaatcggggtctggtaagggggctgctatggtgactgccgtcgcctacaggctcgccgaacagcacagacagattgaggagacccttgcgcacttccacctgaccaaggatatgctgcttgaggtcaaaaaacgcatgcgagctgagatggagctcggtctgagaaagcagactcacaacaatgctgtagtcaaaatgttaccctccttcgttaggcgtaccccagatgggaccgagaatggagattttctggctctcgatttgggagggacgaatttcagagtgctccttgtcaaaattaggagtggaaagaaaagaaccgtggaaatgcataacaaaatctatgcaattccaatcgagattatgcagggcaccggcgaagaactcttcgaccacattgtgtcctgcattagtgattttctggactacatgggaataaaggggccacgtatgcccttgggattcaccttcagcttcccctgtcagcagaccagtctggacgccggaatactaatcacctggacaaagggtttcaaagccacagactgcgtgggccatgacgtcgttacattgttgcgcgacgctatcaagaggcgggaagagtttgacctggatgttgttgccgtggtcaatgataccgtcggcaccatgatgacgtgcgcgtatgaggagccgacttgcgaagtaggcttgatcgtgggcacaggctctaatgcctgttatatggaggaaatgaagaatgtagaaatggtcgaaggagaccagggccaaatgtgcattaatatggaatggggggctttcggggataatggttgcctcgatgacatccgcactcactacgaccggcttgtcgacgagtacagtctgaatgcaggcaaacaacggtatgaaaagatgatttccgggatgtacctcggagaaatcgtaagaaatatcttgatagacttcacaaagaaaggctttctgtttcgaggtcaaatttcagagactctcaagactagggggatcttcgaaacaaaatttctgtcacagattgagagcgaccgcctggccctccttcaagtgcgcgctattctccagcagctgggcctcaacagcacatgcgatgactcgatcctcgtgaaaactgtctgtggagttgtcagccgcagagctgcccaactctgcggtgccggaatggccgctgtggttgacaaaatacgagagaatagaggcctcgataggctgaacgtgacggttggagtcgatggtactctctataaactgcaccctcatttcagtagaatcatgcaccagaccgtcaaagagctgtcccccaagtgtaacgtgtcctttctgctctctgaagatggatctggtaagggggcagccctgattaccgccgtgggcgttcggttgcgcacagaagcctcgtcctag

SEQ ID NO: 228756 - DNA, 876 bp, Artificial Sequence
  derived and/or modified sequence
atggactgtgagcactctctgagcttgccctgtagaggagcagaagcatgggaaatcgggatagataaatacctttacgctatgcggctcagtgatgagacactcatagatattatgacacggtttaggaaagaaatgaagaacggactttctcgcgacttcaacccaaccgctacagtgaagatgctgcccactttcgtgcgcagtatccctgatggatcggagaagggcgactttatagccctggatctgggtgggtcatcttttagaattttgcgggtgcaggttaatcatgaaaaaaaccagaacgtccacatggagtcagaggtgtatgataccccagaaaatatcgtccatgggagtggtagccaactgttcgaccacgtggcagagtgtctgggggacttcatggagaaaaggaaaatcaaggacaagaagctgccagtcggcttcacattcagctttccatgtcagcagagcaagatcgacgaggctatcctaatcacctggaccaaacgtttcaaggcatcaggtgtcgaaggcgctgatgtggtgaagctcctaaataaagcaattaagaagcgtggggattatgacgccaacattgtggccgtggtgaatgacacggtgggcactatgatgacatgcggatacgacgaccagcactgcgaagtgggtctcattatcggaaccggcactaacgcatgctacatggaagaactccgccatattgatctcgtggagggggatgagggacgtatgtgcattaacacagaatggggagcctttggtgacgacggtagcctggaggacattcggacggagttcgatagagagatcgacagggggtccctgaacccaggtaagcagttgtag

SEQ ID NO: 228757 - DNA, 2751 bp, Artificial Sequence
  derived and/or modified sequence
atggactgcgagcacagcctgagcctgccctgcagaggcgccgaggcctgggagatcggcatcgacaagtacctgtacgccatgagactgagcgacgagaccctgatcgacatcatgaccagattcagaaaggagatgaagaacggcctgagcagagacttcaaccccaccgccaccgtgaagatgctgcccaccttcgtgagaagcatccccgacggcagcgagaagggcgacttcatcgccctggacctgggcggcagcagcttcagaatcctgagagtgcaggtgaaccacgagaagaaccagaacgtgcacatggagagcgaggtgtacgacacccccgagaacatcgtgcacggcagcggcagccagctgttcgaccacgtggccgagtgcctgggcgacttcatggagaagagaaagatcaaggacaagaagctgcccgtgggcttcaccttcagcttcccctgccagcagagcaagatcgacgaggccatcctgatcacctggaccaagagattcaaggccagcggcgtggagggcgccgacgtggtgaagctgctgaacaaggccatcaagaagagaggcgactacgacgccaacatcgtggccgtggtgaacgacaccgtgggcaccatgatgacctgcggctacgacgaccagcactgcgaggtgggcctgatcatcggcaccggcaccaacgcctgctacatggaggagctgagacacatcgacctggtggagggcgacgagggcagaatgtgcatcaacaccgagtggggcgccttcggcgacgacggcagcctggaggacatcagaaccgagttcgacagagagatcgacagaggcagcctgaaccccggcaagcagctgttcgagaagatggtgagcggcatgtacctgggcgagctggtgagactgatcctggtgaagatggccaaggagggcctgctgttcgagggcagaatcacccccgagctgctgaccagaggcaagttcaacaccagcgacgtgagcgccatcgagaagaacaaggagggcctgcacaacgccaaggagatcctgaccagactgggcgtggagcccagcgacgacgactgcgtgagcgtgcagcacgtgtgcaccatcgtgagcttcagaagcgccaacctggtggccgccaccctgggcgccatcctgaacagactgagagacaacaagggcacccccagactgagaaccaccgtgggcgtggacggcagcctgtacaagacccacccccagtacagcagaagattccacaagaccctgagaagactggtgcccgacagcgacgtgagattcctgctgagcgagagcggcagcggcaagggcgccgccatggtgaccgccgtggcctacagactggccgagcagcacagacagatcgaggagaccctggcccacttccacctgaccaaggacatgctgctggaggtgaagaagagaatgagagccgagatggagctgggcctgagaaagcagacccacaacaacgccgtggtgaagatgctgcccagcttcgtgagaagaacccccgacggcaccgagaacggcgacttcctggccctggacctgggcggcaccaacttcagagtgctgctggtgaagatcagaagcggcaagaagagaaccgtggagatgcacaacaagatctacgccatccccatcgagatcatgcagggcaccggcgaggagctgttcgaccacatcgtgagctgcatcagcgacttcctggactacatgggcatcaagggccccagaatgcccctgggcttcaccttcagcttcccctgccagcagaccagcctggacgccggcatcctgatcacctggaccaagggcttcaaggccaccgactgcgtgggccacgacgtggtgaccctgctgagagacgccatcaagagaagagaggagttcgacctggacgtggtggccgtggtgaacgacaccgtgggcaccatgatgacctgcgcctacgaggagcccacctgcgaggtgggcctgatcgtgggcaccggcagcaacgcctgctacatggaggagatgaagaacgtggagatggtggagggcgaccagggccagatgtgcatcaacatggagtggggcgccttcggcgacaacggctgcctggacgacatcagaacccactacgacagactggtggacgagtacagcctgaacgccggcaagcagagatacgagaagatgatcagcggcatgtacctgggcgagatcgtgagaaacatcctgatcgacttcaccaagaagggcttcctgttcagaggccagatcagcgagaccctgaagaccagaggcatcttcgagaccaagttcctgagccagatcgagagcgacagactggccctgctgcaggtgagagccatcctgcagcagctgggcctgaacagcacctgcgacgacagcatcctggtgaagaccgtgtgcggcgtggtgagcagaagagccgcccagctgtgcggcgccggcatggccgccgtggtggacaagatcagagagaacagaggcctggacagactgaacgtgaccgtgggcgtggacggcaccctgtacaagctgcacccccacttcagcagaatcatgcaccagaccgtgaaggagctgagccccaagtgcaacgtgagcttcctgctgagcgaggacggcagcggcaagggcgccgccctgatcaccgccgtgggcgtgagactgagaaccgaggccagcagctag

SEQ ID NO: 228758 - DNA, 876 bp, Artificial Sequence
  derived and/or modified sequence
atggactgcgagcacagcctgagcctgccctgcagaggcgccgaggcctgggagatcggcatcgacaagtacctgtacgccatgagactgagcgacgagaccctgatcgacatcatgaccagattcagaaaggagatgaagaacggcctgagcagagacttcaaccccaccgccaccgtgaagatgctgcccaccttcgtgagaagcatccccgacggcagcgagaagggcgacttcatcgccctggacctgggcggcagcagcttcagaatcctgagagtgcaggtgaaccacgagaagaaccagaacgtgcacatggagagcgaggtgtacgacacccccgagaacatcgtgcacggcagcggcagccagctgttcgaccacgtggccgagtgcctgggcgacttcatggagaagagaaagatcaaggacaagaagctgcccgtgggcttcaccttcagcttcccctgccagcagagcaagatcgacgaggccatcctgatcacctggaccaagagattcaaggccagcggcgtggagggcgccgacgtggtgaagctgctgaacaaggccatcaagaagagaggcgactacgacgccaacatcgtggccgtggtgaacgacaccgtgggcaccatgatgacctgcggctacgacgaccagcactgcgaggtgggcctgatcatcggcaccggcaccaacgcctgctacatggaggagctgagacacatcgacctggtggagggcgacgagggcagaatgtgcatcaacaccgagtggggcgccttcggcgacgacggcagcctggaggacatcagaaccgagttcgacagagagatcgacagaggcagcctgaaccccggcaagcagctgtag

SEQ ID NO: 228759 - protein, 184 aa, Artificial Sequence
  derived and/or modified sequence
MEPSQCVEELEDDVFQPEDGEPVTQPGSLLSADLFAQSLLDCPLSRLQLFPLTHCCGPGLRPTSQEDKATQTLSPASPSQGVMLPCGVTEEPQRLFYGNAGYRLPLPASFPAVLPIGEQPPEGQWQHQAEVQIARKLQCIADQFHRLHVQQHQQNQNRVWWQILLFLHNLALNGEENRNGAGPR

SEQ ID NO: 228760 - protein, 61 aa, Artificial Sequence
  derived and/or modified sequence
MEPSQCVEELEDDVFQPEDGEPVTQPGSLLSADLFAQSLLDCPLSRLQLFPLTHCCGPGLR

SEQ ID NO: 228761 - DNA, 555 bp, Artificial Sequence
  derived and/or modified sequence
atggagcctagtcagtgcgttgaggaactggaggatgatgtttttcagcccgaagatggagaaccagtaacacagccaggtagccttctctccgctgatctgttcgcgcagtcgctacttgactgtcctctgtcaagactacagctttttccactcacacactgctgcggcccaggcctaaggcctacctcccaggaagataaagccacccagaccctgtcacctgcttcgccgtcccagggggtgatgctgccttgtggagtgacagaggaaccccagcgcttgttttatggcaacgccggctatagactccctcttccggcgagttttcccgcagttcttcctatcggtgagcagcctcctgaaggacaatggcagcatcaggcagaagttcagatcgccagaaagctgcagtgcatcgcggatcagttccaccgcttgcatgtgcagcagcaccagcagaatcagaaccgcgtgtggtggcaaatcctcctgtttctgcataacctcgccctcaacggcgaggagaatcgaaatggggccggcccccgctag

SEQ ID NO: 228762 - DNA, 555 bp, Artificial Sequence
  derived and/or modified sequence
atggagccatcacagtgcgtggaagagctggaagatgacgtgtttcagcccgaagatggtgaaccagtcacacagcctgggtccctgctttccgcagatctgttcgcacagagcttgctagattgcccgctgtctaggctccagctgtttcccctgacccattgttgcggcccgggtctcagacctacttcccaggaagataaagcaactcaaactctgtcaccagctagcccttcccaaggtgttatgcttccgtgcggggttaccgaagagccccagcgcctgttttacgggaatgcaggctacaggttacctctgccggcgtcattcccagccgtcctgcccataggagagcagcctcccgaagggcaatggcagcatcaagccgaggttcagatcgctcgaaagcttcagtgcattgctgatcagttccatagactccatgttcagcagcaccagcagaatcagaatcgggtgtggtggcagatcctcttgtttctgcacaacctcgctctgaatggcgaggagaacaggaacggtgcgggcccgcgctag

SEQ ID NO: 228763 - DNA, 555 bp, Artificial Sequence
  derived and/or modified sequence
atggagccttcacagtgcgttgaagagctagaagacgacgtatttcagcctgaggacggagagccagtcacccagcctgggtctctccttagcgccgatctgtttgcacagagccttctcgactgccctctgagtagactccagttgtttccactcacccattgttgcggacccgggctgagaccaacttctcaggaagacaaggctacgcagaccctttcccctgctagtccaagtcagggcgtgatgctgccgtgtggcgtgactgaagagccccagcgcctcttttacggcaacgccgggtacagactgcccctgccagcctcttttcctgcagtcctgcctatcggagagcagcccccagaggggcaatggcagcatcaggcagaagtccagatcgctagaaaactccagtgtattgctgatcagttccataggctgcatgtgcaacagcaccagcagaatcagaacagagtttggtggcagattttactttttctgcataacttagcattaaacggtgaggagaacaggaacggcgcaggccccaggtag

SEQ ID NO: 228764 - DNA, 555 bp, Artificial Sequence
  derived and/or modified sequence
atggagcctagtcagtgcgtcgaagagctggaggacgatgtgttccagcctgaggatggagaacccgtaactcagccgggttcactactctctgcagatcttttcgctcagtccctgctcgactgccccctgtccagactgcagctgttccctctgacccactgttgtggaccaggccttcgccccacatcccaagaagataaagctacccagaccctgtctcctgcgtccccttcccagggcgtgatgcttccgtgtggagtcactgaagagccgcagcggctcttctatggcaacgcggggtatcgcctccctttgcccgcttcatttccagcagtactgcccattggagagcagccccccgagggacagtggcagcaccaggccgaggtacagatcgcacgcaagcttcaatgtatagccgaccagttccacagactccacgtgcaacagcatcagcagaatcagaacagagtgtggtggcagatacttctttttctgcacaatctcgcattaaacggtgaggagaacagaaatggcgcggggcctcggtag

SEQ ID NO: 228765 - DNA, 555 bp, Artificial Sequence
  derived and/or modified sequence
atggagcccagccagtgtgtggaggagctggaggatgatgtgttccagccagaagatggagagcctgtgacccagcccggcagcctgctgtctgctgacctgtttgcccagagcctgctggactgccccctgagccggctgcagctgttccccctgacccactgctgcggccctggcctgcggcccaccagccaggaggacaaggccacccagaccctgagccctgccagccccagccagggcgtgatgctgccctgtggggtgacagaggagccccagaggctcttctatggaaatgccggctaccgcctgcccctgcctgccagcttccctgctgtgctgcccatcggggagcagcccccagagggccagtggcagcaccaggccgaggtgcagatcgccaggaagctgcagtgcatcgctgaccagttccaccggctgcacgtgcagcagcaccagcagaaccagaacagagtgtggtggcagatcctgctcttcctgcacaacctggccctgaatggagaggagaacagaaatggagctggccccaggtag

SEQ ID NO: 228766 - DNA, 555 bp, Artificial Sequence
  derived and/or modified sequence
atggagcccagccagtgcgtggaggagctggaggacgacgtgttccagccagaggacggagagcctgtgacccaacctgggtccttgctcagcgctgatctgttcgcccagtccctgcttgactgcccactgtcaagactgcagctctttcctctgacccactgctgtgggcctggacttagacctacgtctcaggaagataaagccactcagaccctcagtcccgctagcccttcccagggcgtgatgctcccgtgcggagttactgaggaaccccaacggctcttctatggaaacgcaggctaccggctgccgctgcccgcaagcttccctgcggtccttcccatcggcgaacaaccaccggaaggacagtggcagcaccaagcagaagtgcagatcgcccggaagctgcaatgtatcgcagatcaattccatcgattacacgtgcaacaacatcagcaaaaccagaatagggtgtggtggcagatcctgttatttctccataatctggctctcaacggggaggaaaaccgaaacggcgccggacctcgctag

SEQ ID NO: 228767 - DNA, 555 bp, Artificial Sequence
  derived and/or modified sequence
atggagcccagccagtgcgtggaggagctggaggacgacgtgttccagcctgaagatggagagcccgtgactcagcccggttccttgctgtctgctgatttattcgcacagtcactacttgattgcccactgtcacgactgcagctgttcccattgacccattgctgcggacccgggctgaggccaacctctcaggaagataaggctacgcaaactttatcccccgctagtcctagccagggcgtaatgctcccctgtggcgtgacagaggaacctcagaggctattctatggaaacgcagggtacaggttgccattacctgcctctttccccgctgttctgcccattggggaacagcctcccgaaggacagtggcagcatcaggctgaagtgcagatagctcgcaaattacaatgcatcgcagaccagttccaccgactccatgtccagcagcaccagcagaatcaaaaccgcgtctggtggcaaatcctgctctttctgcacaatcttgctctgaacggagaggaaaatagaaacggagcaggcccccggtag

SEQ ID NO: 228768 - DNA, 555 bp, Artificial Sequence
  derived and/or modified sequence
atggagcccagccagtgcgtggaggagctggaggacgacgtgttccagcctgaagatggagaacctgtgacacagccaggatctctcctttccgccgacctttttgctcagtcactcttggattgtcccctcagtaggctgcagttgtttcctcttacacattgttgcggaccaggcttgagacctacaagtcaggaagataaggctacccagactctgtcccctgcctcaccttcgcaaggggtaatgctcccgtgcggcgtgacggaggaaccacaaaggttattctacggaaatgctggctataggctcccgctgcctgcttctttccccgctgtgctacctataggagagcaacccccagaaggacaatggcaacatcaagctgaagtgcagattgcaaggaaactccagtgtatcgccgaccaattccataggctacacgtccagcagcaccagcagaatcaaaaccgagtttggtggcagatactactgtttctgcataacctggcacttaacggcgaggaaaaccgaaacggtgctggtccccgctag

SEQ ID NO: 228769 - DNA, 555 bp, Artificial Sequence
  derived and/or modified sequence
atggagcccagccagtgcgtggaggagctggaggacgacgtgttccaacctgaagatggggagccggttactcaacccgggtctctgttatcagccgacttattcgcacagtcgttattagattgtccactgtcccggcttcaactgttccccctgacacactgctgcgggcccggtcttagacctactagtcaggaagataaagcaacccagacactgtccccagcctccccgagtcagggagttatgctgccttgcggagtgaccgaagaaccccagcggttgttttatggcaacgctggatataggctgccattgccagcttcttttcccgccgtgctgcctatcggggagcagccacctgaaggccaatggcagcatcaggccgaagttcagatcgcccgcaagttgcaatgtatagctgaccagttccatcgcctccacgtgcagcagcatcagcagaaccagaatagggtgtggtggcagattctgctgttcctccacaatcttgcgctgaatggagaagagaacaggaatggcgcgggacccagatag

SEQ ID NO: 228770 - DNA, 555 bp, Artificial Sequence
  derived and/or modified sequence
atggagcctagccagtgcgtcgaggagctggaggatgacgtcttccaacccgaagatggggaaccagtaactcagcctggaagtcttctgtccgctgacttgtttgcacagtctctgctggactgtccccttagcagactgcagttatttcccttgactcactgctgcggtcccggtttacggccaacatcacaagaggataaggcaacccagaccctgtcccccgctagtccatcacagggagtgatgctgccctgtggggtaaccgaggaaccacagcgcctcttctacggtaatgcaggctatcgtctccccctccccgcatcctttcccgctgtattgccaattggagagcagccacccgaaggacagtggcaacaccaggccgaggtgcaaatcgccagaaagctgcagtgtattgccgaccaattccacaggttgcacgtgcagcaacaccagcagaatcagaatagagtttggtggcagatactattattcttgcacaacttggccctaaatggcgaggagaaccgcaacggtgccggaccacggtag

SEQ ID NO: 228771 - DNA, 555 bp, Artificial Sequence
  derived and/or modified sequence
atggaaccttcgcaatgtgtggaagagctggaggatgatgtgtttcagcccgaggacggcgagccagtgacacagccaggtagtctattgtcagcagacttgtttgctcagtcccttctggactgccccctgtctcgtctgcagctgtttcctctcacccactgttgcggacccggactgcgccctacctcccaagaggacaaggctacacagacactaagccctgctagcccttcccagggggtgatgctgccttgcggggtgacagaggagcctcagagattgttttacgggaacgctggatatagactgcccctgccggcttcatttcccgctgtgctgccaataggagagcaacctcccgaaggccagtggcaacaccaggcggaggttcagatcgctcgtaaattgcaatgtatagcggaccaattccacaggctgcacgtacagcagcatcaacaaaaccaaaatagagtatggtggcagatcctgcttttcctccataacctggccttgaatggagaagaaaatcggaacggagctggacctaggtag

SEQ ID NO: 228772 - DNA, 555 bp, Artificial Sequence
  derived and/or modified sequence
atggaaccctcgcaatgtgtagaagaactggaagacgatgtgtttcagcccgaggacggcgagcctgttacacagcctggcagccttcttagcgctgatctgtttgctcagtcgttacttgactgcccactgtccaggcttcagctgtttccactaactcattgttgcggcccaggcttacgcccaacttcccaggaagataaagccacacaaactctaagtcccgctagcccaagccagggtgtcatgctgccatgtggcgtgacggaagaaccacagcggttgttttacggaaacgcaggctacaggttgccgctgcccgcatcattccccgcagttctgcctatcggcgaacagcctccggagggacaatggcagcaccaggcagaagtacagatcgccagaaagctgcagtgtatcgcagatcagtttcatcgcctccatgttcaacagcaccagcagaatcagaatagggtttggtggcagatcctgctcttcctccataatctcgctctaaacggcgaggagaatagaaatggagctggaccacgctag

SEQ ID NO: 228773 - DNA, 555 bp, Artificial Sequence
  derived and/or modified sequence
atggagccttctcagtgcgttgaagagctcgaagacgacgtgtttcagccagaagacggggagcccgtgacccagcccggttcgttgctttctgcagatctcttcgcccaatcactcctggactgtccactttccagattgcaattgttccctctgacccattgctgtgggcctggactgaggccgactagccaggaagacaaagcaactcagacactgtcaccggcaagccctagtcagggtgtgatgctgccctgcggcgtgactgaagagcctcagaggctgttttacggcaacgccggatatcgattgccattgcctgcttctttccccgctgtgttaccaatcggagagcagcctccggagggacaatggcagcaccaggctgaggttcaaatcgcgagaaagcttcaatgtatcgctgaccaatttcaccgcctgcacgtgcaacagcaccagcaaaaccaaaaccgggtgtggtggcagattctgctcttcctgcataatttggctctcaatggcgaagagaaccgtaatggcgctgggcctagatag

SEQ ID NO: 228774 - DNA, 4687 bp, Artificial Sequence
  derived and/or modified sequence
ggaaacaataccgcaccgtgcggagtggcctcctcccgccccggcctgtgcccgccgccgccgccgcccctgcctgcgcctcccgcctcctgccgcagcccgctgggctttttccctccttcccaatcgagtctgggcgtccagcccccgagtgctcgtcacgctggaccctggcgcggagccctggcatcacgactcggaggccgagactctctcctggagtcacccaggagagatggagccatctcagtgtgtggaggagctggaggatgatgtgttccaaccagaggatggggagccggtgacccaacccgggagcttgctctctgctgacctgtttgcccagagcctactggactgccccctcagccgacttcagctcttccctctcacccactgctgtggccctggccttcgacccaccagccaggaagacaaagctacccagactctcagcccagcctcccccagccaaggtgtcatgctgccttgtggggtgactgaggaaccccagcgactcttttatggcaatgctggctatcggcttcctctccctgccagtttcccagcagtcttgcccattggggagcagccccccgaagggcagtggcaacatcaagcagaggtacagattgcccgaaagcttcagtgcattgcagaccagttccaccggcttcatgtgcagcaacaccagcagaaccaaaatcgtgtgtggtggcagatcctcctcttcctgcacaaccttgctttgaatggagaagagaacaggaacggggcaggccctaggtgagggtgggctgccctcttcacatggggcaccaggaacaccgtctggaacaggaaggacatcgggcaggactgacactgtgtcttgtgaaattgtttttttgttgttattttgtgttttaattttttttaatttctctctgagtgtacatacaacatactcaagcgggaccttctttctctgtcaggcccttgacctggaatgggggcctttgtcaaacactgttgaaggagaggctgatgtgtctgtgatggtgagaattcccaagggctctgacaagtagattcttcgactgaggaatctaccagttgtcgaagatgatccgttagtgatgttctctgggaagtggactgtggtttttccagaggaactcagttaagaaatcgagagtggattagactcccagttccaccaaacctatgagccttccactgtggatgggggccgtgatcctgatggtcacattgctttaacccagcagggcttcggccaggggctttccacttgaggatagcagcttcactaggctggccggccagctccacatctgactgggttcttacttctcagccagtacctgccccatgggctcaaggattcctggccagctcctgccacctccagcagacctcagggagggttgagtttctctaaggacccctcaaacatgtcgcaaaatgaaccaaacttctggctaggcctcaaaactgacttggtcccacttggaggccccaggattggtcctgaggtacagagccactgccaccactggcggcctgggaccagctgggtgtcagccacggatgagccgaatagccagtcagcatgttgctgctggcagcctgtgcctttgtcagctcttctttcaaaagaccccaccgacagaccgcattccacccccaacatcggcactgagggacatcgggggcaagtttgcagtggggccggaaaatatggtggccaccctaccatgagagtcagccgtaggggaccccagaccccttggtttccttggaaacaacatacctcttcccccttatccccagtcctttttcatacctagtgggatacagaagaagccaggacagtggctttgccagctaagtgacttttagagtaacagataacgattagagtggggaaccgtcaaagctgggtacacatttcctatcttcctccagcttccagctaggccagaagggcatgctctggaacccagcaggatcacagctgcctgtgcacgtcttcccttctctccctgctgcggcacttatggagaggatctaaagcagccggtgtggcagctccgatagcaggcacagggaatctgttaaccagacgctagaaactaaattataacttttgcatatgtgagaaaagacaacattggtgctaacagtgaagtaaggcccaaaggaaagacggcttccctggacaaagaagacctcagggctacccaaggaaataggaggagtctagagtagactcacaaatctgaacaagcccaagtcttccagttctgaggagaggaggtcttcagtactattgaaggagacattgatcttctggatgtacagttgtgcaggttgttcactgcacaagggcacctgcagctaatggaggctggaattcagcttgtgttctgctcactaagctgtgtgcgtgccctggtgtggggctacttctcccaagaagaaggggtgcctttcctaatttgcaaaggtgccatatgggctcacagcaccctggaggagaagggcctcaaactgtgcatgtaagcctttgttttgttctgctcagatattctggatattacctcttcttggtcagaattctattctcagggtgtgtaccatgatttgtctgctaagaagacgggttcctgctttgcagagaaggagccggggaccagcttgaagactggctctgggacacactgaccattgtgaaattcagccttccctgtgggtctccataccattttatgatgtgtatgggacatacgttgttctcccctctctggatcaaggtggtgacaggcagcctgctgccgtatgcttcagtggcacacaccaaaaaaccgggattatttacagcagccactattcaccccttttggcagactctccacctgagttcagtgagagagaaaatgatttagatcttggtgctggggcaaggccatcagcttcagagaccttgccaggcccaggctgggtgccctgtggcctgagaactgagcccagactttgacaaacccacctcaacatcaagcctggggcaggtggaaggtggtctgactgcactgtctccatcttatgcaaagccaggaactcactcactgtcttaagtgagccagggcaaaatttacacccctcacgtttccctctcccttcttccccaccaacaaaacccaggaggtagctggcagagtagctgtcaggaaggagaaaggttctttctggctggttgtttttaattggcttagtgatctaaactggccccttcctcctctgcctggtgagttggcctaaacattcctcaagtctagcctcaggagacctgcccctcccccccgacctccaccccctcagactccatcccccacccccaggagcctggctgtctctagcgaggggtggagaatcagatttagagggagggagagtctgacctggatcctgacctgtaaccagctgaagacggtggaggctttgtggcttgctgagggtgggggttgggagagggactggaaaccttcctcctcgggaaagaaatgcctgggaggaagggaagcctgatattcagggtcaaaacagcccttctaattcacaaccccaaagcaggggtttctagaagttggtcaacagatctggtgagggaagtccccaggccagacgctggactcctgcaatgagggtggaggactcagcctggcctctgcctggcctgtttcaaagtctgggccactggcagccttctcttgctcaatccgaggtggaaaaagatcacctcccagtgacctccctcagcccccaggggagtaggtctgtgtccaaagctatgtggcaggcttgtttgaaggacccagaggggcccagctgacctgtctcactgctcctggcagcccagccccatcggcaggtggcccctgcctgggggttattcgggatggttcagccagggcctcccaggaagagtgctgtggagccacggtgactgtcctggacagcaaggagcatgctaccccagtgagcacttctttttgagggacttgatggggaggtggggtaggcagaagggacgtggcagaagcgggaagactttggtcaccatggctctgcaggccttctgcaaatcagtgctggcctgggctggaaacagctctgtgtgtgaaggtgaggactcttggaagcaggccatcctggccagacaccctagcaggaaggggctcacctgtcacccttaggcagcctgagggctggtggggacttttgagtcttgaggggatagcggaaaaagctgagctcataggtgcccagccagcctcccagctaaaggtgctcagagccccactgccccctctctctgtgcaggtggccagtgcccctccctgctctgggagcattgctagccttctaccccatccctggatccacaggggctatcgaggagacccagtgagaatgtagcattttgttcatccccagggtagctgccctggggtctgggcactctgcctctgggagagaggaagaagaaaggggccccattttttaaaaaactgtacagagcctttggctttatgtgtttatgttcttcacatgcatatgtgtgtatgtgtgtatatctttccccccatcaattggtacaatttttaataaaatcatttaaagcaaa

SEQ ID NO: 228775 - DNA, 4545 bp, Artificial Sequence
  derived and/or modified sequence
attttcccaggtaccctgcatgcatatagctgctgattctactcctgctattgctcacaaccctcagagtcaaactttgtgaccggcctaggagagatggagccatctcagtgtgtggaggagctggaggatgatgtgttccaaccagaggatggggagccggtgacccaacccgggagcttgctctctgctgacctgtttgcccagagcctactggactgccccctcagccgacttcagctcttccctctcacccactgctgtggccctggccttcgacccaccagccaggaagacaaagctacccagactctcagcccagcctcccccagccaaggtgtcatgctgccttgtggggtgactgaggaaccccagcgactcttttatggcaatgctggctatcggcttcctctccctgccagtttcccagcagtcttgcccattggggagcagccccccgaagggcagtggcaacatcaagcagaggtacagattgcccgaaagcttcagtgcattgcagaccagttccaccggcttcatgtgcagcaacaccagcagaaccaaaatcgtgtgtggtggcagatcctcctcttcctgcacaaccttgctttgaatggagaagagaacaggaacggggcaggccctaggtgagggtgggctgccctcttcacatggggcaccaggaacaccgtctggaacaggaaggacatcgggcaggactgacactgtgtcttgtgaaattgtttttttgttgttattttgtgttttaattttttttaatttctctctgagtgtacatacaacatactcaagcgggaccttctttctctgtcaggcccttgacctggaatgggggcctttgtcaaacactgttgaaggagaggctgatgtgtctgtgatggtgagaattcccaagggctctgacaagtagattcttcgactgaggaatctaccagttgtcgaagatgatccgttagtgatgttctctgggaagtggactgtggtttttccagaggaactcagttaagaaatcgagagtggattagactcccagttccaccaaacctatgagccttccactgtggatgggggccgtgatcctgatggtcacattgctttaacccagcagggcttcggccaggggctttccacttgaggatagcagcttcactaggctggccggccagctccacatctgactgggttcttacttctcagccagtacctgccccatgggctcaaggattcctggccagctcctgccacctccagcagacctcagggagggttgagtttctctaaggacccctcaaacatgtcgcaaaatgaaccaaacttctggctaggcctcaaaactgacttggtcccacttggaggccccaggattggtcctgaggtacagagccactgccaccactggcggcctgggaccagctgggtgtcagccacggatgagccgaatagccagtcagcatgttgctgctggcagcctgtgcctttgtcagctcttctttcaaaagaccccaccgacagaccgcattccacccccaacatcggcactgagggacatcgggggcaagtttgcagtggggccggaaaatatggtggccaccctaccatgagagtcagccgtaggggaccccagaccccttggtttccttggaaacaacatacctcttcccccttatccccagtcctttttcatacctagtgggatacagaagaagccaggacagtggctttgccagctaagtgacttttagagtaacagataacgattagagtggggaaccgtcaaagctgggtacacatttcctatcttcctccagcttccagctaggccagaagggcatgctctggaacccagcaggatcacagctgcctgtgcacgtcttcccttctctccctgctgcggcacttatggagaggatctaaagcagccggtgtggcagctccgatagcaggcacagggaatctgttaaccagacgctagaaactaaattataacttttgcatatgtgagaaaagacaacattggtgctaacagtgaagtaaggcccaaaggaaagacggcttccctggacaaagaagacctcagggctacccaaggaaataggaggagtctagagtagactcacaaatctgaacaagcccaagtcttccagttctgaggagaggaggtcttcagtactattgaaggagacattgatcttctggatgtacagttgtgcaggttgttcactgcacaagggcacctgcagctaatggaggctggaattcagcttgtgttctgctcactaagctgtgtgcgtgccctggtgtggggctacttctcccaagaagaaggggtgcctttcctaatttgcaaaggtgccatatgggctcacagcaccctggaggagaagggcctcaaactgtgcatgtaagcctttgttttgttctgctcagatattctggatattacctcttcttggtcagaattctattctcagggtgtgtaccatgatttgtctgctaagaagacgggttcctgctttgcagagaaggagccggggaccagcttgaagactggctctgggacacactgaccattgtgaaattcagccttccctgtgggtctccataccattttatgatgtgtatgggacatacgttgttctcccctctctggatcaaggtggtgacaggcagcctgctgccgtatgcttcagtggcacacaccaaaaaaccgggattatttacagcagccactattcaccccttttggcagactctccacctgagttcagtgagagagaaaatgatttagatcttggtgctggggcaaggccatcagcttcagagaccttgccaggcccaggctgggtgccctgtggcctgagaactgagcccagactttgacaaacccacctcaacatcaagcctggggcaggtggaaggtggtctgactgcactgtctccatcttatgcaaagccaggaactcactcactgtcttaagtgagccagggcaaaatttacacccctcacgtttccctctcccttcttccccaccaacaaaacccaggaggtagctggcagagtagctgtcaggaaggagaaaggttctttctggctggttgtttttaattggcttagtgatctaaactggccccttcctcctctgcctggtgagttggcctaaacattcctcaagtctagcctcaggagacctgcccctcccccccgacctccaccccctcagactccatcccccacccccaggagcctggctgtctctagcgaggggtggagaatcagatttagagggagggagagtctgacctggatcctgacctgtaaccagctgaagacggtggaggctttgtggcttgctgagggtgggggttgggagagggactggaaaccttcctcctcgggaaagaaatgcctgggaggaagggaagcctgatattcagggtcaaaacagcccttctaattcacaaccccaaagcaggggtttctagaagttggtcaacagatctggtgagggaagtccccaggccagacgctggactcctgcaatgagggtggaggactcagcctggcctctgcctggcctgtttcaaagtctgggccactggcagccttctcttgctcaatccgaggtggaaaaagatcacctcccagtgacctccctcagcccccaggggagtaggtctgtgtccaaagctatgtggcaggcttgtttgaaggacccagaggggcccagctgacctgtctcactgctcctggcagcccagccccatcggcaggtggcccctgcctgggggttattcgggatggttcagccagggcctcccaggaagagtgctgtggagccacggtgactgtcctggacagcaaggagcatgctaccccagtgagcacttctttttgagggacttgatggggaggtggggtaggcagaagggacgtggcagaagcgggaagactttggtcaccatggctctgcaggccttctgcaaatcagtgctggcctgggctggaaacagctctgtgtgtgaaggtgaggactcttggaagcaggccatcctggccagacaccctagcaggaaggggctcacctgtcacccttaggcagcctgagggctggtggggacttttgagtcttgaggggatagcggaaaaagctgagctcataggtgcccagccagcctcccagctaaaggtgctcagagccccactgccccctctctctgtgcaggtggccagtgcccctccctgctctgggagcattgctagccttctaccccatccctggatccacaggggctatcgaggagacccagtgagaatgtagcattttgttcatccccagggtagctgccctggggtctgggcactctgcctctgggagagaggaagaagaaaggggccccattttttaaaaaactgtacagagcctttggctttatgtgtttatgttcttcacatgcatatgtgtgtatgtgtgtatatctttccccccatcaattggtacaatttttaataaaatcatttaaagc

SEQ ID NO: 228776 - DNA, 747 bp, Artificial Sequence
  derived and/or modified sequence
tagctgctgattctactcctgctattgctcacaaccctcagagtcaaactttgtgaccggcctaggtcagaaaacgtgatcaagaaaaagggtggttccaggcgggcccagggaagaggagagatggagccatctcagtgtgtggaggagctggaggatgatgtgttccaaccagaggatggggagccggtgacccaacccgggagcttgctctctgctgacctgtttgcccagagcctactggactgccccctcagccgacttcagctcttccctctcacccactgctgtggccctggccttcgacccaccagccaggaagacaaagctacccagactctcagcccagcctcccccagccaaggtgtcatgctgccttgtggggtgactgaggaaccccagcgactcttttatggcaatgctggctatcggcttcctctccctgccagtttcccagcagtcttgcccattggggagcagccccccgaagggcagtggcaacatcaagcagaggtacagattgcccgaaagcttcagtgcattgcagaccagttccaccggcttcatgtgcagcaacaccagcagaaccaaaatcgtgtgtggtggcagatcctcctcttcctgcacaaccttgctttgaatggagaagagaacaggaacggggcaggccctaggtgagggtgggctgccctcttcacatggggcaccaggaacaccgtctggaacaggaaggacatcgggcaggac

SEQ ID NO: 228777 - DNA, 735 bp, Artificial Sequence
  derived and/or modified sequence
gctgtcctaggattgctggcttttgtttttgctgctgagcctggagctcagctcagactgagaggagagatggagccatctcagtgtgtggaggagctggaggatgatgtgttccaaccagaggatggggagccggtgacccaacccgggagcttgctctctgctgacctgtttgcccagagcctactggactgccccctcagccgacttcagctcttccctctcacccactgctgtggccctggccttcgacccaccagccaggaagacaaagctacccagactctcagcccagcctcccccagccaaggtgtcatgctgccttgtggggtgactgaggaaccccagcgactcttttatggcaatgctggctatcggcttcctctccctgccagtttcccagcagtcttgcccattggggagcagccccccgaagggcagtggcaacatcaagcagaggtacagattgcccgaaagcttcagtgcattgcagaccagttccaccggcttcatgtgcagcaacaccagcagaaccaaaatcgtgtgtggtggcagatcctcctcttcctgcacaaccttgctttgaatggagaagagaacaggaacggggcaggccctaggtgagggtgggctgccctcttcacatggggcaccaggaacaccgtctggaacaggaaggacatcgggcaggactgacactgtgtcttgtgaaattgtttttttgttgttattttg

SEQ ID NO: 228778 - DNA, 555 bp, Artificial Sequence
  derived and/or modified sequence
atggagcccagccagtgcgtggaggagctggaggacgacgtgttccagcccgaggacggcgagcccgtgacccagcccggcagcctgctgagcgccgacctgttcgcccagagcctgctggactgccccctgagcagactgcagctgttccccctgacccactgctgcggccccggcctgagacccaccagccaggaggacaaggccacccagaccctgagccccgccagccccagccagggcgtgatgctgccctgcggcgtgaccgaggagccccagagactgttctacggcaacgccggctacagactgcccctgcccgccagcttccccgccgtgctgcccatcggcgagcagccccccgagggccagtggcagcaccaggccgaggtgcagatcgccagaaagctgcagtgcatcgccgaccagttccacagactgcacgtgcagcagcaccagcagaaccagaacagagtgtggtggcagatcctgctgttcctgcacaacctggccctgaacggcgaggagaacagaaacggcgccggccccagatag

SEQ ID NO: 228779 - protein, 397 aa, Artificial Sequence
  derived and/or modified sequence
MAGYEYVSPEQLAGFDKYKYSAVDTNPLSLYVMHPFWNTIVKVFPTWLAPNLITFSGFLLVVFNFLLMAYFDPDFYASAPGHKHVPDWVWIVVGILNFVAYTLDGVDGKQARRTNSSTPLGELFDHGLDSWSCVYFVVTVYSIFGRGSTGVSVFVLYLLLWVVLFSFILSHWEKYNTGILFLPWGYDISQVTISFVYIVTAVVGVEAWYEPFLFNFLYRDLFTAMIIGCALCVTLPMSLLNFFRSYKNNTLKLNSVYEAMVPLFSPCLLFILSTAWILWSPSDILELHPRVFYFMVGTAFANSTCQLIVCQMSSTRCPTLNWLLVPLFLVVLVVNLGVASYVESILLYTLTTAFTLAHIHYGVRVVKQLSSHFQIYPFSLRKPNSDCLGMEEKNIGL

SEQ ID NO: 228780 - protein, 118 aa, Artificial Sequence
  derived and/or modified sequence
MHPFWNTIVKVFPTWLAPNLITFSGFLLVVFNFLLMAYFDPDFYASAPGHKHVPDWVWIVVGILNFVAYTLDGVDGKQARRTNSSTPLGELFDHGLDSWSCVYFVVTVYSIFGRGSTG

SEQ ID NO: 228781 - DNA, 1194 bp, Artificial Sequence
  derived and/or modified sequence
atggccggctacgagtacgtgagccccgagcagctggccggcttcgacaagtacaagtacagcgccgtggacaccaaccccctgagcctgtacgtgatgcaccccttctggaacaccatcgtgaaggtgttccccacctggctggcccccaacctgatcaccttcagcggcttcctgctggtggtgttcaacttcctgctgatggcctacttcgaccccgacttctacgccagcgcccccggccacaagcacgtgcccgactgggtgtggatcgtggtgggcatcctgaacttcgtggcctacaccctggacggcgtggacggcaagcaggccagaagaaccaacagcagcacccccctgggcgagctgttcgaccacggcctggacagctggagctgcgtgtacttcgtggtgaccgtgtacagcatcttcggcagaggcagcaccggcgtgagcgtgttcgtgctgtacctgctgctgtgggtggtgctgttcagcttcatcctgagccactgggagaagtacaacaccggcatcctgttcctgccctggggctacgacatcagccaggtgaccatcagcttcgtgtacatcgtgaccgccgtggtgggcgtggaggcctggtacgagcccttcctgttcaacttcctgtacagagacctgttcaccgccatgatcatcggctgcgccctgtgcgtgaccctgcccatgagcctgctgaacttcttcagaagctacaagaacaacaccctgaagctgaacagcgtgtacgaggccatggtgcccctgttcagcccctgcctgctgttcatcctgagcaccgcctggatcctgtggagccccagcgacatcctggagctgcaccccagagtgttctacttcatggtgggcaccgccttcgccaacagcacctgccagctgatcgtgtgccagatgagcagcaccagatgccccaccctgaactggctgctggtgcccctgttcctggtggtgctggtggtgaacctgggcgtggccagctacgtggagagcatcctgctgtacaccctgaccaccgccttcaccctggcccacatccactacggcgtgagagtggtgaagcagctgagcagccacttccagatctaccccttcagcctgagaaagcccaacagcgactgactgggcatggaggagaagaacatcggcctgtag

SEQ ID NO: 228782 - DNA, 357 bp, Artificial Sequence
  derived and/or modified sequence
atgcaccccttctggaacaccatcgtgaaggtgttccccacctggctggcccccaacctgatcaccttcagcggcttcctgctggtggtgttcaacttcctgctgatggcctacttcgaccccgacttctacgccagcgcccccggccacaagcacgtgcccgactgggtgtggatcgtggtgggcatcctgaacttcgtggcctacaccctggacggcgtggacggcaagcaggccagaagaaccaacagcagcacccccctgggcgagctgttcgaccacggcctggacagctggagctgcgtgtacttcgtggtgaccgtgtacagcatcttcggcagaggcagcaccggctag

SEQ ID NO: 228783 - DNA, 1194 bp, Artificial Sequence
  derived and/or modified sequence
atggctggatacgagtacgtaagccctgagcagctagccggcttcgacaaatataagtacagcgcagttgacaccaacccactatcactctacgttatgcaccctttttggaacaccatcgtaaaggtgtttcccacctggctcgcacccaaccttattaccttcagcggcttcctgttagtggtgtttaactttctgcttatggcttattttgatccggatttttatgcaagcgcccccggacacaagcacgtgcctgactgggtgtggatcgtcgtcggcatattaaatttcgtggcttacactctggacggcgtcgacggcaaacaggcgcgaaggaccaattcctccactcctctcggcgagctctttgatcacggtctcgacagttggtcctgcgtgtactttgtcgtgaccgtgtattcaattttcggtagagggagcacaggcgtgtctgtgttcgtcctctatttactgttgtgggtcgtgctcttcagctttatcctgtcccactgggaaaagtataataccggaatccttttcctgccgtggggttatgatatatcccaggtgactatctccttcgtgtatatcgtgacggccgtagttggcgttgaagcttggtacgagcccttcctgttcaactttctttacagggacctctttactgccatgatcattggatgcgccctgtgcgtgacactgcctatgagcctgctcaacttttttcgctcctataagaacaacactttgaaactaaactctgtctacgaagccatggtgccgctgttctctccgtgtttgttatttatcttaagcactgcctggatcctgtggtccccatccgacattttggaactgcacccccgcgtcttctacttcatggtaggaaccgcctttgccaatagtacctgccagctcatcgtgtgtcagatgagtagcacacggtgtccgaccctgaactggctgctcgtcccactgttcttagtggtgctggtggtcaacctgggtgtggcctcttatgtggaatccatcctcctttataccctgaccaccgccttcacactggcccatatccactatggcgtcagagttgtgaagcagttaagttcccacttccagatctaccctttctccctgcgaaagcctaacagtgattgattgggcatggaggaaaaaaatatcgggctgtag

SEQ ID NO: 228784 - DNA, 357 bp, Artificial Sequence
  derived and/or modified sequence
atgcatccattctggaacaccattgtcaaagtcttccccacatggctggcccccaaccttatcacatttagcggtttccttttggtcgtcttcaactttctgttgatggcctactttgacccggatttctatgcctctgcaccgggtcataaacatgttcccgactgggtgtggatagttgtgggcatcctgaacttcgttgcctatactctcgatggagtggacggcaagcaggcccgaaggacaaattcctcaacaccattaggcgagctgtttgatcatggtctggactcgtggagctgcgtttattttgtggtgacagtatattctatttttggaagaggaagtacaggctag

SEQ ID NO: 228785 - DNA, 8101 bp, Artificial Sequence
  derived and/or modified sequence
ctcctaccttctcgggcagcccagtctttgccatccttgcccagccggtgtggtgcttgtgtgtcacagccttgtagccgggagtcgctgccgagtgggcgctcagttttcgggtcgtcatggctggctacgaatacgtgagcccggagcagctggctggctttgataagtacaagtacagtgctgtggataccaatccactttctctgtatgtcatgcatccattctggaacactatagtaaaggtatttcctacttggctggcgcccaatctgataactttttctggctttctgctggtcgtattcaattttctgctaatggcatactttgatcctgacttttatgcctcagcaccaggtcacaagcacgtgcctgactgggtttggattgtagtgggcatcctcaacttcgtagcctacactctagatggtgtggacggaaagcaagctcgcagaaccaattctagcactcccttaggggagctttttgatcatggcctggatagttggtcatgtgtttactttgttgtgactgtttattccatctttggaagaggatcaactggtgtcagtgtttttgttctttatctcctgctatgggtagttttgttttctttcatcctgtcccactgggaaaagtataacacagggattcttttcctgccatggggatatgacattagccaggtgactatttcttttgtctacatagtgactgcagttgtgggagttgaggcctggtatgaacctttcctgtttaatttcttatatagagacctattcactgcaatgattattggttgtgcattatgtgtgactcttccaatgagtttattaaactttttcagaagctataaaaataacaccttgaaactcaattcagtctatgaagctatggttcccttattttctccatgcttgctgttcattttgtctacagcgtggatcctttggtcaccttcagatattttagagctacatcctagagtattctactttatggttggaacagcttttgccaacagtacatgtcagctgattgtttgccaaatgagtagtacccggtgtccaactttgaattggttgctggttcctctcttcttggttgtcttagtggtaaacctaggagtagcctcttacgttgagagcattctcctgtatacattaacaactgcttttactctggcccacatccattatggagtacgagtggtaaagcagctgagcagccattttcagatttaccccttctcattgaggaaaccaaactcagattgactaggaatggaagaaaagaatattggcctgtaataatctttctttgggcacaaagaagtactgtaaataaatgcttgtaaatatttcctccatcaccattgaactagactgatctgcttgacagacgtgggatctcagtatggtacttggacagcaggaatgatacatataatctgaacttgggaaattttggacctactaactctaagcctattttattttttataaaactatgtgacattttggttgagcagaatgtacgttagaccagcaaaatgttcctaatggttctaacttcgtgagtttacaatgttgtgattcatgcagggttaaagatgctttgtttttattttttaagtaccaaaattggtttcagaacactgataacactcagaaaaccacagtgtgttttcatatttggaactttgtaatagcgggagtagcagtagtccaaacctagtatagggaaaggataaaaataagtcaccttcaccaagagatgccaatgattaccaaacaacagacagttgccaaatactggtttctctttcccctgaaaatggcttttgttctcaaatgataagagagctaatacatttagctaatattctagctctctttattatggaacagatcttgatagatggtttaattttctcctaaagagaaataatcagttgagaatttgagaatgggttgtaattatcgctcacccattgggatggttcattgtttaaatatggcattttccccccttcagctgcaggttcctgagatttggtgcctgtgagctctgattgtaggaatgcatgtgacagtcccagtcctatggtaatgacttaggaggaatgcagataaaagtaccttgtaagataaatataaattggagttaggaatttcatgaacctcactatgaccaaaattaattttttgattcagtttgtctgtctgtctgtccttcccctctcttcttttttcagggtgaggtgctgtgtttcttatttcatacgagataaaacagagagaagttctctcttctccagcttgtccatttccccacttgaagaaaacttttgatatatatgccttactgagtacatgccccctttaatgttaacatgacttggagtaatttctgaggtttactgacaaacataaaaatccctttaattgtagtgtagttgttctataaaccatattttttcatgatgtggatattttcttctatttctttgtcttcatttaatttggtggtggtgaactttacttgctgattttcttttatttttcactgaatgaagtttgtgcttgaatgaagagtgtatcttaaaccccctttttttggacaggctgcacttggataaaataggcaccactgtgttgatatgtaattaaattcataactatttatgaatgtgaccattgttaaatttaattatagtgtatttctttcttgaatttcagtctgctgctttgtaaaaaataactgtaattgatatttcatttttaaaatttataaattccaatcattgtcattcaagttattagaaatgagtcacggcactaactcatggttctatactcattttaagaaattgtaaaggttgaggtgtatttggtgactttctctgagacacagatgaacgttggaaatagatgagaaatggatgcagaataatgcagatagtgatcccatgtttgttaattgccatcatggaagtcagagaattaaccaattaagtgacggtaactattttttgtataccttgttctttgtgatctataaaattaaactggataaaatgttaattgggggtagggaaaaagctttgttttaagatttctaagctaattattttaccgttttgttgaccttgtacacaagaatgagattaatctgtattatataagaaaagaactgataaatatttataaaatgacaaacttggaccacaggctttcttgaccttgtacagtatagtaaaaataccctttacttctgacattttaaggtcacgtcctatagtttgggggcccttttacttcaaaggtgtgtttctgccctcttttggttgtatcaaatttatttgaaaattgttttgtgctgtactttatgacttgtttccctatggtggtaaagaatgatgccatagtcagttttattgacattgttagatgaaagaaaagtagctgtcaacaaggggaaagtgaaattgagcaattcactgtttcaggatacttgaggatctttagtgtactgctgactctttttcttgttttgtctgccattcttgaaagtgcatcttgagagcccccatttgttgtgtagagatatagcagctgaagcaggacttcattccagatagctgtgtgcatttatgtcatgccaattactataacatttccaaagtatgaaaggtctttcaggcttatgcatgatattgtgggtgacttcatgccccagcctttctccccagcatacagtgagctgccttttggggagcaatgccatgataaggagcatacgtgcatgttttccgtactttcagaatagagtgccttagctaggccagaggctcgtattgtgtttctgctgaccaaagttgcatacacctgtaagaagtgtctttttaggttatggtattaaaaaagtcgtttcaggcttatcagataataattctcctatatttgaggggggcatgggataaaaagatttaataatacctggatagagaatgctaatgctgccttttgtgatcctttaatattatccatgcttttataaagtgcagtacacattttgacattgccacagtttacagtgtcattcttccacgaataggtaattgatagagtttatgggtcttagtcttaagggtaacagagtgaataccttccaaataaaaagctaaatattcctccttgtcattttaatgtcattattgaaatacttttaattctaattttcaaaagaaagctaaatgctgattgtggtttaggatgttacagtactaataccatcatgttatttattctaatatagaggcattgagaggaggggagtgtatgtctagagttaccccaattctaaataggtaccaaaagagtattgattatgacctggagcctgagctttgggagaatatacaaaggaaaaagcaggcatagtttccactttaaagggaagaagggactttaacatcctatgaatttgaaacatcctatgaatttgaaagtttcctaagtgttgttttcaaagaactggtttattttatagtcagtcaaaatgcatttggaatgtaccttgcttccataacagactttgactctatgacctatgaagaataaaaagataatctgaaggtgtttgagtcagaggctacttttcccctttatattttatatagaagcctatttgtaattcttcctcttcgttcttcacctgggtttcctcttatctacccaccacctaggacagaggctgcccactcaggtcttgccttgttgcccctagatgttgccacattcacatctccttgatggccttagatctcttgactagtcaaggactgggaacgtgccagggggaacaaagtaagcttgatgggctggaacttttgactttgggtccccaaacagccaaaaacagatacagaaatctttggttgtgtggatgcctgtgttcagagtggccttatcttgacctcagttctggatttaagtactctatagaaaatttgtgaagtcagaccagaattttctttgtcccatgaggtgtctttgtaagtcagcatgctcttgcttgaacaccctgtgggtgaataactttagtaagttagctgccagcattagaaccttccaggaagaattttaactagtatgctacatttgaagcactctgacatgtacatttaaagtgacagttttaaaagtaaaatggtgttaaatctctgaaacttgaacgtatgatgctctggacattttaggaagcttaagtaaatttctgattttcctttattgattatgtaacccacgtgatttgcatattttagtttttatgtttgacagtggtacaaatgactgacattggcaggcagttattgtagggtatatggttaatcacgattgtctaacttttccagagaaagtggtgatatgcttcttccttgcatggagctgtgggaattggatttgttggctcttcatttccagtgtttctacagtgcagaataaatgtaactttttaagcctgcatgctagtaatatgctttgctctttagtaaacaaatatgcaatagatagtaatctatctactttttttaaagcagggatctgctccctatctagacagatcttttaatgcattaatatttagagtagcaaaagaagttttgccatttgtagctctctcacaggtagcttaagcgagggggttgtgttgcatgtgcttagaaaggccaggatcccagaattggaaggtgccacatatacttttagaatattttaacaaaggcttgtctctaggaaaatccacttggactgcagcaggattgttctggtcttccacagaccattcacatggtctttctctccagagaatcattcttagaaagccaggctaaatcagagtagtgctgtttttaaagcaagtatattggatgatggctatagggtaccttaatgctgtgttgaaattggaagcagactgctcttcagcagcacatatactgcaactgaagttagagacagtactgaagacgagggagtagctaaatgctgtggatatttcatgtctgtttggctaatgtcttctcttgaggagtttctatgggtagcaattaaaattagaatttattttaaggtttttattaaaatatatacaatttgccataaattctagattctgatattcttgacaagcactttttgaatatctcaagagtaagttcttgacctggaacatatatagttagtacttgatgtcactaaccaagttgtagaaggagcctgttataattctgcaagatctgtgaatagcattataaatctggggcaggtgcctgtaatcccagcactttgggaagccaaggcaggtggattgcttgagcccaggagttcgacaccaacctgagcaacatggcgaaaccccgtctgtaataaaaatacaaaaaaattagctgggcatggtggcatgtgcctgtaatcccagttactggggaggctgaggcaggagaatcacttgaacctgggagatggagattgcagtgagcagagattgtgccactgcactccagccagagtgacagagcaagactccatctcaaaaaataataataaaaataaacaaatctgtttaaattactgttgcctttcagcattagactttgagtttaataactacaaattgagactgctcacaatattaactttttttgtaggttattttgttgtttagataacttgcctccctagaggagcattcaggagataaagacctagctacatgtaatgatatgatcatttcaaaaatgtgccaagaaagcaaaattcattattgaactctaaatttctgggtgtttttttttttaaagtagcattttctctgggtaaagggaaaggcaatgaatgattgccaacatgtaaactccctgctgcccgccttcccccagtcccctccatctaacataatacagtaaatttgtagccagttgtagaaaaagaaattgatatctttctgagtaaggtttcatgccctgtgactaagaataggtggaggaatcatggccaaatcaaatatgaattgtttagcttggtcctgttgcagttggctttctgtagtgttctgaaacaagaggacgattccattccttctcaggaacctagaaacaacaccgcttgagcaactggaatatgtttgctgcaagcagaatattttggggagaggaagagtagtttaattcaagtagtttaattgaacatattagtcattggtctgtctgggacgtgcagtgttcatagtagcaatgtatgtaccatttattttatctggttgtgtgtgatgtgtgtgtatgcctatttaatatgtacacatatattcactacatatgtatgtatgatatattcatatatacatgcagtctgcttgattatcagcaaaatggtcagcctttatcagatagtttcttcatgtggagttcatctgcatgtggcccttactctgaagcctcttcctgatctggagccacagtctgtctgtcttccagttcatctcagtcctcgagaaaggccctttaaatatgtcactttcccattttcctttaaccatgggttgtgtgagccagaaagagctttgagaaagatggctgcttccaccagggtggaggcttctaggtctgcatgatgatggggcccgtttctggccagagggtggctctgggagcagttgtgctgcgggcttgctgggggagaactctaactgttgcagaaacagagcttcatggcttgcttaaattacttagctggaatattttaaagtgtcagataatgtgatgtacaaagagagtatgccgatgcatttcattgtttttgcattatctgtatcagtgtttcccattgctagcccgaataatcaagaccagactgtttcttgtcactggattctggaagccttgccctttcaactggatttatgtttgtttctgctgctgtgaaaccccaaagtaatgcagtaggttttaattgaaaattgtttaattctattattgataattatttattgtaataaaagtaaaagagtaatttttaaatccttttaattgttt

SEQ ID NO: 228786 - DNA, 504 bp, Artificial Sequence
  derived and/or modified sequence
aaaggttaaagaaagagggaccaattaacttcaccttttcctaaacttgaaaagacaaaccaaattctgcccttcatctccaatgtttgaaagatcagaggttcctgtcaatacagtgctgtggataccaatccactttctctgtatgtcatgcatccattctggaacactatagtaaaggtatttcctacttggctggcgcccaatctgataactttttctggctttctgctggtcgtattcaattttctgctaatggcatactttgatcctgacttttatgcctcagcaccaggtcacaagcacgtgcctgactgggtttggattgtagtgggcatcctcaacttcgtagcctacactctagatggtgtggacggaaagcaagctcgcagaaccaattctagcactcccttaggggagctttttgatcatggcctggatagttggtcatgtgtttactttgttgtgactgtttattccatctttggaagaggatcaactggt

SEQ ID NO: 228787 - DNA, 1188 bp, Artificial Sequence
  derived and/or modified sequence
atggccggctatgaatatgtgtccccagagcagctggccggctttgacaagtacaagtacagcgctgtggacaccaaccccctgagcctgtatgtgatgcaccccttctggaacaccatcgtgaaggtgttccccacctggctggcccccaacctgatcaccttcagcggcttcctgctggtggtgttcaacttcctgctgatggcctactttgatcctgacttctacgccagcgcccctggccacaagcacgtgcctgactgggtgtggatcgtggtgggcatcctgaactttgtggcctacaccctggatggagtggatggcaagcaggcccggaggaccaacagcagcacccccctgggggagctgtttgaccacggcctggacagctggagctgtgtgtactttgtggtgacagtgtacagcatcttcggccggggcagcactggagtgtctgtgtttgtgctgtacctgctgctgtgggtggtgctcttctccttcatcctgagccactgggagaagtacaacacaggcatcctcttcctgccctggggctatgacatcagccaggtgaccatcagctttgtgtacatcgtgacagctgtggtgggcgtggaggcctggtatgagcccttcctgttcaacttcctgtacagagacctcttcaccgccatgatcatcggctgtgccctgtgtgtgaccctgcccatgagcctgctgaacttcttccgcagctacaagaacaacaccctgaagctgaacagcgtgtatgaggccatggtgcccctcttcagcccctgcctgctcttcatcctgagcacagcctggatcctgtggagccccagcgacatcctggagctgcaccccagggtcttctacttcatggtgggcacagcctttgccaacagcacctgccagctgattgtgtgccagatgagcagcacccgctgccccaccctgaactggctgctggtgcccctcttcctggtggtgctggtggtgaacctgggcgtggccagctatgtggagagcatcctgctgtacaccctgaccacagccttcaccctggcccacatccactatggagtgcgggtggtgaagcagctgagcagccacttccagatctaccccttcagcctgaggaagcccaacagtgatggcatggaggagaagaacatcggcctgtag

SEQ ID NO: 228788 - DNA, 357 bp, Artificial Sequence
  derived and/or modified sequence
atgcaccccttctggaacaccatcgtgaaggtgttccccacctggctggcccccaacctgatcaccttcagcggcttcctgctggtggtgttcaacttcctgctgatggcctactttgatcctgacttctacgccagcgcccctggccacaagcacgtgcctgactgggtgtggatcgtggtgggcatcctgaactttgtggcctacaccctggatggagtggatggcaagcaggcccggaggaccaacagcagcacccccctgggggagctgtttgaccacggcctggacagctggagctgtgtgtactttgtggtgacagtgtacagcatcttcggccggggcagcactggatag

SEQ ID NO: 228789 - DNA, 1194 bp, Artificial Sequence
  derived and/or modified sequence
atggccggctacgagtacgtgagccccgagcagctggccggcttcgataagtacaagtacagtgccgttgataccaacccactgagtctctacgtaatgcaccccttttggaatactatcgtgaaagtgttccctacatggctggcacccaacttaattaccttttccggtttcctcctggtcgtcttcaacttccttctcatggcctattttgacccagatttttacgcaagtgccccgggacacaaacacgtgcccgattgggtgtggatcgttgtcggcattctgaacttcgtcgcctataccctcgatggcgtggatggaaagcaggcacgccgcaccaactcaagtacccccttgggagaactctttgatcacgggctggattcctggtcgtgcgtatattttgtggttaccgtgtacagtatctttggacggggcagtaccggcgtaagcgtcttcgtcctttacctcttgttgtgggtggtgctctttagctttattctcagccactgggaaaaatataataccggcatacttttcctcccatggggctatgacatttctcaagttactatatctttcgtgtacatcgtcactgccgtggttggagtcgaagcatggtatgagcctttccttttcaattttttgtaccgtgacctcttcaccgccatgatcattgggtgcgctctgtgcgtgacactgcctatgtctctgttgaatttcttccgcagttataaaaacaatacactcaagcttaactctgtgtacgaagcaatggttccattattttcaccttgcctgttgtttatcctgagcacagcgtggatcctgtggtccccctctgatatactcgagctccacccccgggtcttctatttcatggtggggactgcattcgctaattctacctgtcaacttatcgtgtgccaaatgtcgtccacgcggtgtcccactctgaactggttactggtgcctctgttcctggtcgtgctcgtcgttaatctgggagtcgcctcttacgtcgaaagcatcttgctgtacacactcacaaccgctttcactctggcacatatccattatggagtaagagtggttaagcaacttagtagccatttccaaatctaccccttcagtctccgcaagcctaattctgattgactgggaatggaggaaaaaaatatcggcttgtag

SEQ ID NO: 228790 - DNA, 357 bp, Artificial Sequence
  derived and/or modified sequence
atgcaccccttctggaacaccatcgtgaaggtgttccccacctggctggcaccaaacctgattacatttagtggatttctgctcgttgtttttaattttctcctgatggcctatttcgatccggacttttacgcatccgctcctggccacaaacacgttccagactgggtgtggatagtcgtggggatccttaacttcgttgcatacactctcgatggcgtggacgggaaacaggccaggcgaacaaactcctccacccctctgggagagctctttgatcacggactggacagctggagttgtgtgtattttgtggtgacggtgtattcgatctttggtaggggctcaacaggctag

SEQ ID NO: 228791 - DNA, 1194 bp, Artificial Sequence
  derived and/or modified sequence
atggccggatacgaatacgtcagtccagaacagctggccggattcgacaagtataagtactctgccgtggataccaaccctcttagtctgtacgtgatgcacccattctggaacacaattgtgaaggtattccccacttggctagcccctaatttgattactttctccggattcctcctcgtggtctttaacttccttctcatggcctatttcgaccctgatttctacgcctctgccccaggccataaacatgtcccggactgggtctggatcgtggttggcattctgaatttcgtcgcttataccctggacggggttgacggcaagcaggctcgtaggaccaactcttcaactcccttgggggaactgtttgaccacggcttggacagctggtcctgcgtttatttcgtcgttactgtctacagcatattcggccgtggctcaactggtgtctccgtcttcgtgctgtatctactgttgtgggtggtcctgttctcattcatcttgtctcattgggagaaatataataccggaatcctgtttctaccatgggggtacgacatctcgcaggtgacaatctcattcgtgtatattgtgaccgccgtggttggcgttgaagcatggtacgaaccgtttctgtttaacttcctctacagggatctttttacagccatgattatcggctgcgccctgtgcgtgactttgcctatgtccctgctcaattttttccgatcgtacaaaaataatacattaaaattgaatagtgtgtacgaggccatggtccccctgttctccccatgtctgctattcatcctttctaccgcctggatcctctggagccctagcgacattttagagctgcacccgcgtgttttctacttcatggttggtacagcctttgccaactctacgtgtcaactgatcgtctgtcaaatgtccagcacccggtgcccaactttgaactggttgctcgtcccactttttctggtagtcctggtcgtcaaccttggcgtagcatcctatgtcgagagcatcctgctctatactctgacgaccgcttttacgctcgcccacatacactatggggtgagggtggtgaagcagctgagcagtcactttcaaatatatcctttcagtctgcggaagcctaattcggattgattagggatggaagaaaaaaatattggcctgtag

SEQ ID NO: 228792 - DNA, 357 bp, Artificial Sequence
  derived and/or modified sequence
atgcaccctttctggaacacaatcgtgaaggtcttccccacctggctagcacccaacttgataactttcagcggtttcttgctggtggtgttcaactttttgcttatggcctatttcgatccagacttctatgcctccgcccctggacacaaacacgtgcctgactgggtgtggattgtcgtcggtattcttaacttcgtcgcctacactctggacggtgttgatggcaagcaagcacggcgtaccaatagctccaccccactgggagagctgttcgaccatggattggattcttggtcatgcgtgtacttcgtggtgacagtgtattccatttttggcagaggatcaactgggtag

SEQ ID NO: 228793 - protein, 466 aa, Artificial Sequence
  derived and/or modified sequence
MAMDVTRSQAQTALTLVEQILAEFQLQEEDLKKVMRRMQKEMDRGLRLETHEEASVKMLPTYVRSTPEGSEVGDFLSLDLGGTNFRVMLVKVGEGEEGQWSVKTKHQMYSIPEDAMTGTAEMLFDYISECISDFLDKHQMKHKKLPLGFTFSFPVRHEDIDKGILLNWTKGFKASGAEGNNVVGLLRDAIKRRGDFEMDVVAMVNDTVATMISCYYEDHQCEVGMIVGTGCNACYMEEMQNVELVEGDEGRMCVNTEWGAFGDSGELDEFLLEYDRLVDESSANPGQQLYEKLIGGKYMGELVRLVLLRLVDENLLFHGEASEQLRTRGAFETRFVSQVESDTGDRKQIYNILSTLGLRPSTTDCDIVRRACESVSTRAAHMCSAGLAGVINRMRESRSEDVMRITVGVDGSVYKLHPSFKERFHASVRRLTPSCEITFIESEEGSGRGAALVSAVACKKACMLGQ

SEQ ID NO: 228794 - DNA, 1401 bp, Artificial Sequence
  derived and/or modified sequence
atggccatggacgtgaccagaagccaggcccagacagccctcactctggtggaacaaatcctggcggaatttcagttacaagaggaggatctgaagaaggtgatgcgcaggatgcagaaggagatggacagagggttacgcctggaaacccacgaggaggcctccgtgaagatgcttcctacatacgtccgaagcacaccggaggggtctgaggtcggtgatttcctctcccttgatctcggtggcaccaatttccgggttatgctcgtaaaagtcggagagggagaagagggtcagtggtctgtcaaaactaagcaccagatgtacagcattccggaggatgccatgaccggcacggccgagatgctgtttgattatatatccgaatgcatcagtgactttctcgacaaacaccagatgaaacacaagaagttgccactcggatttactttttctttcccggtgcgtcacgaagacattgacaagggtattctgctcaattggacaaaggggtttaaggcttctggagccgaaggaaataacgtggtgggcctgctgcgagacgcgattaagcgccgcggcgacttcgaaatggacgtcgtcgcgatggtgaatgacacagtagcgaccatgatttcctgctattatgaggaccatcagtgtgaagtgggaatgatcgtgggaaccggctgcaatgcctgttacatggaggagatgcagaacgtggaactggtggaaggcgacgagggacgcatgtgcgtgaataccgagtggggcgcttttggggatagtggggagttggacgaattcctgcttgagtatgataggttagtcgatgagagttctgccaatccggggcagcagttgtacgaaaagctgatcggcggtaagtacatgggagagctcgtacgattggtgctcctgcgcctggtcgacgagaaccttcttttccatggcgaagcttccgagcagctgcggacccggggggcgtttgaaacacgatttgtttctcaggtagagtcggacacaggcgataggaaacagatctataatattctttcgaccctcggactgagacctagcaccaccgattgtgatatagtgcggagggcttgcgaatctgtgagcacccgtgcagcccacatgtgctcggccggactggccggcgtgattaatagaatgagggagtcacgctccgaagacgtgatgagaataacagttggcgtggatgggtccgtgtacaaactgcatcctagcttcaaggaacggttccatgcatcagtgcgtagactaacaccaagctgcgaaatcactttcatcgaatctgaggaggggagcggtaggggggctgctctggtttctgcagtggcctgcaagaaagcttgcatgttaggacagtag

SEQ ID NO: 228795 - DNA, 2421 bp, Artificial Sequence
  derived and/or modified sequence
agtgcagaagccctgggctgccagcctcaggcagctctccatccaagcagccgttgctgccacaggcgggccttacgctccaaggctacagcatgtgctaggcctcagcaggcaggagcatctctgcctcccaaagcatctacctcttagcccctcggagagatggcgatggatgtcacaaggagccaggcccagacagccttgactctggtagagcagatcctggcagagttccagctgcaggaggaggacctgaagaaggtgatgagacggatgcagaaggagatggaccgcggcctgaggctggagacccatgaagaggccagtgtgaagatgctgcccacctacgtgcgctccaccccagaaggctcagaagtcggggacttcctctccctggacctgggtggcactaacttcagggtgatgctggtgaaggtgggagaaggtgaggaggggcagtggagcgtgaagaccaaacaccagatgtactccatccccgaggacgccatgaccggcactgctgagatgctcttcgactacatctctgagtgcatctccgacttcctggacaagcatcagatgaaacacaagaagctgcccctgggcttcaccttctcctttcctgtgaggcacgaagacatcgataagggcatccttctcaactggaccaagggcttcaaggcctcaggagcagaagggaacaatgtcgtggggcttctgcgagacgctatcaaacggagaggggactttgaaatggatgtggtggcaatggtgaatgacacggtggccacgatgatctcctgctactacgaagaccatcagtgcgaggtcggcatgatcgtgggcacgggctgcaatgcctgctacatggaggagatgcagaatgtggagctggtggagggggacgagggccgcatgtgcgtcaataccgagtggggcgccttcggggactccggcgagctggacgagttcctgctggagtatgaccgcctggtggacgagagctctgcaaaccccggtcagcagctgtatgagaagctcataggtggcaagtacatgggcgagctggtgcggcttgtgctgctcaggctcgtggacgaaaacctgctcttccacggggaggcctccgagcagctgcgcacacgcggagccttcgagacgcgcttcgtgtcgcaggtggagagcgacacgggcgaccgcaagcagatctacaacatcctgagcacgctggggctgcgaccctcgaccaccgactgcgacatcgtgcgccgcgcctgcgagagcgtgtctacgcgcgctgcgcacatgtgctcggcggggctggcgggcgtcatcaaccgcatgcgcgagagccgcagcgaggacgtaatgcgcatcactgtgggcgtggatggctccgtgtacaagctgcaccccagcttcaaggagcggttccatgccagcgtgcgcaggctgacgcccagctgcgagatcaccttcatcgagtcggaggagggcagtggccggggcgcggccctggtctcggcggtggcctgtaagaaggcctgtatgctgggccagtgagagcagtggccgcaagcgcagggaggatgccacagccccacagcacccaggctccatggggaagtgctccccacacgtgctcgcagcctggcggggcaggaggcctggccttgtcaggacccaggccgcctgccataccgctggggaacagagcgggcctcttccctcagtttttcggtgggacagccccagggccctaacgggggtgcggcaggagcaggaacagagactctggaagccccccacctttctcgctggaatcaatttcccagaagggagttgctcactcaggactttgatgcatttccacactgtcagagctgttggcctcgcctgggcccaggctctgggaaggggtgccctctggatcctgctgtggcctcacttccctgggaactcatcctgtgtggggaggcagctccaacagcttgaccagacctagacctgggccaaaagggcagccaggggctgctcatcacccagtcctggccattttcttgcctgaggctcaagaggcccagggagcaatgggagggggctccatggaggaggtgtcccaagctttgaatacccccagagaccttttctctcccataccatcactgagtggcttgtgattctgggatggaccctcgcagcaggtgcaagagacagagcccccaagcctctgccccaaggggcccacaaaggggagaagggccagccctacatcttcagctcccatagcgctggctcaggaagaaaccccaagcagcattcagcacaccccaagggacaaccccatcatatgacatgccaccctctccatgcccaacctaagattgtgtgggttttttaattaaaaatgttaaaagtttt

SEQ ID NO: 228796 - DNA, 1401 bp, Artificial Sequence
  derived and/or modified sequence
atggccatggatgtgaccaggagccaggcccagacagccctgaccctggtggagcagatcctggccgagttccagctgcaggaggaggacctgaagaaggtgatgaggaggatgcagaaggagatggaccggggcctgcggctggagacccatgaggaggcctctgtgaagatgctgcccacctacgtgcgcagcaccccagagggcagcgaggtgggggacttcctgagcctggacctgggcggcaccaacttccgggtgatgctggtgaaggtgggggagggggaggagggccagtggagcgtgaagaccaagcaccagatgtacagcatcccagaagatgccatgactggaacagctgagatgctgtttgactacatcagcgagtgcatcagtgacttcctggacaagcaccagatgaagcacaagaagctgcccctgggcttcaccttctccttccctgtgagacatgaggacatcgacaagggcatcctgctgaactggaccaagggcttcaaggccagcggggctgagggcaacaacgtggtgggcctgctgagagatgccatcaagagaagaggagactttgagatggatgtggtggccatggtgaatgacacagtggccaccatgatcagctgctactatgaggaccaccagtgtgaggtgggcatgattgtgggcaccggctgcaatgcctgctacatggaggagatgcagaatgtggagctggtggagggagatgagggccgcatgtgtgtgaacacagagtggggcgcctttggagacagcggggagctggatgagttcctgctggagtatgaccggctggtggatgagagcagcgccaaccctggccagcagctgtatgagaagctgattggaggcaagtacatgggagagctggtgcggctggtgctgctgcggctggtggatgagaacctgctcttccacggggaggccagcgagcagctgcggaccaggggggcctttgagaccaggtttgtgtcccaggtggagagtgacacaggagacaggaagcagatctacaacatcctgagcaccctgggcctgcggcccagcaccacagactgtgacatcgtgagaagagcctgtgagagcgtgtccaccagggctgcccacatgtgcagcgctggcctggccggggtcatcaacaggatgagggagagccgctcagaagatgtgatgaggatcaccgtgggcgtggatggctctgtgtacaagctgcaccccagcttcaaggagcgcttccacgcctctgtgcggcggctgacccccagctgtgagatcaccttcatcgagagcgaggagggcagcggccgcggggccgccctggtgtctgctgtggcctgcaagaaggcctgcatgctgggccagtag

SEQ ID NO: 228797 - DNA, 1401 bp, Artificial Sequence
  derived and/or modified sequence
atggccatggacgtgacccggagccaggcccagaccgccctgaccctagtcgagcagattctggcagagtttcagcttcaggaagaagatctgaaaaaagtgatgaggcggatgcagaaagaaatggatcggggcctgagactggagacccacgaggaagcctccgttaagatgctccccacatatgtacgttctacaccagagggctccgaggtgggggattttctctctctggatttaggcggaacaaattttagagttatgctggtcaaagttggggaaggagaggaagggcagtggagcgttaagaccaagcaccagatgtacagtatcccagaggatgccatgactggcaccgctgagatgctgtttgattacatttccgaatgtatctcagacttcctggacaagcaccagatgaaacacaagaagttgcccctcggctttaccttctcttttcccgttagacacgaggacatagacaagggaatcctgctgaattggacgaaaggcttcaaggcctccggtgctgaaggaaataatgtggtggggctgctgcgggatgcgatcaaacgcagaggcgacttcgagatggacgtggtcgcgatggtaaatgacactgtagctactatgatctcctgctactatgaggatcatcaatgtgaggtcggaatgatcgttggaacgggctgtaatgcctgctacatggaagaaatgcagaacgtcgagctcgtggaaggcgacgagggccgcatgtgcgtaaacaccgagtggggcgcctttggagattccggagaactggacgagttccttctggaatacgaccggttagtggatgagtctagtgctaacccagggcagcagctgtacgaaaagctgatcggcggtaaatatatgggcgagctcgtgaggctggtgctgctgcgtctggtcgacgagaatctcctctttcacggcgaggcatctgagcaactcagaacccgtggtgccttcgagactagattcgtttcccaggtggaatccgataccggtgatcgcaaacagatctataatattctgtcgaccttaggattgaggccgtctactaccgactgtgacatcgtgagaagagcctgcgaaagcgtcagcaccagagccgctcatatgtgtagcgcaggcttagctggggtgattaatagaatgagggagtcaagatcagaagacgtgatgcgaatcactgtgggcgtggacggatctgtgtacaagctgcatccaagcttcaaggaacgattccacgcgtcggtgcggaggctaacacctagctgcgagatcacctttatcgagtctgaagaaggctctggcaggggggccgctcttgtcagtgctgtcgcatgcaagaaagcatgtatgctcgggcagtag

SEQ ID NO: 228798 - DNA, 1401 bp, Artificial Sequence
  derived and/or modified sequence
atggctatggatgtaactagaagccaggcacagaccgccctcacgctcgtagaacagatcctggctgaatttcagctgcaggaggaggaccttaaaaaggtcatgaggaggatgcagaaagaaatggaccgaggcctccgactggaaacccatgaagaggcaagcgtaaagatgctaccgacctacgtcagatccacccccgagggttccgaggtaggcgactttctttcccttgacctgggcggtactaactttcgggtgatgctagtgaaggtgggagaaggggaggaaggtcagtggtcagtgaagaccaagcaccaaatgtactccatccccgaggatgcaatgaccgggaccgctgagatgctctttgactacataagcgaatgtatttccgattttttagacaagcaccagatgaaacataaaaagctgccgctggggtttaccttttccttccctgttcgccatgaagacattgacaagggtatcctgctgaactggacaaaaggctttaaggccagcggcgcagagggcaataacgttgtcggactcctgcgggacgccatcaaacgtcgcggtgacttcgaaatggatgtcgtcgcgatggttaacgacacggtggcaaccatgatttcatgctattatgaagaccatcagtgcgaggttggcatgattgtcggtacaggttgcaacgcctgttatatggaggaaatgcaaaacgttgagctcgtggagggggacgaaggcagaatgtgcgtgaacactgaatggggcgcattcggggacagcggagagctcgatgagtttttgttggaatacgacaggctcgtggacgaatcctccgccaatccaggacaacagctgtacgagaagctaatcggcggaaagtacatgggcgagttggtgaggctcgtcctgttacgcttggtcgacgaaaatctcctgtttcatggcgaggctagtgagcagttacgcacaaggggggctttcgagacccgctttgtctcacaggtggagtctgacaccggtgaccggaaacaaatttacaacatactgtctactttaggtttgcgcccatctaccacagattgcgatatcgtaaggcgagcgtgtgaaagtgtcagcacacgggcagcccacatgtgcagtgctgggctcgctggcgtgatcaacaggatgcgggagtcccgttcggaggacgtgatgagaatcacggtcggtgttgacggtagtgtgtataagctgcaccccagtttcaaggaacgattccacgccagtgtcagaagacttactccctcctgcgagatcacctttatcgaatcagaagaggggagcggcagaggagctgccctggtgagtgccgtggcttgcaaaaaggcatgcatgttaggccagtag

SEQ ID NO: 228799 - DNA, 1401 bp, Artificial Sequence
  derived and/or modified sequence
atggccatggacgtgaccagaagccaggcccagaccgccctgaccctggtggagcagatcctggccgagttccagctgcaggaggaggacctgaagaaggtgatgagaagaatgcagaaggagatggacagaggcctgagactggagacccacgaggaggccagcgtgaagatgctgcccacctacgtgagaagcacccccgagggcagcgaggtgggcgacttcctgagcctggacctgggcggcaccaacttcagagtgatgctggtgaaggtgggcgagggcgaggagggccagtggagcgtgaagaccaagcaccagatgtacagcatccccgaggacgccatgaccggcaccgccgagatgctgttcgactacatcagcgagtgcatcagcgacttcctggacaagcaccagatgaagcacaagaagctgcccctgggcttcaccttcagcttccccgtgagacacgaggacatcgacaagggcatcctgctgaactggaccaagggcttcaaggccagcggcgccgagggcaacaacgtggtgggcctgctgagagacgccatcaagagaagaggcgacttcgagatggacgtggtggccatggtgaacgacaccgtggccaccatgatcagctgctactacgaggaccaccagtgcgaggtgggcatgatcgtgggcaccggctgcaacgcctgctacatggaggagatgcagaacgtggagctggtggagggcgacgagggcagaatgtgcgtgaacaccgagtggggcgccttcggcgacagcggcgagctggacgagttcctgctggagtacgacagactggtggacgagagcagcgccaaccccggccagcagctgtacgagaagctgatcggcggcaagtacatgggcgagctggtgagactggtgctgctgagactggtggacgagaacctgctgttccacggcgaggccagcgagcagctgagaaccagaggcgccttcgagaccagattcgtgagccaggtggagagcgacaccggcgacagaaagcagatctacaacatcctgagcaccctgggcctgagacccagcaccaccgactgcgacatcgtgagaagagcctgcgagagcgtgagcaccagagccgcccacatgtgcagcgccggcctggccggcgtgatcaacagaatgagagagagcagaagcgaggacgtgatgagaatcaccgtgggcgtggacggcagcgtgtacaagctgcaccccagcttcaaggagagattccacgccagcgtgagaagactgacccccagctgcgagatcaccttcatcgagagcgaggagggcagcggcagaggcgccgccctggtgagcgccgtggcctgcaagaaggcctgcatgctgggccagtag

SEQ ID NO: 228800 - protein, 464 aa, Artificial Sequence
  derived and/or modified sequence
MPRPRSQLPQPNSQVEQILAEFQLQEEDLKKVMRRMQKEMDRGLRLETHEEASVKMLPTYVRSTPEGSEVGDFLSLDLGGTNFRVMLVKVGEGEEGQWSVKTKHQMYSIPEDAMTGTAEMLFDYISECISDFLDKHQMKHKKLPLGFTFSFPVRHEDIDKGILLNWTKGFKASGAEGNNVVGLLRDAIKRRGDFEMDVVAMVNDTVATMISCYYEDHQCEVGMIVGTGCNACYMEEMQNVELVEGDEGRMCVNTEWGAFGDSGELDEFLLEYDRLVDESSANPGQQLYEKLIGGKYMGELVRLVLLRLVDENLLFHGEASEQLRTRGAFETRFVSQVESDTGDRKQIYNILSTLGLRPSTTDCDIVRRACESVSTRAAHMCSAGLAGVINRMRESRSEDVMRITVGVDGSVYKLHPSFKERFHASVRRLTPSCEITFIESEEGSGRGAALVSAVACKKACMLGQ

SEQ ID NO: 228801 - DNA, 1395 bp, Artificial Sequence
  derived and/or modified sequence
atgccgcggccacggagccagctgccccagccgaattcgcaggtggaacagattctcgccgagttccagctgcaagaggaggacctgaagaaggtgatgaggagaatgcagaaggagatggaccggggcctgcgacttgagacgcatgaggaggccagcgttaagatgttacccacatatgttaggagcacccccgaagggagtgaagtcggagactttttgtctctcgacctcgggggcactaatttccgggtgatgctagtcaaagtgggcgagggcgaggagggtcagtggagcgtcaaaacaaagcaccagatgtactccattcccgaggatgccatgacgggaaccgcagagatgctgttcgattacattagtgagtgcatcagcgattttctcgataagcaccagatgaagcataagaaactccccctaggctttacgtttagtttccccgtccgacacgaggacattgataaaggcattctgctgaattggacaaaaggattcaaagccagcggagccgaaggtaacaacgtcgtggggctgctgagggacgcgattaaacggagaggcgattttgagatggatgtggtggcaatggttaacgacaccgtagcaacgatgatctcatgctactatgaagaccaccagtgtgaagtcggcatgattgtcggtaccgggtgtaatgcctgctacatggaagaaatgcagaacgttgaactggtcgaaggtgacgagggcaggatgtgcgtaaacactgagtggggggcatttggggactctggagagctggatgaatttctgttagaatatgatcggttggttgatgagtcttcagccaacccaggccagcagctctacgagaaactcattggaggaaagtatatgggcgagttagtgagactggttcttctccgcctggtggatgaaaatttactcttccacggcgaagcaagcgagcagctaagaactagaggtgccttcgaaacaaggttcgtctcccaagtcgaatctgataccggcgaccgtaagcaaatttataatattctctcaacccttgggctgcgtcctagcacaaccgactgtgacattgtcaggcgagcatgcgaaagcgtgtctactagggcagcccacatgtgctccgctggtctcgccggtgttatcaatagaatgagggaatctaggagcgaggatgtaatgagaatcacagtaggcgttgacggaagcgtgtacaagctgcatccttcatttaaagaaaggtttcatgctagtgttagacgactgacacctagctgcgaaatcacattcatcgagtccgaggaagggtcaggacgcggcgctgcgctggtgtcagccgtcgcgtgtaaaaaggcctgtatgctgggccagtag

SEQ ID NO: 228802 - DNA, 2539 bp, Artificial Sequence
  derived and/or modified sequence
aagccctgggctgccagcctcaggcagctctccatccaagcagccgttgctgccacaggcgggccttacgctccaaggctacagcatgtgctaggcctcagcaggcaggagcatctctgcctcccaaagcatctacctcttagcccctcggagagatggcgatggatgtcacaaggagccaggcccagacagccttgactctgccagactctcctctgaactcgggcctcacatggccaactgctacttggaacaaatcgccccttggctggcagatgtgttaacatgcccagaccaagatcccaactcccacaacccaactcccaggtagagcagatcctggcagagttccagctgcaggaggaggacctgaagaaggtgatgagacggatgcagaaggagatggaccgcggcctgaggctggagacccatgaagaggccagtgtgaagatgctgcccacctacgtgcgctccaccccagaaggctcagaagtcggggacttcctctccctggacctgggtggcactaacttcagggtgatgctggtgaaggtgggagaaggtgaggaggggcagtggagcgtgaagaccaaacaccagatgtactccatccccgaggacgccatgaccggcactgctgagatgctcttcgactacatctctgagtgcatctccgacttcctggacaagcatcagatgaaacacaagaagctgcccctgggcttcaccttctcctttcctgtgaggcacgaagacatcgataagggcatccttctcaactggaccaagggcttcaaggcctcaggagcagaagggaacaatgtcgtggggcttctgcgagacgctatcaaacggagaggggactttgaaatggatgtggtggcaatggtgaatgacacggtggccacgatgatctcctgctactacgaagaccatcagtgcgaggtcggcatgatcgtgggcacgggctgcaatgcctgctacatggaggagatgcagaatgtggagctggtggagggggacgagggccgcatgtgcgtcaataccgagtggggcgccttcggggactccggcgagctggacgagttcctgctggagtatgaccgcctggtggacgagagctctgcaaaccccggtcagcagctgtatgagaagctcataggtggcaagtacatgggcgagctggtgcggcttgtgctgctcaggctcgtggacgaaaacctgctcttccacggggaggcctccgagcagctgcgcacacgcggagccttcgagacgcgcttcgtgtcgcaggtggagagcgacacgggcgaccgcaagcagatctacaacatcctgagcacgctggggctgcgaccctcgaccaccgactgcgacatcgtgcgccgcgcctgcgagagcgtgtctacgcgcgctgcgcacatgtgctcggcggggctggcgggcgtcatcaaccgcatgcgcgagagccgcagcgaggacgtaatgcgcatcactgtgggcgtggatggctccgtgtacaagctgcaccccagcttcaaggagcggttccatgccagcgtgcgcaggctgacgcccagctgcgagatcaccttcatcgagtcggaggagggcagtggccggggcgcggccctggtctcggcggtggcctgtaagaaggcctgtatgctgggccagtgagagcagtggccgcaagcgcagggaggatgccacagccccacagcacccaggctccatggggaagtgctccccacacgtgctcgcagcctggcggggcaggaggcctggccttgtcaggacccaggccgcctgccataccgctggggaacagagcgggcctcttccctcagtttttcggtgggacagccccagggccctaacgggggtgcggcaggagcaggaacagagactctggaagccccccacctttctcgctggaatcaatttcccagaagggagttgctcactcaggactttgatgcatttccacactgtcagagctgttggcctcgcctgggcccaggctctgggaaggggtgccctctggatcctgctgtggcctcacttccctgggaactcatcctgtgtggggaggcagctccaacagcttgaccagacctagacctgggccaaaagggcagccaggggctgctcatcacccagtcctggccattttcttgcctgaggctcaagaggcccagggagcaatgggagggggctccatggaggaggtgtcccaagctttgaatacccccagagaccttttctctcccataccatcactgagtggcttgtgattctgggatggaccctcgcagcaggtgcaagagacagagcccccaagcctctgccccaaggggcccacaaaggggagaagggccagccctacatcttcagctcccatagcgctggctcaggaagaaaccccaagcagcattcagcacaccccaagggacaaccccatcatatgacatgccaccctctccatgcccaacctaagattgtgtgggttttttaattaaaaatgttaaaagtttta

SEQ ID NO: 228803 - DNA, 1395 bp, Artificial Sequence
  derived and/or modified sequence
atgccccggcccaggagccagctgccccagcccaacagccaggtggagcagatcctggccgagttccagctgcaggaggaggacctgaagaaggtgatgaggaggatgcagaaggagatggaccggggcctgcggctggagacccatgaggaggcctctgtgaagatgctgcccacctacgtgcgcagcaccccagagggcagcgaggtgggggacttcctgagcctggacctgggcggcaccaacttccgggtgatgctggtgaaggtgggggagggggaggagggccagtggagcgtgaagaccaagcaccagatgtacagcatcccagaagatgccatgactggaacagctgagatgctgtttgactacatcagcgagtgcatcagtgacttcctggacaagcaccagatgaagcacaagaagctgcccctgggcttcaccttctccttccctgtgagacatgaggacatcgacaagggcatcctgctgaactggaccaagggcttcaaggccagcggggctgagggcaacaacgtggtgggcctgctgagagatgccatcaagagaagaggagactttgagatggatgtggtggccatggtgaatgacacagtggccaccatgatcagctgctactatgaggaccaccagtgtgaggtgggcatgattgtgggcaccggctgcaatgcctgctacatggaggagatgcagaatgtggagctggtggagggagatgagggccgcatgtgtgtgaacacagagtggggcgcctttggagacagcggggagctggatgagttcctgctggagtatgaccggctggtggatgagagcagcgccaaccctggccagcagctgtatgagaagctgattggaggcaagtacatgggagagctggtgcggctggtgctgctgcggctggtggatgagaacctgctcttccacggggaggccagcgagcagctgcggaccaggggggcctttgagaccaggtttgtgtcccaggtggagagtgacacaggagacaggaagcagatctacaacatcctgagcaccctgggcctgcggcccagcaccacagactgtgacatcgtgagaagagcctgtgagagcgtgtccaccagggctgcccacatgtgcagcgctggcctggccggggtcatcaacaggatgagggagagccgctcagaagatgtgatgaggatcaccgtgggcgtggatggctctgtgtacaagctgcaccccagcttcaaggagcgcttccacgcctctgtgcggcggctgacccccagctgtgagatcaccttcatcgagagcgaggagggcagcggccgcggggccgccctggtgtctgctgtggcctgcaagaaggcctgcatgctgggccagtag

SEQ ID NO: 228804 - DNA, 1395 bp, Artificial Sequence
  derived and/or modified sequence
atgccccggccccggagccagctgccccagcccaacagccaggtggagcagatcttggcagagtttcagttgcaagaggaagacctgaaaaaggtcatgaggcggatgcagaaggagatggataggggcctccgcttagaaactcacgaggaggcttcagttaagatgcttcctacatacgttaggagtacccccgagggctctgaggtcggggacttcttaagccttgatcttgggggaactaacttccgtgtcatgctggtcaaggtgggcgagggcgaggaaggccagtggtctgtgaaaacaaagcaccaaatgtattccattcccgaggatgctatgactggaaccgcagaaatgttgttcgactacatttctgagtgcatatccgattttcttgacaaacatcagatgaagcataagaaattgccgttgggattcacattttcatttcccgtacggcatgaggatattgacaagggtatactcctaaactggacaaagggctttaaagcctccggcgccgagggaaataacgtggtggggctgttgcgcgatgcgattaaaagacggggcgacttcgaaatggacgtggtcgctatggtgaatgacaccgtcgctacaatgatctcatgttattacgaggaccatcaatgcgaggtgggaatgatagtagggacagggtgcaatgcatgctacatggaggaaatgcagaacgtcgagcttgtagagggggatgagggcaggatgtgtgtgaatactgaatggggggccttcggcgattcaggcgagctcgatgagttcctgctggaatacgaccgacttgtggatgagagtagcgccaaccctggtcaacagctgtacgagaaactgatcgggggcaaatacatgggagaattagtgcgtctggtgctcctgcggctggtcgacgagaacctccttttccacggggaagcctccgagcagttaaggaccaggggcgccttcgaaacgcggtttgtatctcaggtggaatctgatactggagacaggaagcagatctataacatcttgagcacactcggactccgcccctccaccacagattgtgatatcgttagaagagcatgcgagtctgtttcgacgagagcggcccacatgtgttccgcaggactagccggggtgattaaccggatgagagaaagtcgcagtgaggatgtcatgaggattaccgttggcgtggacggcagcgtctataagttacatccttcgttcaaggaaaggtttcacgctagtgtgaggagactgacgccatcctgcgagataactttcatcgagagtgaagaggggtccggccgaggggctgccctggtatccgctgtcgcctgtaagaaagcttgtatgctgggacagtag

SEQ ID NO: 228805 - DNA, 1395 bp, Artificial Sequence
  derived and/or modified sequence
atgccacgaccaagaagtcagctgccccaaccaaacagccaagtggaacagatcctggctgagtttcagctgcaggaggaggatttaaagaaagtcatgaggagaatgcaaaaagaaatggaccggggactgcggctcgaaacacatgaagaggccagtgtaaaaatgctcccaacctacgtaaggagtaccccggaggggagtgaggtgggagactttctcagcctggatctgggcggaacaaattttagagttatgctggtcaaagtcggcgagggtgaagagggccagtggtccgttaaaaccaagcatcaaatgtactctatacctgaggatgctatgactggaaccgctgagatgctgttcgactatattagcgagtgtataagtgattttctggacaagcaccagatgaagcacaagaagcttcccctcggattcaccttttccttcccagtacgccacgaggacattgacaaagggatcttgctcaactggaccaagggatttaaagcgtccggtgcagaaggaaataacgtggtaggcctgttacgcgacgcgattaaacgacgaggggatttcgaaatggacgtagtggcaatggtgaatgacactgtggcgacgatgatatcttgctattacgaggatcatcagtgtgaagttgggatgatcgttggcactggctgcaatgcttgctacatggaagaaatgcaaaacgtggaactggttgaaggtgatgaaggaagaatgtgtgtgaacaccgaatggggggcttttggtgacagtggggagttagacgagttccttcttgaatatgataggcttgtggacgagtcctccgcaaatcccggtcagcaactctacgagaaactgattggagggaaatacatgggagagctcgtgaggctggttctcttgcggttggtggatgaaaacttgctctttcatggagaggcctcggagcagctgcggaccaggggggcatttgaaacccgcttcgtgagtcaggttgagagtgatacgggtgacaggaaacagatctacaatatcctgtccaccctgggactgagaccgagcacaactgactgcgacattgtgaggagagcctgcgaatccgtgagcacccgtgcagcccatatgtgcagcgctggcctcgctggcgtgataaatagaatgcgtgagtctagatccgaggacgtgatgaggatcacagtgggggtcgacggctctgtgtacaaacttcacccatccttcaaagaacggtttcatgcctccgtccgaagactgacccccagttgtgaaataacgttcatagagtcagaggaaggatctggcagaggggcagccctggtttcggctgtcgcctgcaagaaagcttgtatgctgggccaatag

SEQ ID NO: 228806 - DNA, 1395 bp, Artificial Sequence
  derived and/or modified sequence
atgcccagacccagaagccagctgccccagcccaacagccaggtggagcagatcctggccgagttccagctgcaggaggaggacctgaagaaggtgatgagaagaatgcagaaggagatggacagaggcctgagactggagacccacgaggaggccagcgtgaagatgctgcccacctacgtgagaagcacccccgagggcagcgaggtgggcgacttcctgagcctggacctgggcggcaccaacttcagagtgatgctggtgaaggtgggcgagggcgaggagggccagtggagcgtgaagaccaagcaccagatgtacagcatccccgaggacgccatgaccggcaccgccgagatgctgttcgactacatcagcgagtgcatcagcgacttcctggacaagcaccagatgaagcacaagaagctgcccctgggcttcaccttcagcttccccgtgagacacgaggacatcgacaagggcatcctgctgaactggaccaagggcttcaaggccagcggcgccgagggcaacaacgtggtgggcctgctgagagacgccatcaagagaagaggcgacttcgagatggacgtggtggccatggtgaacgacaccgtggccaccatgatcagctgctactacgaggaccaccagtgcgaggtgggcatgatcgtgggcaccggctgcaacgcctgctacatggaggagatgcagaacgtggagctggtggagggcgacgagggcagaatgtgcgtgaacaccgagtggggcgccttcggcgacagcggcgagctggacgagttcctgctggagtacgacagactggtggacgagagcagcgccaaccccggccagcagctgtacgagaagctgatcggcggcaagtacatgggcgagctggtgagactggtgctgctgagactggtggacgagaacctgctgttccacggcgaggccagcgagcagctgagaaccagaggcgccttcgagaccagattcgtgagccaggtggagagcgacaccggcgacagaaagcagatctacaacatcctgagcaccctgggcctgagacccagcaccaccgactgcgacatcgtgagaagagcctgcgagagcgtgagcaccagagccgcccacatgtgcagcgccggcctggccggcgtgatcaacagaatgagagagagcagaagcgaggacgtgatgagaatcaccgtgggcgtggacggcagcgtgtacaagctgcaccccagcttcaaggagagattccacgccagcgtgagaagactgacccccagctgcgagatcaccttcatcgagagcgaggagggcagcggcagaggcgccgccctggtgagcgccgtggcctgcaagaaggcctgcatgctgggccagtag

SEQ ID NO: 228807 - protein, 417 aa, Artificial Sequence
  derived and/or modified sequence
MSGRSRGRKSSRAKNRGKGRAKARVRPAPDDAPRDPDPSQYQSLGEDTQAAQVQAGAGWGGLEAAASAQLLRLGEEAACRLPLDCGLALRARAAGDHGQAAARPGPGKAASLSERLAADTVFVGTAGTVGRPKNAPRVGNRRGPAGKKAPETCSTAGRGPQVIAGGRQKKGAAGENTSVSAGEEKKEERDAGSGPPATEGSMDTLENVQLKLENMNAQADRAYLRLSRKFGQLRLQHLERRNHLIQNIPGFWGQAFQNHPQLASFLNSQEKEVLSYLNSLEVEELGLARLGYKIKFYFDRNPYFQNKVLIKEYGCGPSGQVVSRSTPIQWLPGHDLQSLSQGNPENNRSFFGWFSNHSSIESDKIVEIINEELWPNPLQFYLLSEGARVEKGKEKEGRQGPGKQPMETTQPGVSQSN

SEQ ID NO: 228808 - DNA, 1254 bp, Artificial Sequence
  derived and/or modified sequence
atgtctggcagatcccgcggacggaaaagtagtcgagcgaagaatcgcgggaagggtcgcgccaaggccagagtccgtccagccccagacgatgcacccagagaccctgatccatcacagtaccagtccctcggagaagatacacaggcggctcaggtgcaggcaggggccggttggggtgggctggaggccgccgcctccgcacagctgttgcgcctaggcgaggaggccgcatgcagactgcctctcgattgcgggttggcactgcgggcgcgagctgccggcgaccatgggcaggcagctgcccggcctggccccggtaaagcagccagtctgtccgaacgtctggccgctgacacggtgttcgttggaactgccggtacagtggggagaccaaagaacgcacctcgcgttggtaatcgccgggggcccgccggcaaaaaggcccccgagacgtgcagtacagccgggcgtggcccccaggtgatcgccggagggcgccagaagaagggcgcagccggagaaaacacctccgtatccgccggcgaagaaaaaaaagaggagcgcgatgccggatcgggtccaccagcgactgaaggatctatggataccctggaaaacgtccagcttaagctggagaatatgaatgctcaagcagaccgggcttatctgagactgagcaggaagtttggtcagcttcggttgcagcacctcgagcgtagaaatcatcttattcaaaatatcccaggattttggggtcaagcatttcagaatcatccacagttggcctcattcctgaacagccaggagaaagaggtgttgagctacctgaattccctagaggttgaggagctcggcctcgccagactgggctataaaatcaagttttattttgacagaaatccttactttcagaataaagtactaataaaagagtatggatgcggtccttctggccaggtggtaagccggtccactcccatccagtggctgcccggccatgacctccaatctttatcgcaaggaaacccggagaacaaccgatcctttttcgggtggttctccaatcactcttcaatagaaagcgacaagatagttgaaattataaacgaagaactgtggcccaacccattgcagttttacctgctttctgaaggggcccgcgtagagaaggggaaagagaaagagggcaggcagggacccgggaagcagcccatggaaactacccagcctggagtgtctcagagcaattag

SEQ ID NO: 228809 - DNA, 1254 bp, Artificial Sequence
  derived and/or modified sequence
atgagcggccgcagccggggcaggaagagcagccgggccaagaacagaggcaagggccgggccaaggcccgggtgcggcctgccccagatgatgccccccgggaccctgaccccagccagtaccagagcctgggggaggacacccaggccgcccaggtgcaggccggggccggctggggcggcctggaggccgccgccagcgcccagctgctgcggctgggggaggaggccgcctgccgcctgcccctggactgtggcctggccctgcgggcccgggccgccggggaccacggccaggccgccgcccggcccggccctgggaaggccgccagcctgtctgagcggctggccgctgacacagtgtttgtgggcacagctggcaccgtgggccggcccaagaatgccccccgggtgggcaacagaagaggccctgctgggaagaaggcccctgagacctgcagcacagctggccggggcccccaggtgattgctgggggccggcagaagaagggagctgctggggagaacacctctgtgtctgctggggaggagaagaaggaggagagagatgctggcagcggccccccagccacagagggctccatggacaccctggagaatgtgcagctgaagctggagaacatgaatgcccaggccgaccgggcctacctgcggctgagcaggaagtttggccagctgcggctgcagcacctggagaggaggaaccacctgatccagaacatccctggcttctggggccaggccttccagaaccacccccagctggccagcttcctgaacagccaggagaaggaggtgctgagctacctgaacagcctggaggtggaggagctgggcctggcccggctgggctacaagatcaagttctactttgacaggaacccctacttccagaacaaggtgctgatcaaggagtatggctgcggccccagcggccaggtggtgagccgcagcacccccatccagtggctgcccggccatgacctgcagagcctgagccagggcaaccctgagaacaacagaagcttcttcggctggttcagcaaccacagcagcattgaaagtgacaagatcgtggagatcatcaatgaggagctgtggcccaaccccctgcagttctacctgctgtctgagggcgcccgggtggagaagggcaaggagaaggagggccggcagggccctgggaagcagcccatggagaccacccagcccggggtgtcccagagcaactag

SEQ ID NO: 228810 - DNA, 1254 bp, Artificial Sequence
  derived and/or modified sequence
atgagcggccggagccggggccggaagagcagccgggccaagaaccggggtaagggaagggccaaggcccgagtccgtcctgcacccgacgacgctcctcgggatcccgacccctcccaataccagtctctcggggaggatacacaggccgcccaggttcaggcaggagcgggctggggagggctcgaggcagcagcatctgctcagctcttacgtctcggcgaagaggctgcgtgtcgcctgcccctggactgtggtctggccctgagggcgagggccgccggggaccacggccaggctgctgcgagaccgggacccggaaaagcagcgtcattgtccgagcggttggctgccgacactgtgtttgtaggtaccgcaggtaccgtcggtcgacccaagaatgctcctcgagtcggaaataggaggggccctgccggcaagaaggcacccgagacctgctcaactgccggacggggccctcaggtgattgctggcggccgacagaagaagggggctgcgggagagaatacttcggtgtctgctggcgaggagaaaaaagaggaacgggatgcagggagcggccctcctgcgaccgagggctcaatggacacactcgaaaatgtgcagttaaagctggagaacatgaatgcccaagcagacagggcctatctgcggctgagccgaaaattcgggcagctccggctgcagcatcttgagcgaaggaatcacttaattcagaacatcccaggattctggggacaggcgttccagaaccacccacagttggcaagcttcctgaacagtcaggagaaggaagtcctttcatatctgaatagtctcgaggtcgaagaactgggactagcgcgcctgggttacaagatcaagttttattttgatagaaatccatacttccagaacaaagtgttgatcaaagagtatggctgcggtccctctggccaggtggtgagtcgcagtacgcctatccagtggttgcctggccacgacctgcagtccctctcacagggaaaccccgaaaataataggtcattctttgggtggttttcaaaccattcgagtattgagtccgataaaattgtggagatcatcaacgaggaactgtggcctaatccactgcagttttacctcctttcagaaggcgcccgggtggaaaagggaaaggagaaggaaggccggcagggacccgggaaacagcccatggagaccacacagcctggggtgagccaatctaattag

SEQ ID NO: 228811 - DNA, 1254 bp, Artificial Sequence
  derived and/or modified sequence
atgtcgggaagaagtcgagggcgtaagagctctcgagctaaaaaccgcggaaaaggccgtgctaaggccagggtccgtccagcccctgacgatgcacctagggaccccgatccctcacaatatcaaagcctgggcgaagacacccaggccgctcaggtacaagctggagcagggtggggtggcttagaggcagcggcaagtgctcagctgctgaggctgggcgaggaagcagcctgcaggcttccgctcgactgcggtctggcactacgggctcgggctgcaggcgaccacggacaagccgctgctagacccggtccgggtaaggccgcaagcttatctgagcgcctggcagcagacacagtttttgttggaaccgccggaacggtcggccgacccaagaatgccccaagggtgggcaatcgcagaggtcccgcagggaaaaaggctccagagacctgtagcacagcagggaggggaccacaggttattgcgggaggccgtcagaaaaaaggcgcagcgggagagaacacctctgtgtctgccggagaagagaaaaaagaggaacgggatgcaggatctgggcctcctgccaccgaaggttcaatggatacgctcgaaaacgtgcaattgaagttggagaatatgaacgctcaagcagatcgcgcttacctgagactcagcaggaagtttggtcagctaagactgcaacacctcgagcgaagaaatcatctgatccagaacatacctgggttctggggacaagcgttccagaaccatccccagcttgcttcgttcctgaactcgcaggagaaagaggttctgtcttacctgaactccctggaggtggaagagttgggtctggcaaggctcggctataaaataaagttctacttcgatcgcaacccatacttccagaacaaggtcctgatcaaggaatacgggtgtggcccatcaggtcaggtcgtgtctcgatctacccctattcaatggctgccgggacatgacctgcaatcactgtcacaaggcaatcccgaaaataaccgcagcttcttcggatggttcagtaatcactcatctattgaatcggataagatcgtcgaaattataaacgaagaactctggccgaatcccctgcagttctatttgttaagtgagggcgcaagggtagagaaagggaaggaaaaagagggcagacaaggaccaggtaaacagccgatggagaccacccagccaggggtaagccagagcaattag

SEQ ID NO: 228812 - DNA, 4460 bp, Artificial Sequence
  derived and/or modified sequence
gacgtcggcggttgccgtggagagacccgctcggtcccgaccgagagctggcgtcaggagccgcagggtcacagcgtgtctttgaagctgcctccgccgccaccatgagcggccgaagtcggggtcgaaagtcctcccgcgccaaaaaccggggcaaaggccgcgccaaagcccgagtccgccctgctccggacgacgccccgcgcgacccggacccttcacagtaccagagtctcggggaagacacccaggcggcacaggtgcaggctggcgcggggtggggtggcctggaagccgctgcgtccgcgcagctcctccggctcggggaggaggccgcctgccggctccccctggactgtggcctcgcgctgcgggcccgagctgcgggggaccacgggcaggccgcggccaggcccggcccggggaaggccgcatctctctcggagcgcctggccgcagacactgtcttcgtgggaacagcgggaaccgtgggaaggccgaaaaatgccccccgcgttggaaaccggcgtggccctgccgggaagaaggccccagaaacctgtagcaccgcggggagggggcctcaggtcatagctggtgggaggcagaagaaaggggcggcaggggagaatacctcggtgtcagctggggaggaaaagaaggaagagagggatgcagggtcggggcccccagcgacggaaggcagcatggatacgctggagaacgtgcagctgaagctggagaacatgaacgcccaggcggacagggcctaccttcggctctccaggaagtttgggcagttgcgactgcagcacttggagcgcaggaaccacctcatccaaaatatcccgggcttctgggggcaagcatttcagaaccatccccagctagcatcctttctgaatagccaagagaaagaggtactgagctacttaaacagcttggaagtggaagagctcggccttgccagattgggctacaaaatcaagttctacttcgatcgcaacccgtatttccaaaataaggtgctcatcaaggaatatgggtgtggtccttctggccaggtggtgtctcgttctactccaatccagtggctcccagggcatgatctccagtccctaagccagggaaacccagaaaacaaccgtagtttctttgggtggttttcaaaccacagctccattgagtctgacaagattgtggagataatcaacgaagaattgtggcccaatcccttgcagttctaccttttgagtgaaggggctcgtgtagagaaaggaaaggaaaaagaaggcaggcaaggtccaggaaagcagccaatggagactactcagcctggggtgagccaatccaactgatcctgcacaagtctccctgctacctcctgctgggctgctcctggttgactacatatttggctctctgccttctcttcatgttggcctctgtgtactatagaccctttggactttagttacaagaatatggcatttatgatcatgttcttttgcctcccatagcctcttgcttttctacgttagtgtcacatgttatgtgatcgcacccggactgttcatatgttaagcacacatactttagatgtgtgctccctgttatctacattgcctggaccttgttcttggctctggcctttcctacttgtctttaacatggacactcatgagtcatcctccaggacgaccagtgcatcctcaagctctgctccttcagggccagtgacttgctgggcttcgtgttcatgctggccatgcatgtcatctatgcaagcgtttccattgccactgcagaatgaagccagtgcacatggtattagtcatcagccagaacttcctgttctgtgggtctggggtcaccagctgagatgtcacctgctttatttctggctttggcctgtggtctgtgatacccatcctgcttgatgttctgcagaatggcacttgactgctgggcatgcatgaagttaagggcaagaaacagtatgccatgtgttctgtaccatcatgtgtctcttcttgcttctgggcccttctactggtgaactttcatcaagatctgcgccatgccgtgtcactatcaagccattaagttttgtctgggttgctgtcagccccagttggcttcctggtcaacaaggacctcaagaactgcctgtggaccgaggccccctaccagtgcatgagacacacacctaccctccccagctttccaggaaccctactggctgccagactgatgggcgggctggtatgtgtggacatgtgttcactgtcattatgctgtggctccaggtgagggtgaggactgggcctatatagaatccagataccattgtcaacttcccttattcccgtctaagatgtgagcagagtgccatagtaggggttctgggaagaggtatttctgatttgtgggcctctgcttgcttgacttcaggtcacttatacttcttattttgcttgcctgccttcatccctcatttcctccctctcattcttctttcctccctccctttcctggtagcctcctttcctcctcttctgccttccccttccttctttccttattcttttttattttgtttaaatagtaccacagagaaaacaactgaaaaaccacatttttctacatacagctggggaggtagctgagaacttggcactgcgcacacatactaggttgaaagagagttgaggaaaccagaaggccaagtggatctgctggcaaaccctgaacctgtctcctgcgcttgctctacagttctgaagttgaaaatccttttcatgcctagcatctgcttgagttataaaccccaaggcagccatgtcatagactagtgtttactcttgttttgactttgttttaatgcttcctaagacccaagtgcctcctgctgtttcctcctttgtggtagcctctggccatctggacctcaatccccagctttcccactttcagcagtcctttgctctctttgcttctacctcaaatagccccaggagtgggctttagtctccaatatggagcatctcaagcttctcctgggggatggggattgggatgggcagaatctgttttggatctccgggttatttccagtgggtgtaaaagcagagctgggcctttccctctcttatccctgagggtgggtaagaaggactgtatctacacctgttcttccctaccttctcttttgttagggaggcctcattctaagttcctcaagagagtccttggcttaaagctgtagcaagggtgtgctaggtgggggatttggagcaaaaccgtcgagtaggcatgatactggtatggagtgggcctgcaaaatcagacagaaatggcttgagaagccgcagggggagcatgcctgtctctcagtgatagagtatgggagggacctccctagcttggaaaatgagaattgaaggggttatgaacaaataggatgcctagttgaggatgttcccaaagttttgtccaatcttatcattagtagattttataagccacagagacaaaccagaaacggaataatgttactttggatgctttatttttttgttctaggtgtggctttgtacatgcagaagaatgctatatgctgcacattttgcctttaaagtcttacgactttccccattttagtctaatgggaagatacagatgtgcaagtctgcttttttgttttttgttattatttttttttttttgctctgtgttatggacattttcagacatgcacagaagtggagaggatggtccttggaccccatgtgtccatcacctagctgcatcacttatcagctatggtcaacctggtttcatctgtatctctctcttttcacctgtattgtttattgaaaatccaagacactatgccaatgcaaccgtgactactttgggagattggtagtctcttttgatggtgatagtgatggggtgcactatcataatcacatcaggtctgctttttgcttttaatgttaactaatgaagttccagagatgggccttagaaatgtgttttaagaattaacaaggagtctcaaaaagaaatgagagggatgcttcctttcccttgcatctacaaaacaagagagagactgttctgttgtaaaactctttcaaaaattctgatatggtaaggtacttgagacccttcaccagaatgtcaatctttttttctgtgtaacatggaaacttgtgtgaccattagcattgttatcagcttgtactggtctcataactctggttttggaagaataatttggaaattgttgctgtgttctgtgaaaataacctccccaaaataattagtaactggttgttctacttggtaatttgacaccctgttaataacgcaattatttctgtgttcttaaacagtataaatagttgtaagtttgcatgcatgatggaaaaataaaaacctgtatctctgtt

SEQ ID NO: 228813 - DNA, 1254 bp, Artificial Sequence
  derived and/or modified sequence
atgagcggcagaagcagaggcagaaagagcagcagagccaagaacagaggcaagggcagagccaaggccagagtgagacccgcccccgacgacgcccccagagaccccgaccccagccagtaccagagcctgggcgaggacacccaggccgcccaggtgcaggccggcgccggctggggcggcctggaggccgccgccagcgcccagctgctgagactgggcgaggaggccgcctgcagactgcccctggactgcggcctggccctgagagccagagccgccggcgaccacggccaggccgccgccagacccggccccggcaaggccgccagcctgagcgagagactggccgccgacaccgtgttcgtgggcaccgccggcaccgtgggcagacccaagaacgcccccagagtgggcaacagaagaggccccgccggcaagaaggcccccgagacctgcagcaccgccggcagaggcccccaggtgatcgccggcggcagacagaagaagggcgccgccggcgagaacaccagcgtgagcgccggcgaggagaagaaggaggagagagacgccggcagcggcccccccgccaccgagggcagcatggacaccctggagaacgtgcagctgaagctggagaacatgaacgcccaggccgacagagcctacctgagactgagcagaaagttcggccagctgagactgcagcacctggagagaagaaaccacctgatccagaacatccccggcttctggggccaggccttccagaaccacccccagctggccagcttcctgaacagccaggagaaggaggtgctgagctacctgaacagcctggaggtggaggagctgggcctggccagactgggctacaagatcaagttctacttcgacagaaacccctacttccagaacaaggtgctgatcaaggagtacggctgcggccccagcggccaggtggtgagcagaagcacccccatccagtggctgcccggccacgacctgcagagcctgagccagggcaaccccgagaacaacagaagcttcttcggctggttcagcaaccacagcagcatcgagagcgacaagatcgtggagatcatcaacgaggagctgtggcccaaccccctgcagttctacctgctgagcgagggcgccagagtggagaagggcaaggagaaggagggcagacagggccccggcaagcagcccatggagaccacccagcccggcgtgagccagagcaactag

SEQ ID NO: 228814 - protein, 663 aa, Artificial Sequence
  derived and/or modified sequence
MSWLSSSQGVVLTAYHPSGKDQTVGNSHAKAGEEATSSRRYGQYTMNQESTTIKVMEKPPFDRSISQDSLDELSMEDYWIELENIKKSSENSQEDQEVVVVKEPDEGELEEEWLKEAGLSNLFGESAGDPQESIVFLSTLTRTQAAAVQKRVETVSQTLRKKNKQYQIPDVRDIFAQQRESKETAPGGTESQSLRTNENKYQGRDDEASNLVGEEKLIPPEETPAPETDINLEVSFAEQALNQKESSKEKIQKSKGDDATLPSFRLPKDKTGTTRIGDLAPQDMKKVCHLALIELTALYDVLGIELKQQKAVKIKTKDSGLFCVPLTALLEQDQRKVPGMRIPLIFQKLISRIEERGLETEGLLRIPGAAIRIKNLCQELEAKFYEGTFNWESVKQHDAASLLKLFIRELPQPLLSVEYLKAFQAVQNLPTKKQQLQALNLLVILLPDANRDTLKALLEFLQRVIDNKEKNKMTVMNVAMVMAPNLFMCHALGLKSSEQREFVMAAGTANTMHLLIKYQKLLWTIPKFIVNQVRKQNTENHKKDKRAMKKLLKKMAYDREKYEKQDKSTNDADVPQGVIRVQAPHLSKVSMAIQLTEELKASDVLARFLSQESGVAQTLKKGEVFLYEIGGNIGERCLDDDTYMKDLYQLNPNAEWVIKSKPL

SEQ ID NO: 228815 - DNA, 1992 bp, Artificial Sequence
  derived and/or modified sequence
atgtcttggctgagctctagtcagggcgtagtcttgacggcctaccaccctagtgggaaggatcagaccgtcggcaactctcatgcgaaggcaggggaagaagccacatcttctcggaggtacggccagtacacgatgaaccaggagtcaaccacaataaaggtgatggagaagccaccattcgatcgctcaatcagccaggacagtcttgatgaactcagtatggaagattactggatcgaactggaaaatattaaaaagtcctccgagaactcccaagaagaccaggaggtggtggtcgtgaaagaaccagatgaaggagaactggaagaagagtggctcaaggaggccggcttgtctaatctgttcggggaatctgccggagatcctcaggagtcaatcgtgttcctgagtacattaactcgcacgcaggccgctgctgttcaaaagcgcgtggaaacggtgtcccagaccctacgcaagaaaaacaaacaataccagatccctgacgtgagggatatatttgcccagcagcgggagtcaaaggagactgcaccaggtggcactgaatcccaatcattaaggaccaatgaaaacaaatatcaagggcgcgatgacgaggcgtccaatttggtgggtgaggaaaaactcatccctcccgaggaaacgcctgccccggagaccgacatcaacttggaagtgagtttcgcagagcaggccctgaaccagaaggagtcctcaaaggagaaaattcagaaaagtaaaggtgacgatgctacactccccagcttccgccttccaaaggacaagactggcacgactcgcattggcgacctggctcctcaggacatgaagaaggtttgtcacctggctttgatagaattgacggcgctatacgatgtgcttggaattgaactgaagcaacagaaggcagtgaagattaaaacaaaagacagtgggttattttgcgtcccgctgaccgccctcctggaacaagaccagaggaaggtgcctgggatgcgcattccgctcatcttccagaagctgattagtcgaattgaggaaaggggactggagaccgaaggactcttacgcatcccgggagcagccatccggattaagaacttatgccaggagctggaagccaaattttacgagggcacatttaattgggagtctgtgaagcagcacgacgcggcctcactacttaagctgttcatcagggagcttcctcagcccctattaagcgttgaatacttgaaggccttccaggccgtccagaatctgcccacgaaaaaacagcagctgcaggcgctgaacctgctcgtcatcctcctgcccgacgctaatcgggatacgctcaaggccctgctggagtttttgcagcgcgtcatcgataataaggagaaaaacaaaatgaccgtgatgaatgtcgccatggttatggctcctaacctgttcatgtgccacgcactggggctgaagtcttcggaacaacgcgaatttgttatggccgccgggaccgctaacactatgcaccttctcatcaagtatcaaaagttactctggaccattccaaaattcattgtcaatcaggtgaggaagcagaacacagaaaaccataagaaggacaaaagggctatgaagaagcttctgaagaagatggcttatgatcgggaaaaatatgaaaagcaagataaaagcactaatgatgccgacgtgcctcagggggtgatccgcgttcaggcccctcacctgagcaaggtgtcaatggcgatccagttaacagaagagctgaaagcctccgacgttctcgcgcggttcctttctcaggagagcggtgtggcccaaacactcaaaaagggcgaagtgtttttatacgaaatcggcgggaacattggcgagagatgtctggacgacgatacatacatgaaagacctttaccagctgaatcctaacgccgagtgggtcattaaaagtaaaccactatag

SEQ ID NO: 228816 - DNA, 1992 bp, Artificial Sequence
  derived and/or modified sequence
atgtcctggctgagcagcagccagggcgtggtgctgacagcctaccaccccagcggcaaggaccagacagtgggcaacagccacgccaaggccggggaggaggccaccagcagcagaagatatggccagtacaccatgaaccaggagagcaccaccatcaaggtgatggagaagcccccatttgacaggagcatcagccaggacagcctggatgagctgtccatggaggactactggattgagctggagaacatcaagaagagcagcgagaacagccaggaggaccaggaggtggtggtggtgaaggagccagatgaaggagagctggaggaggagtggctgaaggaggccggcctgagcaacctgtttggagagagcgctggggacccccaggagagcatcgtgttcctgagcaccctgaccaggacccaggccgctgctgtgcagaagagggtggagaccgtgtcccagaccctgaggaagaagaacaagcagtaccagatcccagatgtgcgggacatctttgcccagcagcgggagagcaaggagacagcccctgggggcacagagagccagagcctgcggaccaatgaaaacaagtaccagggcagagatgatgaggccagcaacctggtgggggaggagaagctgatccccccagaggagaccccagcccctgagacagacatcaacctggaggtgtcctttgctgagcaggccctgaaccagaaggagagcagcaaggagaagatccagaagagcaaaggagatgatgccaccctgcccagcttccggctgcccaaggacaagacaggcaccacccgcatcggggacctggccccccaggacatgaagaaggtgtgccacctggccctgattgagctgacagccctgtatgatgtgctgggcatcgagctgaagcagcagaaggctgtgaagatcaagaccaaggacagcggcctcttctgtgtgcccctgacagccctgctggagcaggaccagaggaaggtgcccggcatgaggatccccctcatcttccagaagctgatcagcagaattgaggagcggggcctggagacagagggcctgctgcgcatccctggagctgccatccgcatcaagaacctgtgccaggagctggaggccaagttctatgagggcaccttcaactgggagagcgtgaagcagcatgatgctgccagcctgctgaagctgttcatccgggagctgccccagcccctgctgtctgtggagtacctgaaggccttccaggccgtgcagaacctgcccaccaagaagcagcagctgcaggccctgaacctgctggtgatcctgctgcctgatgccaacagagacaccctgaaggccctgctggagttcctgcagagggtgattgacaacaaggagaagaacaagatgacagtgatgaatgtggccatggtgatggcccccaacctcttcatgtgccacgccctgggcctgaagagcagcgagcagcgggagtttgtgatggccgccggcacagccaacaccatgcacctgctgatcaagtaccagaagctgctgtggaccatccccaagttcatcgtgaaccaggtgaggaagcagaacacagagaaccacaagaaggacaagagggccatgaagaagctgctgaagaagatggcctatgaccgggagaagtatgagaagcaggacaagagcaccaatgatgctgatgtgccccagggcgtcatccgggtgcaggccccccacctgagcaaggtgtccatggccatccagctgacagaggagctgaaggccagtgatgtgctggcccgcttcctgagccaggagagcggcgtggcccagaccctgaagaagggggaggtgttcctgtatgaaattggaggcaacattggagagcgctgcctggatgatgacacctacatgaaggacctgtaccagctgaaccccaatgctgagtgggtgatcaagagcaagcccctgtag

SEQ ID NO: 228817 - DNA, 1992 bp, Artificial Sequence
  derived and/or modified sequence
atgagctggctgagcagcagccagggcgtggtgctgaccgcctaccatccttcaggaaaggaccaaaccgtggggaatagtcacgccaaagccggagaggaagccaccagctcgcgtagatatggccagtacacaatgaaccaggagtcaaccacaataaaggtaatggaaaaacctccatttgatcggagtatctcccaagactccttagatgagctgtccatggaagattactggatagagcttgaaaatatcaaaaaaagcagtgagaattcccaggaagaccaggaagtagtggtcgtcaaagagcccgatgagggcgagctcgaggaggaatggctcaaagaggctgggctctccaacctgtttggcgaatcagccggggatcctcaggagtctatagtattcttgagcaccctgaccaggacccaggcggcagcagtgcagaaacgtgtggaaacggtttcacaaacgttgcggaagaagaacaagcagtaccagataccagatgtccgcgacatcttcgctcagcagagggaaagcaaagaaacagcccccgggggcaccgaaagccagtctctgcggaccaacgaaaacaagtatcaggggagagatgacgaagcgagcaatttggtcggcgaggaaaagctcatacctcccgaagaaaccccagcaccagagacggacatcaatctggaggtgtctttcgccgagcaggccctgaaccagaaggagagcagtaaggaaaaaatccagaagagcaaaggcgacgacgccacactcccatcctttcgtctccctaaagacaaaacaggaactaccaggatcggcgacctggctcctcaggacatgaaaaaggtgtgccacttggctctcatagagttgacagctctgtatgatgtgctggggatagaactgaagcagcagaaggcggtgaagattaaaaccaaggattcaggactgttctgcgtcccactcactgcacttctcgagcaagatcagagaaaggtgccgggcatgagaattcctctcatttttcagaaactgatttctcggatcgaagaacggggcctggaaaccgaaggtctgctccggattcctggtgcggctataaggatcaagaatctttgccaggaactggaagccaagttctacgagggaacctttaattgggagagcgtcaaacaacacgacgccgccagcctcttgaagcttttcattcgggagctgcctcagccacttctgtcagtcgagtacttgaaagcatttcaggctgtgcagaatctgcctaccaagaaacagcagttgcaggccctcaacctattggtcattctcttaccagatgcaaatcgagatactctcaaggccttgcttgaattcctgcagcgtgtcattgacaacaaagaaaaaaacaagatgaccgtcatgaatgttgctatggtgatggcaccaaatctgtttatgtgccatgccctcgggctcaagtcaagcgaacaacgcgagtttgtgatggctgccggaaccgctaacaccatgcatctattgatcaagtatcaaaaactcctgtggactatccctaagtttatcgtgaatcaggtgagaaagcagaatactgaaaatcataagaaggataaacgggcaatgaaaaaattattgaagaagatggcctatgatcgggaaaagtacgagaaacaggacaagtcaacgaatgatgctgatgtgcctcagggagtcatccgggttcaggctccccatctgagtaaggtctccatggccattcagctgaccgaagagttgaaagctagtgatgtgctggctaggttcctgtcccaggaaagtggcgtggctcagacattgaaaaaaggagaagtgttcctctacgaaattggtgggaatattggcgagcgatgcctcgatgatgacacatacatgaaagacctctatcagcttaatcctaatgcagagtgggtcatcaaaagtaaacccttgtag

SEQ ID NO: 228818 - DNA, 1992 bp, Artificial Sequence
  derived and/or modified sequence
atgtcttggctgagctcttctcaaggtgtggtgctgaccgcgtaccatcccagcggtaaggatcagaccgtcggaaacagtcacgccaaggccggagaggaggctacaagcagcagaagatatggacagtatactatgaaccaggaaagcactaccatcaaggtgatggagaaaccgcctttcgaccggtccatctcccaggacagcctggacgaactgagcatggaagactactggatcgagttggaaaatatcaaaaaaagttcagaaaactcacaggaagaccaggaagttgtcgtagtcaaggagcctgacgaaggcgaactagaggaagaatggttaaaggaagcaggcctaagcaacctatttggggagagtgctggcgaccctcaagagtccatcgtgtttctgtctactctgactcggacccaggccgctgccgtgcagaaacgcgtggaaactgtgtctcagacactgcgtaagaagaacaagcagtatcagataccagatgtgcgagatatcttcgcccaacagcgcgagtcaaaggagacggcgccaggagggacggaaagccagtcgctgcgcaccaacgaaaataagtaccaaggtcgcgacgacgaagcgtccaaccttgtgggggaagagaaactgatccctccagaagaaacccctgcccctgagactgacatcaatttggaagtttcattcgccgagcaggcgttgaatcagaaagaaagctccaaagagaagatccagaagtctaaaggggacgacgcgacactgccatccttccgacttcccaaggataagacgggtaccactcgaattggcgatttagcgccacaagatatgaaaaaagtgtgccatctggcactcatcgaactgactgctctgtacgacgtgctcggcatcgaactcaaacaacagaaggccgtgaaaataaaaacaaaggactccgggctgttttgcgtgcctctaaccgctctcttagagcaggatcagaggaaagtgccaggcatgaggataccactgatattccaaaagctgatcagccgcatagaggagcgtggattggaaaccgagggcctgctgagaatccctggagccgctattagaattaagaacctttgccaagaactggaagctaagttctatgaagggactttcaattgggaatccgtgaagcagcacgatgccgcttctctcctcaaactgtttattagggagctaccccagcctctcttatctgtggaatacctgaaggctttccaggcagttcagaacttgcccactaaaaaacaacagttgcaggcccttaatcttctagtgattcttttgcccgatgccaatagggacacactgaaggccctgctcgaattcctgcaacgcgtgatagacaacaaggagaaaaacaagatgacagttatgaatgttgccatggttatggctccgaacctgttcatgtgtcacgcactaggactgaaatcctcggaacaaagggaatttgtgatggctgccggtacagcaaatacgatgcacctgctgattaagtaccagaagctgctctggacaattcccaagttcatagtcaatcaggttagaaaacagaacacagaaaaccacaagaaggataaacgggctatgaaaaagctcttaaaaaaaatggcctatgatcgagagaaatatgagaagcaggataagagtacgaacgacgcagatgttccacagggagtgatacgggtgcaagcccctcacctgagcaaggtctcaatggctatccagctgactgaggagctaaaggcctctgatgtgttagcccgttttttgagtcaagagtctggcgtggctcagactctgaagaagggcgaagtgtttctgtatgagattggcggaaatatcggagagaggtgcctggatgacgacacttacatgaaggacctgtaccagctgaatcctaacgccgaatgggttattaaatcaaaacccctgtag

SEQ ID NO: 228819 - DNA, 3498 bp, Artificial Sequence
  derived and/or modified sequence
aatgctaatgagcgagttgccaggcgagacaggaacttctttccccttctctgtgtcaggatcgcagaaagtatgtcccttctctcaccatgagctggctctccagttcccagggagtggtactaacagcctaccaccccagcggcaaggaccagaccgtcgggaacagccatgcaaaggcaggggaggaagccacctcgagtcgcagatatggccagtacactatgaaccaggaaagcaccaccatcaaagttatggagaagcctccatttgatcgatcaatttcccaggattctttggatgaactatctatggaagactattggatagaactagaaaacatcaagaaatctagtgaaaacagccaagaagatcaagaggtggttgttgtcaaagagcctgatgagggagaattggaagaagagtggcttaaagaggccggtttatccaatctcttcggagagtctgctggagatccacaggaaagcattgtgtttttatcaacattgacgcggacccaggcagcagcagttcagaagcgagtagagacggtctcccagaccttgaggaaaaaaaacaaacagtaccagattcctgacgtcagagacatatttgctcaacagagagaatcaaaagaaacagctccaggtggcactgaatcgcagtcacttagaacaaatgaaaacaaataccaaggaagagatgacgaggcatctaaccttgttggtgaagagaagctgatcccacctgaggagacgcctgcccctgaaacagacatcaacctggaggtatcatttgccgagcaagcactcaatcagaaagagagctccaaggagaaaatccagaagagcaaaggcgatgatgccacattacctagtttcagattgccaaaagacaaaacgggtaccacaaggattggtgacctcgcaccccaggacatgaagaaagtttgccatttagccctaattgagctgactgccctctatgatgtattgggtattgagctgaaacaacaaaaagctgtgaaaatcaaaacaaaagattctggtcttttttgcgttccattgacagcgctattagaacaagatcagaggaaagtaccaggaatgcgaatacccttgatctttcaaaaactgatttctcgaattgaagagagaggtttggaaacagaaggcctcttacggatccctggagctgccattagaatcaagaatctttgccaagaactagaagcaaagttttatgaagggacttttaattgggaaagtgtcaaacagcatgatgccgccagcctgctgaagctcttcattcgggagttgccccagccactgctcagtgtggagtatctcaaagcctttcaggctgtccagaatcttccaaccaagaagcagcaactacaggctttgaaccttcttgtcatcctcctacctgatgcaaacagggacacactgaaggcccttcttgaatttctccaaagagtaatagataataaagaaaaaaataaaatgacagtcatgaatgtagcaatggtcatggccccgaatctctttatgtgtcatgcattgggattgaagtccagtgaacagcgagaatttgtaatggcagctgggacagcaaataccatgcacttattgattaagtaccaaaaacttctgtggacaattcccaagtttattgtaaaccaagtgaggaagcaaaacacggaaaatcataaaaaggataaaagagccatgaagaaattgctgaagaaaatggcttatgaccgagaaaaatatgaaaagcaagataagagtacaaatgatgctgacgttcctcagggagtgattcgagtgcaagctccccatctttcgaaagtttccatggcaatacagctaactgaagaactaaaagccagtgatgtacttgccaggtttctcagccaagaaagtggggttgcccagactctcaagaaaggagaagtttttttgtatgaaattggaggaaatattggggaacgctgccttgatgatgacacttacatgaaggatttatatcagcttaacccaaatgctgagtgggttataaagtcaaagccattgtagaagacttaacaagctgcagataaccatgtggacttctgtcataattcttgctgagtcaagagtgtaaataaaagaaatggcaggactcatattattcagttgtacccaagtatttaaaaatgactctcttaagccttaaaaagtcatagatttgtgctgctgccagaattatattaattattattaatgttattattagaaaaaaaatttctggagtgagagtaaagaggcttaattagtttgtgggcagttttcatatgctctgtgaaatgtgtccagatgtgacatagtttttttttttaatatgtggaaatgtcttctcttcccattcttttctcctaaaatcatatatactgtaatatatgctctctcacctctattacctcctcacatctaccctttcccagttaggtttgctttttgaccaaaaagataacaaataccaggtatggcaagttgtgaagacagcacattaaaacatacctaatttcacagtattcctgtcacgacagaatgttagtattcatctctttgaatcatttgctcaaataataacattccaccttttcctgctgtatcacaggaagtgatttgcattttttttcagttcatctgacttatgttcacagaaccgtatcagcgaccaagaaaataggactgtcagaagctgccagttattactgaaccattaaatacttatatactaagaataaataaaatatacccatgtgaaataataattggattatggataacaagagagtgaaagccaaagcactttctgtctactgtactcttctaaatggaattttaaaagtcatagctggctttacgtgttgtcattattagcattataaatatgcatgatagtataatccagtaatggttgaagaatgtattttacttaaagagggatttttttttttaagtcctgaataagtctactggaagaattattcttctgggtgaaaaagcttttgtttgtgttcttattttaaataatcggagtcaatttattaaaatgttcttgaaagtactattcccagggattttaatgcacaaaccatattgtgacaagagatgagcctctgtactgtaaataagaaatgaagtagagaaatgttaaatattttatgagtttagaatatagtaaataaaaggtgatgtaaatgaatgctgcacaaacggtgttcatgatacttttagtagtactttaggaaaaactacacattctcagaagctcttgatgtctctaatgaagggggggaatgctgttaatgagaacagtcataaatttttagcatataattacaagaacagcctgtggatatgatcacttaaatgattttgtggtgattcgtgccattgcttttttatttaaaagaaaattttgtaattaaatgcctttttctaaatt

SEQ ID NO: 228820 - DNA, 4260 bp, Artificial Sequence
  derived and/or modified sequence
tcgcagatatggccagtacactatgaaccaggaaagcaccaccatcaaagttatggagaagcctccatttgatcgatcaatttcccaggattctttggatgaactatctatggaagactattggatagaactagaaaacatcaagaaatctagtgaaaacagccaagaagatcaagaggtggttgttgtcaaagagcctgatgagggagaattggaagaagagtggcttaaagaggccggtttatccaatctcttcggagagtctgctggagatccacaggaaagcattgtgtttttatcaacattgacgcggacccaggcagcagcagttcagaagcgagtagagacggtctcccagaccttgaggaaaaaaaacaaacagtaccagattcctgacgtcagagacatatttgctcaacagagagaatcaaaagaaacagctccaggtggcactgaatcgcagtcacttagaacaaatgaaaacaaataccaaggaagagatgacgaggcatctaaccttgttggtgaagagaagctgatcccacctgaggagacgcctgcccctgaaacagacatcaacctggaggtatcatttgccgagcaagcactcaatcagaaagagagctccaaggagaaaatccagaagagcaaaggcgatgatgccacattacctagtttcagattgccaaaagacaaaacgggtaccacaaggattggtgacctcgcaccccaggacatgaagaaagtttgccatttagccctaattgagctgactgccctctatgatgtattgggtattgagctgaaacaacaaaaagctgtgaaaatcaaaacaaaagattctggtcttttttgcgttccattgacagcgctattagaacaagatcagaggaaagtaccaggaatgcgaatacccttgatctttcaaaaactgatttctcgaattgaagagagaggtttggaaacagaaggcctcttacggatccctggagctgccattagaatcaagaatctttgccaagaactagaagcaaagttttatgaagggacttttaattgggaaagtgtcaaacagcatgatgccgccagcctgctgaagctcttcattcgggagttgccccagccactgctcagtgtggagtatctcaaagcctttcaggctgtccagaatcttccaaccaagaagcagcaactacaggctttgaaccttcttgtcatcctcctacctgatgcaaacagggacacactgaaggcccttcttgaatttctccaaagagtaatagataataaagaaaaaaataaaatgacagtcatgaatgtagcaatggtcatggccccgaatctctttatgtgtcatgcattgggattgaagtccagtgaacagcgagaatttgtaatggcagctgggacagcaaataccatgcacttattgattaagtaccaaaaacttctgtggacaattcccaagtttattgtaaaccaagtgaggaagcaaaacacggaaaatcataaaaaggataaaagagccatgaagaaattgctgaagaaaatggcttatgaccgagaaaaatatgaaaagcaagataagagtacaaatgatgctgacgttcctcagggagtgattcgagtgcaagctccccatctttcgaaagtttccatggcaatacagctaactgaagaactaaaagccagtgatgtacttgccaggtttctcagccaagaaagtggggttgcccagactctcaagaaaggagaagtttttttgtatgaaattggaggaaatattggggaacgctgccttgatgatgacacttacatgaaggatttatatcagcttaacccaaatgctgagtgggttataaagtcaaagccattgtagaagacttaacaagctgcagataaccatgtggacttctgtcataattcttgctgagtcaagagtgtaaataaaagaaatggcaggactcatattattcagttgtacccaagtatttaaaaatgactctcttaagccttaaaaagtcatagatttgtgctgctgccagaattatattaattattattaatgttattattagaaaaaaaatttctggagtgagagtaaagaggcttaattagtttgtgggcagttttcatatgctctgtgaaatgtgtccagatgtgacatagtttttttttttaatatgtggaaatgtcttctcttcccattcttttctcctaaaatcatatatactgtaatatatgctctctcacctctattacctcctcacatctaccctttcccagttaggtttgctttttgaccaaaaagataacaaataccaggtatggcaagttgtgaagacagcacattaaaacatacctaatttcacagtattcctgtcacgacagaatgttagtattcatctctttgaatcatttgctcaaataataacattccaccttttcctgctgtatcacaggaagtgatttgcattttttttcagttcatctgacttatgttcacagaaccgtatcagcgaccaagaaaataggactgtcagaagctgccagttattactgaaccattaaatacttatatactaagaataaataaaatatacccatgtgaaataataattggattatggataacaagagagtgaaagccaaagcactttctgtctactgtactcttctaaatggaattttaaaagtcatagctggctttacgtgttgtcattattagcattataaatatgcatgatagtataatccagtaatggttgaagaatgtattttacttaaagagggatttttttttttaagtcctgaataagtctactggaagaattattcttctgggtgaaaaagcttttgtttgtgttcttattttaaataatcggagtcaatttattaaaatgttcttgaaagtactattcccagggattttaatgcacaaaccatattgtgacaagagatgagcctctgtactgtaaataagaaatgaagtagagaaatgttaaatattttatgagtttagaatatagtaaataaaaggtgatgtaaatgaatgctgcacaaacggtgttcatgatacttttagtagtactttaggaaaaactacacattctcagaagctcttgatgtctctaatgaagggggggaatgctgttaatgagaacagtcataaatttttagcatataattacaagaacagcctgtggatatgatcacttaaatgattttgtggtgattcgtgccattgcttttttatttaaaagaaaattttgtaattaaatgcctttttctaaattatcttctcttggaatcattacttttaatcctatgtgtttatgagtatttttgctttttttttattaatattgagaaatggacttttttgttattaaaagtcacctctattttctattttctttgtaatttttaaagtaggaagatgtcagagatgtaaatatgttttcgtctttagtttttttccttttacaaatttttattcttcaggattttcaaaatacagtttagtctgtttctttgacaatatgtattaatttcccaattagcaaaatggtacttattagtgggttgaaaacaattaataatataaaagaaaaattaagtgcttaaaacattttaggagtatacaacttcaaaaaaaaagatagcagtgaggataatgatttaagtaaaaggttgtctgaagcatatgccaactaaatttcgcaacgtttgctacctacctgaaaaggagggtcaggagggagacacaacatatttttgatcatgaaaaagtatcttaattttaaaaaagtgaaaatgccattttattttgaatcccttttagaactcacgacccaagttcatcaatgttgaataatatcacgtttaaataacaaaaaaatatggactttaaaaaatctcaaattttttagagacagggtcttgctctgttttccagattggagtacagcagtgcattcgcggctaactgcagcctcaagcactggggctcaagcaaacctcctgcctcagcctcgtgagtagctaggaccacaggtgcatgccaccatgcctggctctaaagagaaaaaaaacttgataccatagagccttgaatataaatatcctgatgttaacctactgcttttgctgtgattttttttccttagtgagttttaaatctcaggctagatttttatttgtttttctgtgtgtgtatgagacaaaataaaaataaatatatttgccttgagtttaaaa

SEQ ID NO: 228821 - DNA, 1992 bp, Artificial Sequence
  derived and/or modified sequence
atgagctggctgagcagcagccagggcgtggtgctgaccgcctaccaccccagcggcaaggaccagaccgtgggcaacagccacgccaaggccggcgaggaggccaccagcagcagaagatacggccagtacaccatgaaccaggagagcaccaccatcaaggtgatggagaagccccccttcgacagaagcatcagccaggacagcctggacgagctgagcatggaggactactggatcgagctggagaacatcaagaagagcagcgagaacagccaggaggaccaggaggtggtggtggtgaaggagcccgacgagggcgagctggaggaggagtggctgaaggaggccggcctgagcaacctgttcggcgagagcgccggcgacccccaggagagcatcgtgttcctgagcaccctgaccagaacccaggccgccgccgtgcagaagagagtggagaccgtgagccagaccctgagaaagaagaacaagcagtaccagatccccgacgtgagagacatcttcgcccagcagagagagagcaaggagaccgcccccggcggcaccgagagccagagcctgagaaccaacgagaacaagtaccagggcagagacgacgaggccagcaacctggtgggcgaggagaagctgatcccccccgaggagacccccgcccccgagaccgacatcaacctggaggtgagcttcgccgagcaggccctgaaccagaaggagagcagcaaggagaagatccagaagagcaagggcgacgacgccaccctgcccagcttcagactgcccaaggacaagaccggcaccaccagaatcggcgacctggccccccaggacatgaagaaggtgtgccacctggccctgatcgagctgaccgccctgtacgacgtgctgggcatcgagctgaagcagcagaaggccgtgaagatcaagaccaaggacagcggcctgttctgcgtgcccctgaccgccctgctggagcaggaccagagaaaggtgcccggcatgagaatccccctgatcttccagaagctgatcagcagaatcgaggagagaggcctggagaccgagggcctgctgagaatccccggcgccgccatcagaatcaagaacctgtgccaggagctggaggccaagttctacgagggcaccttcaactgggagagcgtgaagcagcacgacgccgccagcctgctgaagctgttcatcagagagctgccccagcccctgctgagcgtggagtacctgaaggccttccaggccgtgcagaacctgcccaccaagaagcagcagctgcaggccctgaacctgctggtgatcctgctgcccgacgccaacagagacaccctgaaggccctgctggagttcctgcagagagtgatcgacaacaaggagaagaacaagatgaccgtgatgaacgtggccatggtgatggcccccaacctgttcatgtgccacgccctgggcctgaagagcagcgagcagagagagttcgtgatggccgccggcaccgccaacaccatgcacctgctgatcaagtaccagaagctgctgtggaccatccccaagttcatcgtgaaccaggtgagaaagcagaacaccgagaaccacaagaaggacaagagagccatgaagaagctgctgaagaagatggcctacgacagagagaagtacgagaagcaggacaagagcaccaacgacgccgacgtgccccagggcgtgatcagagtgcaggccccccacctgagcaaggtgagcatggccatccagctgaccgaggagctgaaggccagcgacgtgctggccagattcctgagccaggagagcggcgtggcccagaccctgaagaagggcgaggtgttcctgtacgagatcggcggcaacatcggcgagagatgcctggacgacgacacctacatgaaggacctgtaccagctgaaccccaacgccgagtgggtgatcaagagcaagcccctgtag

SEQ ID NO: 228822 - protein, 1747 aa, Artificial Sequence
  derived and/or modified sequence
MDGPGASAVVVRVGIPDLQQTKCLRLDPAAPVWAAKQRVLCALNHSLQDALNYGLFQPPSRGRAGKFLDEERLLQEYPPNLDTPLPYLEFRYKRRVYAQNLIDDKQFAKLHTKANLKKFMDYVQLHSTDKVARLLDKGLDPNFHDPDSGECPLSLAAQLDNATDLLKVLKNGGAHLDFRTRDGLTAVHCATRQRNAAALTTLLDLGASPDYKDSRGLTPLYHSALGGGDALCCELLLHDHAQLGITDENGWQEIHQACRFGHVQHLEHLLFYGADMGAQNASGNTALHICALYNQESCARVLLFRGANRDVRNYNSQTAFQVAIIAGNFELAEVIKTHKDSDVVPFRETPSYAKRRRLAGPSGLASPRPLQRSASDINLKGEAQPAASPGPSLRSLPHQLLLQRLQEEKDRDRDADQESNISGPLAGRAGQSKISDPGPGPGGVGGAPLPPPGAPRSCIRIRARFPAPPAPPAPPPRGPKRKLYSAVPGRKFIAVKAHSPQGEGEIPLHRGEAVKVLSIGEGGFWEGTVKGRTGWFPADCVEEVQMRQHDTRPETREDRTKRLFRHYTVGSYDSLTSHSDYVIDDKVAVLQKRDHEGFGFVLRGAKAETPIEEFTPTPAFPALQYLESVDVEGVAWRAGLRTGDFLIEVNGVNVVKVGHKQVVALIRQGGNRLVMKVVSVTRKPEEDGARRRAPPPPKRAPSTTLTLRSKSMTAELEELASIRRRKGEKLDEMLAAAAEPTLRPDIADADSRAATVKQRPTSRRITPAEISSLFERQGLPGPEKLPGSLRKGIPRTKSVGEDEKLASLLEGRFPRSTSMQDPVREGRGIPPPPQTAPPPPPAPYYFDSGPPPAFSPPPPPGRAYDTVRSSFKPGLEARLGAGAAGLYEPGAALGPLPYPERQKRARSMIILQDSAPESGDAPRPPPAATPPERPKRRPRPPGPDSPYANLGAFSASLFAPSKPQRRKSPLVKQLQVEDAQERAALAVGSPGPGGGSFAREPSPTHRGPRPGGLDYGAGDGPGLAFGGPGPAKDRRLEERRRSTVFLSVGAIEGSAPGADLPSLQPSRSIDERLLGTGPTAGRDLLLPSPVSALKPLVSGPSLGPSGSTFIHPLTGKPLDPSSPLALALAARERALASQAPSRSPTPVHSPDADRPGPLFVDVQARDPERGSLASPAFSPRSPAWIPVPARREAEKVPREERKSPEDKKSMILSVLDTSLQRPAGLIVVHATSNGQEPSRLGGAEEERPGTPELAPAPMQSAAVAEPLPSPRAQPPGGTPADAGPGQGSSEEEPELVFAVNLPPAQLSSSDEETREELARIGLVPPPEEFANGVLLATPLAGPGPSPTTVPSPASGKPSSEPPPAPESAADSGVEEADTRSSSDPHLETTSTISTVSSMSTLSSESGELTDTHTSFADGHTFLLEKPPVPPKPKLKSPLGKGPVTFRDPLLKQSSDSELMAQQHHAASAGLASAAGPARPRYLFQRRSKLWGDPVESRGLPGPEDDKPTVISELSSRLQQLNKDTRSLGEEPVGGLGSLLDPAKKSPIAAARLFSSLGELSSISAQRSPGGPGGGASYSVRPSGRYPVARRAPSPVKPASLERVEGLGAGAGGAGRPFGLTPPTILKSSSLSIPHEPKEVRFVVRSVSARSRSPSPSPLPSPASGPGPGAPGPRRPFQQKPLQLWSKFDVGDWLESIHLGEHRDRFEDHEIEGAHLPALTKDDFVELGVTRVGHRMNIERALRQLDGS

SEQ ID NO: 228823 - protein, 1742 aa, Artificial Sequence
  derived and/or modified sequence
MDGPGASAVVVRVGIPDLQQTKCLRLDPAAPVWAAKQRVLCALNHSLQDALNYGLFQPPSRGRAGKFLDEERLLQEYPPNLDTPLPYLEFRYKRRVYAQNLIDDKQFAKLHTKANLKKFMDYVQLHSTDKVARLLDKGLDPNFHDPDSGECPLSLAAQLDNATDLLKVLKNGGAHLDFRTRDGLTAVHCATRQRNAAALTTLLDLGASPDYKDSRGLTPLYHSALGGGDALCCELLLHDHAQLGITDENGWQEIHQACRFGHVQHLEHLLFYGADMGAQNASGNTALHICALYNQESCARVLLFRGANRDVRNYNSQTAFQVAIIAGNFELAEVIKTHKDSDVVPFRETPSYAKRRRLAGPSGLASPRPLQRSASDINLKGEAQPAASPGPSLRSLPHQLLLQRLQEEKDRDRDADQESNISGPLAGRAGQSKISEPGAPRSCIRIRARFPAPPAPPAPPPRGPKRKLYSAVPGRKFIAVKAHSPQGEGEIPLHRGEAVKVLSIGEGGFWEGTVKGRTGWFPADCVEEVQMRQHDTRPETREDRTKRLFRHYTVGSYDSLTSHSDYVIDDKVAVLQKRDHEGFGFVLRGAKAETPIEEFTPTPAFPALQYLESVDVEGVAWRAGLRTGDFLIEVNGVNVVKVGHKQVVALIRQGGNRLVMKVVSVTRKPEEDGARRRAPPPPKRAPSTTLTLRSKSMTAELEELGEWRGREGSEKLDEMLAAAAEPTLRPDIADADSRAATVKQRPTSRRITPAEISSLFERQGLPGPEKLPGSLRKGIPRTKSVGEDEKLASLLEGRFPRSTSMQDPVREGRGIPPPPQTAPPPPPAPYYFDSGPPPAFSPPPPPGRAYDTVRSSFKPGLEARLGAGAAGLYEPGAALGPLPYPERQKRARSMIILQDSAPESGDAPRPPPAATPPERPKRRPRPPGPDSPYANLGAFSASLFAPSKPQRRKSPLVKQLQVEDAQERAALAVGSPGPGGGSFAREPSPTHRGPRPGGLDYGAGDGPGLAFGGPGPAKDRRLEERRRSTVFLSVGAIEGSAPGADLPSLQPSRSIDERLLGTGPTAGRDLLLPSPVSALKPLVSGPSLGPSGSTFIHPLTGKPLDPSSPLALALAARERALASQAPSRSPTPVHSPDADRPGPLFVDVQARDPERGSLASPAFSPRSPAWIPVPARREAEKVPREERKSPEDKKSMILSVLDTSLQRPAGLIVVHATSNGQEPSRLGGAEEERPGTPELAPAPMQSAAVAEPLPSPRAQPPGGTPADAGPGQGSSEEEPELVFAVNLPPAQLSSSDEETREELARIGLVPPPEEFANGVLLATPLAGPGPSPTTVPSPASGKPSSEPPPAPESAADSGVEEADTRSSSDPHLETTSTISTVSSMSTLSSESGELTDTHTSFADGHTFLLEKPPVPPKPKLKSPLGKGPVTFRDPLLKQSSDSELMAQQHHAASAGLASAAGPARPRYLFQRRSKLWGDPVESRGLPGPEDDKPTVISELSSRLQQLNKDTRSLGEEPVGGLGSLLDPAKKSPIAAARCRSPMVGLRLFSSLGELSSISAQRSPGGPGGGASYSVRPSGRYPVARRAPSPVKPASLERVEGLGAGAGGAGRPFGLTPPTILKSSSLSIPHEPKEVRFVVRSVSARSRSPSPSPLPSPASGPGPGAPGPRRPFQQKPLQLWSKFDVGDWLESIHLGEHRDRFEDHEIEGAHLPALTKDDFVELGVTRVGHRMNIERALRQLDGS

SEQ ID NO: 228824 - DNA, 5244 bp, Artificial Sequence
  derived and/or modified sequence
atggatggacctggagcctccgccgtcgttgtgagagtgggtataccagatctgcagcaaaccaagtgcttgcggcttgaccctgcagctcctgtctgggctgcgaagcaacgcgtcttgtgcgcattaaatcacagtctgcaggatgctctcaattacgggctgttccaaccaccatctcgaggcagggcagggaaattcttagatgaagagcgactgctccaggagtacccgcccaatctagatactccattgccctatctcgagttcagatataaacggagggtatatgcccagaacctgatagatgacaaacagttcgctaaattgcataccaaggccaatctgaagaagttcatggattacgtgcagcttcactccaccgacaaagtggcacgcctcttggataaggggctcgatcccaacttccatgacccagattcaggagagtgccccctcagtctcgccgcccagctggacaacgctacggatctgctgaaggttctgaagaacggtggagctcacctcgattttcgaactcgggatggccttaccgccgtccattgcgcaaccagacaacgcaatgctgcagcactcacaactctgctggacctcggtgcttccccggattacaaggactctcgcggtttgaccccactgtatcacagcgccctcggcggcggagacgccctgtgttgcgagttactcctgcatgaccatgcgcagctcggaatcactgatgagaacggttggcaggagattcatcaagcttgccgattcggccacgtccagcacttggagcatctgctgttttacggcgctgatatgggtgctcagaatgcctccgggaacacagcgctccacatctgtgctctgtataaccaggagagttgtgcccgtgttctactcttccgcggggcgaatagggacgtgcggaactacaactcccaaacagcttttcaggtggctattatcgccggcaactttgagctagcagaagtcatcaagacacataaggactctgatgtcgtgccttttcgggaaacaccttcttatgctaagcgacggcgcctggccggcccttcaggcctggcgtcgccacgtcctctccagagatccgccagcgacatcaaccttaagggcgaggctcaaccggccgctagccctggtccatctctgcggtcccttcctcaccagttgttattacagaggctccaggaggagaaggatcgtgacagagatgccgatcaagaatcgaacattagcggaccattagccggccgcgccggccagagtaagatttcagacccagggcctggacctggaggtgtcggaggagccccactcccgccaccaggagcgccacgttcttgtatccgtatccgggcacgcttcccagctccacctgctccccctgcgcctcctccaagagggcccaagaggaaattatactccgctgtgcccggtagaaagttcattgcagtgaaagcccattctccccaaggggaaggggaaatcccactgcaccggggcgaggcagtgaaagtgctgagcatcggcgagggcggcttctgggaaggcacagtgaaaggacggaccggatggttccccgccgattgtgtagaggaggtgcagatgagacagcatgacactcgtccggaaacgagagaggaccgaacaaaacggctcttcagacactacactgtgggatcctatgattcactcacatcacacagcgattacgtgatcgacgataaggtggccgtgctacagaagagggaccacgaaggctttggctttgtgctgcgcggtgcgaaggccgaaactccaattgaagaattcactccaacgccagcctttccagccttgcagtacctggagagcgtcgacgttgagggggtcgcgtggcgagctgggctgcggactggcgacttcctgatcgaggtgaatggggtgaacgtcgtgaaagttggacacaaacaggtcgtggcattgataaggcagggtggcaacagactcgtgatgaaggtagtcagcgttacaaggaagcctgaagaggacggagctcggcgtcgggcaccaccacctcccaaacgcgcaccttcaactacactgaccttgcggtcgaagtcaatgaccgcggagctggaagagttggcgagcatccgaaggcgtaaaggggagaaactggacgagatgctcgccgccgcggccgaaccaacattgcgcccggacatcgcagacgcagactcacgcgctgctacggtcaagcagcggcctacatctcgtaggataacacctgctgagataagtagtctgttcgagaggcagggactccccggaccagaaaagctcccaggaagcttacgtaagggaattcccagaactaagtctgtcggagaggatgagaagttagcatcccttctcgagggcagatttcccagatctacctcgatgcaggatcctgtccgggagggcagaggcatccccccccctccacagaccgcaccaccacctccaccggccccatattacttcgactccggacctccacctgcgttcagccctcctccccctcctgggcgggcatacgatactgtcagaagcagtttcaagcccggccttgaagcacgactgggggctggtgcagccgggctctacgaacctggcgccgcgttaggtcctcttccctaccccgagcgacagaagagagctaggtccatgataatattgcaggactcagcccccgagtccggagacgcgccgcggccccctcccgctgcgacccctccagaaaggcccaagagaagaccacgaccccccggtccagacagtccttacgccaatttaggggctttctcggccagtctattcgctccttccaaaccacagcgtcggaagtctccactggtgaagcaactgcaggtagaggacgcacaagaacgggcagcccttgccgtcggctcaccagggccaggtggaggatcatttgccagagagccaagtccaacccatcgcgggccaagacccggagggcttgactatggcgccggcgacggaccaggactcgctttcggcggtccaggtccggccaaagacaggcggcttgaagaacgcagaagatccaccgtgttcttaagcgtgggggccattgagggttctgcaccaggggcagacctgccttccctccagccctctcgcagcattgacgaacggttacttggaacgggtccaactgccgggagagacctgttgctgcccagcccagtgagcgcgctgaagcccctagtttccggaccttctctgggacctagtgggtccacgttcatccaccctctcaccggcaaacccctggacccttcctctcctctagccctggccctcgcggccagagagagagctctggcatcgcaggcaccctctcgctccccaacaccggtgcactcccccgacgccgatagacctggtcctctctttgtcgacgtgcaggccagagacccagaacgagggagtctggcctcacctgcattctctcctagaagcccagcctggatcccggtgcccgccaggcgggaagcagaaaaggtccccagggaggagagaaagtcaccagaagataagaaatcgatgatcctatccgtgcttgacaccagtctgcagcggccagcgggacttattgtggtccatgccacctctaatggccaagagcccagccggctgggtggggcagaggaggaacggcccggcacaccggaacttgcaccggcaccaatgcagtcagccgccgtcgccgaaccattgccttccccccgcgcccagccccccgggggaacaccagccgatgcagggccggggcagggtagttcagaggaggaacctgagctggtcttcgccgtgaacctccctcccgcccaattgagctcctccgacgaggagacaagggaagagttagcccgcattggccttgtgcctcctcccgaagaattcgcaaatggagtgttgttggctacacccctggctggacccggcccaagtcctaccacagttccaagtcccgccagcggaaaaccctcctctgagccccctccggcccctgagtctgccgctgactccggcgttgaagaggctgatacccggagttcatccgatccacacctggagactacttccacaattagcaccgttagctccatgtctaccctttcctccgaatctggcgagctgacagatacacataccagcttcgccgacggccatacatttctcctcgagaaaccccctgtccctcccaagcccaagctcaagtctccattagggaaaggcccggtcacttttagggatcctctcttaaaacagagctccgacagtgagctaatggcccagcagcatcacgccgcatccgcagggctggcatccgctgccgggcccgcccggccacgctacttgttccagcgccgctcaaaactgtggggggatcctgtggagtctcgaggccttccaggacctgaggacgataagcctaccgtgatttccgaactgagctctagactgcaacaactgaataaagatactcgcagccttggcgaggagcccgtggggggtttgggctcactcctggatcctgcaaagaagtcaccaattgcggcagcacggcttttttccagcttgggagaattgtcttccatatccgcacagaggagcccgggggggccaggtgggggcgcaagttattcagtgcggccgagtggcagatatcccgtcgctcgacgcgccccatcaccggtaaaacctgcaagcctagagcgcgtggaaggtctaggagcaggggccggcggggcgggacgccccttcggcctcacacccccaaccatcctgaaatcttcgagcctgtcgattccgcacgaaccgaaagaggttcgcttcgttgtgagaagtgtttccgctcgttcaagatccccaagcccctccccgcttccttcccctgcaagtggaccgggcccaggcgcaccaggaccgcggcgtccattccagcagaaacccttacagctgtggtctaagtttgatgtcggtgattggctggaaagtatccacctgggagagcaccgagatcgcttcgaagaccacgagatcgagggagcacatcttcccgcactgaccaaagatgactttgtcgagttgggcgtcacccgggtgggacatagaatgaatatcgagagggctctccggcagttggacggatcatag

SEQ ID NO: 228825 - DNA, 5229 bp, Artificial Sequence
  derived and/or modified sequence
atggacggaccaggcgctagcgccgtggtggtcagggtagggataccagacctgcagcaaactaaatgtttgcgcctggatcctgccgccccagtgtgggccgccaagcagcgggtgctttgcgcattgaatcacagtctccaggatgcactcaattatgggttattccagcctcctagtcgtgggcgggcaggtaagttcctcgacgaagaaaggctcctccaagagtatccccctaacctggacactcctctgccgtacctggaatttcggtataagcggagggtgtacgcccagaatttgattgacgacaagcaattcgcaaaacttcacaccaaggctaatctgaaaaagttcatggactacgtgcagctgcatagcacagacaaagttgcaagactactggacaagggactcgaccccaacttccatgaccccgattctggagagtgtccattaagcctcgctgctcaactggataatgctaccgaccttctgaaagtgttgaagaacggaggtgcacacctggattttcggaccagagacggccttaccgcggtgcactgcgcaacccggcagagaaatgcagcagccttgacaactctcttagacctgggagcctctccagactataaggactctcgaggcctcacccccctgtaccattcagccctgggtggcggcgacgcactgtgctgtgaattgctgctgcacgaccacgcccagctgggaatcacagatgagaatgggtggcaggaaatccatcaagcttgcaggtttggccatgttcagcatttggagcatctgctcttctacggcgctgatatgggcgcccagaacgcatccgggaataccgctctgcacatatgcgcactatacaatcaggagtcttgtgcccgcgtgctactctttagaggggccaacagagacgtccggaactataacagtcagacagcatttcaggtggctattatcgctgggaacttcgagctggccgaagttatcaagacccacaaggattctgacgtggttccgttcagagaaactcccagttacgccaaacgccgacgcttggccggcccatctgggttggcatcccctagaccactgcagagatccgcgagcgacatcaacctaaaaggagaagctcagccggctgcctctccgggcccaagtttaaggtcactgcctcaccaactccttctgcagaggctgcaagaggagaaggatagggaccgagacgccgatcaggaaagtaacatcagtggcccgctggctggccgcgccggccaaagcaagatttccgaaccaggagccccgcgatcatgtattcggataagggctcgctttcctgcaccccccgcacctcccgcgcctcctcccaggggtccgaaacgcaagctgtactccgccgtcccaggccggaagtttatcgcggttaaagcccattctccccagggcgaaggcgagatccctctccaccgaggagaggcggtcaaggttctgtcaatcggggagggcggcttctgggaggggaccgttaagggacggacgggttggttcccagctgattgcgttgaggaggttcaaatgaggcaacacgacacacgcccagagaccagagaagataggactaagagactgttcaggcattacaccgtggggtcatatgactcactcactagccactccgattacgtgatcgacgataaagtggcagtgctgcaaaagcgggaccatgagggcttcgggttcgtgctacgcggggcaaaggctgagaccccgatcgaagaatttactccaaccccggctttccccgccttacagtacctagaaagtgtggacgtggagggtgtggcctggcgggctgggttgaggactggtgattttctgattgaggtaaacggcgtgaatgtggtcaaggttggacacaaacaagtggtggcattaattaggcaaggaggaaaccggctcgtgatgaaggtcgtatcagtgacccggaaacccgaggaggacggggcaaggaggcgagccccacctccacccaaacgggctccaagtacaacgctgactctgcgctcaaaatctatgactgccgaacttgaggagctgggcgaatggcgtggtcgagagggaagcgagaagctagacgagatgctcgcagcagccgccgagcccactcttagacctgatatagcggatgccgacagccgtgctgctactgtaaagcagcgcccgacgtcaaggaggataacaccagcagagatatcgagcctgttcgaacgccagggcctccctggccccgagaaattgcctgggtcactgcggaaaggtataccgcgcactaaatcagttggtgaggatgagaagctggcatccctcttggaaggacgattccccaggagtacttccatgcaagaccccgtgcgcgaagggcgtggtattcctcccccaccccagactgctcccccccctccgccggccccttactatttcgattctggtcccccacctgccttcagcccccctccaccgcccggacgagcctatgacacggttcgatcctccttcaagcccggactcgaggcgcgactgggggcaggcgctgccgggctgtacgaacctggagctgcattgggccccctgccctatccagaacgccagaaacgtgcaagatccatgattattctccaggacagtgcaccagaatctggagacgccccacgccctccccccgccgctacccccccagaaagaccaaaacggagacctcggccccctggccctgacagtccatacgccaacctcggcgcgttcagtgcttcactatttgcaccctcaaaaccccagcgcaggaagtctcctcttgtaaagcagctgcaggtggaagatgcacaggagagagcggccctggcagtgggatccccaggacccggcggtggctcttttgccagagagcccagtcccacacatcggggcccacgtcccggggggttagactatggggccggagatggccctggactggctttcggcggacccggcccggcaaaggaccggagactggaagagaggcgcaggtccacagtgttcttgagtgtaggggcaatagaaggctcggcaccaggtgccgacctgccatccctgcaacccagtaggtctattgacgaacggcttctcggaactggacctaccgcaggaagggatctcttgctcccgagccccgtcagcgcactcaaacctctggttagcgggcccagtttaggtccctccggcagcaccttcattcaccccctaactggaaagcctctcgaccctagctcacctctggccttagccctcgcagccagggagcgagccctggctagccaagctccctccaggtcacccacacccgtccatagccctgacgccgatcgcccaggccccctcttcgttgacgtgcaggcccgggatccagagcgggggagcctggcatccccagccttttcacctcggagccctgcttggattccagttccagctagaagggaggccgagaaggtgccgcgcgaggaacggaaaagcccagaagacaaaaagtcaatgatcctttcagtccttgatacatccctacaacgccctgccggcttgatcgtcgtacacgcaactagtaatggccaagagccgtcccggctcggcggagcagaagaggaaagacctggcacaccagagctggcgcctgctcctatgcagtcagcagctgtagccgaacctctgccctctcctagggcccagccgcccggggggacaccagcggatgcgggccccggacagggctcttctgaggaagaacctgagctggtctttgctgtgaatttgcccccagcacagcttagttcaagtgacgaggagactcgcgaggagctggcacgaataggccttgtgccccctccagaagagttcgccaatggagtccttcttgctactccactcgcgggcccgggcccaagccctaccaccgtgccctccccggcctctggtaagcccagctcagaacctccccccgcacccgaaagcgcggccgattcaggcgtggaagaagccgacactcgaagcagtagtgacccacacctcgagaccactagtactatttccaccgtctcttccatgagtaccctgagcagcgagtctggcgagttgacagacactcacacttcctttgccgacggccacacttttctccttgaaaagcctcccgttcctcctaaacctaagctgaagagccctctgggcaagggtcccgtgaccttcagagatcctctgttgaagcaaagctccgattctgagctcatggcccaacaacaccatgccgcgtctgcaggcctggcaagcgcagcagggcccgcacgcccccgctatcttttccagagaaggagtaagctctggggggaccctgtcgaaagccgaggactgcccggccccgaggatgacaagccaacggttatatcagagctcagcagcaggcttcaacagctgaataaagatacaagatctctgggggaggagcctgtggggggactggggagcttactggacccagccaagaaaagccctatcgctgccgcacggtgccgaagccccatggtgggactcaggctattttctagtctcggtgagctcagttcaataagtgctcagagaagccctggcgggccaggaggtggcgctagttactcagtaaggcccagcgggaggtatcccgtcgcccggcgagcaccttcacctgtgaaacccgcatccctggaaagggtggaaggtctgggagccggcgcggggggtgcaggtcgtcccttcgggctgaccccacccactatattgaagtcctctagcctcagtatcccccacgagccaaaggaggtacgctttgtggtcaggagtgtttcagcccgcagcaggtcaccttctcccagccctttgccctctccagcctcaggccctggcccaggtgctcctgggccaagacgaccattccagcaaaagcccctgcagctgtggtccaaatttgacgttggcgattggctcgagtctatccacctgggcgaacatagggacaggtttgaagaccatgagattgagggagcccacctgccagcacttaccaaagatgacttcgtggaattgggagtgacacgggtgggtcataggatgaatattgaacgcgcgttgcgccagctggatggtagttag

SEQ ID NO: 228826 - DNA, 5244 bp, Artificial Sequence
  derived and/or modified sequence
atggatggccctggggccagcgctgtggtggtgcgggtgggcatcccagacctgcagcagaccaagtgcctgcggctggaccctgctgcccctgtgtgggccgccaagcagagggtgctgtgtgccctgaaccacagcctgcaggatgccctgaactacggcctcttccagccccccagccggggccgggccggcaagttcctggatgaggagcggctgctgcaggagtacccacccaacctggacacccccctgccctacctggagttccgctacaagagaagagtgtatgcccagaacctgattgatgacaagcagtttgccaagctgcacaccaaggccaacctgaagaagttcatggactatgtgcagctgcacagcacagacaaggtggcccggctgctggacaagggcctggaccccaacttccatgaccctgacagcggggagtgccccctgagcctggccgcccagctggacaatgccacagacctgctgaaggtgctgaagaatggaggagcccacctggacttccgcaccagagatggcctgacagctgtgcactgtgccacccggcagagaaatgctgctgccctgaccaccctgctggacctgggcgccagcccagactacaaggacagccggggcctgacccccctgtaccacagcgccctgggcggcggagatgccctgtgctgtgagctgctgctgcatgaccacgcccagctgggcatcacagatgaaaatggctggcaggagatccaccaggcctgccgcttcggccacgtgcagcacctggagcacctgctcttctacggggctgacatgggcgcccagaatgccagcggcaacacagccctgcacatctgtgccctgtacaaccaggagagctgtgcccgggtgctgctcttccggggggccaacagagatgtgaggaactacaacagccagacagccttccaggtggccatcatcgccggcaactttgagctggccgaggtgatcaagacccacaaggacagtgatgtggtgcccttccgggagacccccagctatgccaagagaagaaggctggccggccccagcggcctggccagcccccggcccctgcagaggtctgccagtgacatcaacctgaagggggaggcccagcctgctgccagccctggccccagcctgcggagcctgccccaccagctgctgctgcagaggctgcaggaggagaaggaccgggacagagatgctgaccaggagagcaacatcagcggccccctggccggccgggccggccagagcaagatcagtgaccccggccctggccctggaggagtgggcggggcccccctgcccccacctggggcccccaggagctgcatccgcatccgggcccgcttccctgcccccccagcccccccagcccccccaccccggggccccaagaggaagctgtacagcgctgtgcccggcaggaagttcatcgctgtgaaggcccacagcccccagggcgagggggagatccccctgcacagaggagaggccgtgaaggtgctgagcattggagagggcggcttctgggagggcaccgtgaagggccgcacaggctggttccctgctgactgtgtggaggaggtgcagatgaggcagcacgacaccaggcctgagacccgggaggacaggaccaagaggctcttccgccactacacagtgggcagctatgacagcctgaccagccacagcgactatgtgattgatgacaaggtggccgtgctgcagaagagggaccacgagggcttcggctttgtgctgcggggggccaaggccgagacccccatcgaggagttcacccccaccccagccttccctgccctgcagtacctggagagcgtggatgtggagggcgtggcctggagggctggcctgaggactggagacttcctgattgaggtgaatggagtgaatgtggtgaaggtgggccacaagcaggtggtggccctgatccggcagggcggcaaccggctggtgatgaaggtggtgtctgtgaccaggaagccagaggaggatggagccaggagaagagcccctcctccacccaagagggcccccagcaccaccctgaccctgcggagcaagtccatgacagctgagctggaggagctggccagcatcagaagaaggaagggggagaagctggatgagatgctggccgctgctgctgagcccaccctgcggccagacattgctgatgctgacagcagagctgccaccgtgaagcagaggcccaccagccgccgcatcaccccagctgagatcagcagcctgtttgagcggcagggcctgcccggccctgagaagctgcccggcagcctgaggaagggcatccccaggaccaagtctgtgggagaagatgagaagctggccagcctgctggagggccgcttccccaggagcacctccatgcaggaccctgtgcgggagggccggggcatccccccaccaccccagacagcccctcctcctcctccagccccctactactttgacagcggccccccaccagccttcagccccccacctcctcctggccgggcctatgacacagtgcgcagcagcttcaagccaggcctggaggcccggctgggcgctggggccgccggcctgtatgagcctggagctgccctgggccccctgccctacccagagcggcagaagagggcccgctccatgatcatcctgcaggacagcgcccctgagagcggagatgccccccggcccccacctgctgccaccccacctgagcggcccaagaggcggccccggcccccaggccctgacagcccctatgccaacctgggcgccttcagcgccagcctgtttgcccccagcaagccccagaggaggaagagccccctggtgaagcagctgcaggtggaggatgcccaggagagagctgccctggccgtgggcagccctggccctgggggcggcagctttgcccgggagcccagccccacccaccggggccccaggcctgggggcctggactatggagctggagatggccctggcctggcctttggaggccctggccctgccaaggaccggcggctggaggagcggcggcgcagcacagtgttcctgtctgtgggcgccatcgagggcagcgcccctggagctgacctgcccagcctgcagcccagccgcagcattgatgagcggctgctgggcaccggccccacagctggccgggacctgctgctgcccagccctgtgtctgccctgaagcccctggtgtctggccccagcctgggccccagcggcagcaccttcatccaccccctgaccgggaagcccctggaccccagcagccccctggccctggccctggccgcccgggagcgggccctggccagccaggcccccagccgcagccccacccctgtgcacagcccagatgctgacaggcctggccccctgtttgtggatgtgcaggcccgggaccctgagcggggcagcctggccagccctgccttcagccccaggagccctgcctggatccctgtgcctgcccggcgggaggccgagaaggtgccccgggaggagaggaagagccctgaggacaagaagtccatgatcctgtctgtgctggacaccagcctgcagaggcctgctggcctcatcgtggtgcacgccaccagcaatggccaggagcccagccggctgggcggcgctgaggaggagcggcccggcaccccagagctggccccagcccccatgcagagcgctgctgtggccgagcccctgcccagcccccgggcccagcccccaggcggcaccccagcagatgctggccctggccagggcagcagcgaggaggagcctgagctggtgtttgctgtgaacctgcccccagcccagctgagcagcagtgatgaggagacccgggaggagctggcccgcatcggcctggtgcccccacctgaggagtttgccaatggagtgctgctggccacccccctggccggccctggccccagccccaccaccgtgcccagccctgccagcggcaagcccagcagcgagcccccaccagcccctgagagcgctgctgacagcggcgtggaggaggccgacaccaggagcagcagtgacccccacctggagaccaccagcaccatcagcacagtgtcctccatgagcaccctgagcagcgagagcggggagctgacagacacccacaccagctttgctgatggccacaccttcctgctggagaagccccctgtgccccccaagcccaagctgaagagccccctgggcaagggccctgtgaccttccgggaccccctgctgaagcagagcagtgacagcgagctgatggcccagcagcaccacgccgccagcgctggcctggccagcgctgctggccctgcccggccccgctacctgttccagaggaggagcaagctgtggggagaccctgtggagagccggggcctgcccggcccagaagatgacaagcccaccgtcatcagcgagctgagcagccggctgcagcagctgaacaaggacaccaggagcctgggggaggagcctgtgggcggcctgggcagcctgctggaccctgccaagaagagccccatcgctgctgcccggctcttcagcagcctgggggagctgagcagcatcagcgcccagaggagccctgggggccctgggggcggggccagctacagcgtgcggcccagcggccgctaccctgtggcccggcgggcccccagccctgtgaagccagccagcctggagcgggtggagggcctgggcgctggggccggcggggccggccggcccttcggcctgaccccacccaccatcctgaagagcagcagcctgagcatcccccatgagcccaaggaggtgcgctttgtggtgcgctctgtgtctgcccggagccgcagccccagccccagccccctgcccagccctgccagcggccctggccctggggcccctggcccccggcggcccttccagcagaagcccctgcagctgtggagcaagtttgatgtgggggactggctggagagcatccacctgggggagcaccgggacagatttgaggaccacgagattgagggcgcccacctgcctgccctgaccaaggatgactttgtggagctgggcgtgaccagggtgggccacaggatgaacatcgagcgggccctgcggcagctggatggcagctag

SEQ ID NO: 228827 - DNA, 5229 bp, Artificial Sequence
  derived and/or modified sequence
atggatggccctggggccagcgctgtggtggtgcgggtgggcatcccagacctgcagcagaccaagtgcctgcggctggaccctgctgcccctgtgtgggccgccaagcagagggtgctgtgtgccctgaaccacagcctgcaggatgccctgaactacggcctcttccagccccccagccggggccgggccggcaagttcctggatgaggagcggctgctgcaggagtacccacccaacctggacacccccctgccctacctggagttccgctacaagagaagagtgtatgcccagaacctgattgatgacaagcagtttgccaagctgcacaccaaggccaacctgaagaagttcatggactatgtgcagctgcacagcacagacaaggtggcccggctgctggacaagggcctggaccccaacttccatgaccctgacagcggggagtgccccctgagcctggccgcccagctggacaatgccacagacctgctgaaggtgctgaagaatggaggagcccacctggacttccgcaccagagatggcctgacagctgtgcactgtgccacccggcagagaaatgctgctgccctgaccaccctgctggacctgggcgccagcccagactacaaggacagccggggcctgacccccctgtaccacagcgccctgggcggcggagatgccctgtgctgtgagctgctgctgcatgaccacgcccagctgggcatcacagatgaaaatggctggcaggagatccaccaggcctgccgcttcggccacgtgcagcacctggagcacctgctcttctacggggctgacatgggcgcccagaatgccagcggcaacacagccctgcacatctgtgccctgtacaaccaggagagctgtgcccgggtgctgctcttccggggggccaacagagatgtgaggaactacaacagccagacagccttccaggtggccatcatcgccggcaactttgagctggccgaggtgatcaagacccacaaggacagtgatgtggtgcccttccgggagacccccagctatgccaagagaagaaggctggccggccccagcggcctggccagcccccggcccctgcagaggtctgccagtgacatcaacctgaagggggaggcccagcctgctgccagccctggccccagcctgcggagcctgccccaccagctgctgctgcagaggctgcaggaggagaaggaccgggacagagatgctgaccaggagagcaacatcagcggccccctggccggccgggccggccagagcaagatcagcgagcccggggcccccaggagctgcatccgcatccgggcccgcttccctgcccccccagcccccccagcccccccaccccggggccccaagaggaagctgtacagcgctgtgcccggcaggaagttcatcgctgtgaaggcccacagcccccagggcgagggggagatccccctgcacagaggagaggccgtgaaggtgctgagcatcggggagggcggcttctgggagggcaccgtgaagggccgcacaggctggttccctgctgactgtgtggaggaggtgcagatgaggcagcacgacaccaggcctgagacccgggaggacaggaccaagaggctcttccgccactacacagtgggcagctatgacagcctgaccagccacagcgactatgtgattgatgacaaggtggccgtgctgcagaagagggaccacgagggctttggatttgtgctgcggggggccaaggccgagacccccatcgaggagttcacccccaccccagccttccctgccctgcagtacctggagagcgtggatgtggagggcgtggcctggagggctggcctgaggactggagacttcctgattgaggtgaatggagtgaatgtggtgaaggtgggccacaagcaggtggtggccctgatccggcagggcggcaaccggctggtgatgaaggtggtgtctgtgaccaggaagccagaagaagatggagcccggcggcgggcccctcctccacccaagagggcccccagcaccaccctgaccctgcggagcaagtccatgacagctgagctggaggagctgggggagtggaggggccgggagggcagcgagaagctggatgagatgctggccgctgctgctgagcccaccctgcggccagacattgctgatgctgacagcagagctgccaccgtgaagcagaggcccaccagccgccgcatcaccccagctgagatcagcagcctgtttgagcggcagggcctgcccggccctgagaagctgcccggcagcctgaggaagggcatccccaggaccaagtctgtgggagaagatgagaagctggccagcctgctggagggccgcttccccaggagcacctccatgcaggaccctgtgcgggagggccggggcatccccccaccaccccagacagcccctcctcctcctccagccccctactactttgacagcggccccccaccagccttcagccccccacctcctcctggccgggcctatgacacagtgcgcagcagcttcaagccaggcctggaggcccggctgggcgctggggccgccggcctgtatgagcctggagctgccctgggccccctgccctacccagagcggcagaagagggcccgctccatgatcatcctgcaggacagcgcccctgagagcggagatgccccccggcccccacctgctgccaccccacctgagcggcccaagaggcggccccggcccccaggccctgacagcccctatgccaacctgggcgccttcagcgccagcctgtttgcccccagcaagccccagaggaggaagagccccctggtgaagcagctgcaggtggaggatgcccaggagagagctgccctggccgtgggcagccctggccctgggggcggcagctttgcccgggagcccagccccacccaccggggccccaggcctgggggcctggactatggagctggagatggccctggcctggcctttggaggccctggccctgccaaggaccggcggctggaggagcggcggcgcagcacagtgttcctgtctgtgggcgccatcgagggcagcgcccctggagctgacctgcccagcctgcagcccagccgcagcattgatgagcggctgctgggcaccggccccacagctggccgggacctgctgctgcccagccctgtgtctgccctgaagcccctggtgtctggccccagcctgggccccagcggcagcaccttcatccaccccctgaccgggaagcccctggaccccagcagccccctggccctggccctggccgcccgggagcgggccctggccagccaggcccccagccgcagccccacccctgtgcacagcccagatgctgacaggcctggccccctgtttgtggatgtgcaggcccgggaccctgagcggggcagcctggccagccctgccttcagccccaggagccctgcctggatccctgtgcctgcccggcgggaggccgagaaggtgccccgggaggagaggaagagccctgaggacaagaagtccatgatcctgtctgtgctggacaccagcctgcagaggcctgctggcctcatcgtggtgcacgccaccagcaatggccaggagcccagccggctgggcggcgctgaggaggagcggcccggcaccccagagctggccccagcccccatgcagagcgctgctgtggccgagcccctgcccagcccccgggcccagcccccaggcggcaccccagcagatgctggccctggccagggcagcagcgaggaggagcctgagctggtgtttgctgtgaacctgcccccagcccagctgagcagcagtgatgaggagacccgggaggagctggcccgcatcggcctggtgcccccacctgaggagtttgccaatggagtgctgctggccacccccctggccggccctggccccagccccaccaccgtgcccagccctgccagcggcaagcccagcagcgagcccccaccagcccctgagagcgctgctgacagcggcgtggaggaggccgacaccaggagcagcagtgacccccacctggagaccaccagcaccatcagcacagtgtcctccatgagcaccctgagcagcgagagcggggagctgacagacacccacaccagctttgctgatggccacaccttcctgctggagaagccccctgtgccccccaagcccaagctgaagagccccctgggcaagggccctgtgaccttccgggaccccctgctgaagcagagcagtgacagcgagctgatggcccagcagcaccacgccgccagcgctggcctggccagcgctgctggccctgcccggccccgctacctgttccagaggaggagcaagctgtggggagaccctgtggagagccggggcctgcccggcccagaagatgacaagcccaccgtcatcagcgagctgagcagccggctgcagcagctgaacaaggacaccaggagcctgggggaggagcctgtgggcggcctgggcagcctgctggaccctgccaagaagagccccatcgctgctgcccgctgccgcagccccatggtgggcctgcggctcttcagcagcctgggggagctgagcagcatcagcgcccagaggagccctgggggccctgggggcggggccagctacagcgtgcggcccagcggccgctaccctgtggcccggcgggcccccagccctgtgaagccagccagcctggagcgggtggagggcctgggcgctggggccggcggggccggccggcccttcggcctgaccccacccaccatcctgaagagcagcagcctgagcatcccccatgagcccaaggaggtgcgctttgtggtgcgctctgtgtctgcccggagccgcagccccagccccagccccctgcccagccctgccagcggccctggccctggggcccctggcccccggcggcccttccagcagaagcccctgcagctgtggagcaagtttgatgtgggggactggctggagagcatccacctgggggagcaccgggacagatttgaagatcatgaaattgaaggagcccacctgcctgccctgaccaaggatgactttgtggagctgggcgtgaccagggtgggccacaggatgaacatcgagcgggccctgcggcagctggatggcagctag

SEQ ID NO: 228828 - DNA, 5244 bp, Artificial Sequence
  derived and/or modified sequence
atggacggccccggcgccagcgccgtggtggtgcgggtgggcatccctgacttgcagcaaactaagtgtctgagactggatcccgctgctcccgtctgggccgcaaagcagcgtgtactgtgtgcccttaatcacagcctgcaggacgcgctgaattatggtcttttccagccaccctcacgaggccgcgcgggtaagttcctggacgaagaacgtctgctacaggaatacccaccaaatttagatacccctttaccgtacctggagttccggtataaaagaagggtgtatgcacagaacctgatcgatgataagcagttcgcgaaactgcatacaaaggcaaatctcaagaagtttatggactatgtgcagctgcacagcacggataaggttgcccggcttttggataaggggctagaccccaatttccacgatccagactcaggtgagtgtccgctctcactggccgcccagctggacaacgccaccgatcttctgaaggttctgaaaaacgggggggcccatctggacttccggactcgcgacggtctcaccgccgttcactgcgctacacggcagagaaacgcggcagctctgactaccctgttggatcttggcgcttctcctgactataaggactctagaggcttgacacccttataccactccgctctcgggggaggcgatgctttgtgttgtgagctgctcctccacgatcacgcccagctaggtatcaccgatgagaacggctggcaggaaatccaccaggcatgcagatttggtcatgttcaacacctcgagcatctcctgttctacggcgccgacatgggagcccagaatgcttcagggaacaccgctctccacatttgcgcactctataatcaggaaagttgcgcacgggtactgctgttcagaggagctaaccgagacgtccgtaactacaacagccagactgcattccaggttgccattattgccgggaactttgaactggctgaggtcattaagacacataaagattcggatgtcgtcccctttagggagaccccttcatatgccaaacgcaggaggctcgcaggaccaagcggtctggcatctccgcgaccactccagagatccgctagcgacatcaatctgaagggcgaggcccagccggcagcaagtcccgggcccagcttaagatcactcccacatcaactgctgctgcagcggctgcaggaagaaaaggaccgcgatagggacgcggatcaggagagtaatatcagtggccccctcgctggcagagccggtcagagcaaaatttcagaccctggaccaggcccaggcggagttggtggcgctccccttcccccccctggggctccccgcagttgcattcgtatccgggccaggtttcccgccccccccgctccaccagcgccacccccgcgtggacctaagcgaaagttgtattccgccgtgcctggaaggaagttcatagcagtaaaggcccacagccctcaaggcgagggtgagattccactacaccgaggcgaagcagtgaaggtgcttagcatcggggaaggcgggttctgggagggaactgtcaaaggccggaccggatggttcccagctgattgtgtggaagaggtccagatgcggcagcatgatactcggccagagacccgtgaagatcgcactaagaggctgttccgccattacaccgtcgggtcttacgacagtctgacgtcccactccgattatgttatcgatgataaagtggccgtattgcagaaaagggaccatgagggttttggttttgtcctgaggggtgccaaagctgaaacaccaatcgaggaattcacgcctactcctgcttttccagcattgcagtatctcgaatccgtggacgtggagggagttgcttggagagctggattgcgcacaggtgacttcttgattgaagtgaacggcgttaatgtggtgaaagtaggccataagcaggttgtggcactaattaggcagggcggaaaccgcttagtgatgaaagtggtgtctgttacgcggaagcctgaggaagatggagccaggcgtagggccccccccccgccgaaacgagcaccctctacaacgctcacactgcgtagtaaaagtatgaccgccgagctcgaagaacttgccagcatcagacgccgaaaaggagagaagctagatgagatgctggcagcggctgcggaacctactttgcgtcccgacatcgcagatgctgatagccgggccgctaccgtgaagcagcggcctacctctcgcagaatcactcccgccgaaatttcttccctctttgagcgccaggggttgcctggccctgagaaactgcccgggtctctgaggaaaggcatccctcgaaccaagtctgtcggggaagatgaaaagttggccagtctcctggagggccgattcccccggagtactagcatgcaagacccagttagggagggacgaggaattcccccacctccccaaactgcgccgcccccgccacccgctccgtactattttgacagcggtccccctcccgctttctccccacctcctcccccgggcagggcttacgatacagtccgctccagcttcaaacccggactcgaagccaggctaggagcaggtgcggccggcctctacgagccgggagccgctctaggcccccttccctatcccgaaagacagaagagggcgcgctccatgataatactccaggacagtgctcccgaatccggggatgctcctcggccaccccctgcagcaactccacctgagcgccccaagcgaagaccgcgacctcccggtcccgacagcccatacgccaacctcggcgctttctctgcatctctgtttgctccttccaagccacaacgcaggaagagtccgctggtgaagcagctgcaggtggaggacgctcaggagcgtgctgcgctggcggtcggatctccggggcccggcggcggctcttttgctagggaaccttcccctacccatagggggccacgacctggagggctggattatggagcgggagacggacctggcttagcctttgggggcccaggccctgccaaagatcggaggctggaggagcgtcgtaggtctacagtatttctctcagtcggcgccatcgagggttcagctcctggagctgatttaccttccctgcagccctctcggtctatcgatgagcggctgctgggcactggacctaccgctggtagggacctgctgctgcccagtcctgtgagcgcccttaaaccactggtgtctggcccgagcctaggcccatccggcagcacctttatacaccccctgactggcaagcctctggatccctccagtccgttagctctggcgttagccgcccgggaacgtgctttggcttcccaggccccctcccggtcacctacaccggtgcacagtccagacgccgaccgccctggacccctgtttgtcgatgttcaggctcgagacccagaacgcggcagtctggccagcccagcatttagccctagatcgcctgcgtggattccagtgcccgcaagaagagaggccgagaaggttccacgtgaggaacgcaaatctccagaagacaaaaaaagcatgattctgtctgttttggatacctctctgcagcgccccgctggtctgattgtggtgcatgccacctctaatggacaggagccatctagattgggaggcgcggaggaggagcgccccggtacaccagagcttgccccagccccaatgcagtccgcagctgtggctgaacctctaccatccccacgcgcacagcccccaggggggaccccggccgacgccggccctgggcagggttcttccgaagaggaacctgaacttgtcttcgccgtcaacctgccccccgcacagctttcttcttcagatgaggagactcgagaagagctcgcccgaatcgggctggttccccctcccgaggagttcgcaaacggagtgctgctggcaacacctctggcaggccctggtcctagccccactactgtgccttctccagcttccgggaagccctcaagtgaacccccgccagccccagagagcgcagcggatagtggcgtcgaggaggctgacaccagaagcagttcggatccccacttagagactaccagcacaatttccaccgtttcttctatgagtacactcagctctgagtcaggagagctgacagatactcacacatcctttgctgacggacatactttccttttggaaaaaccccctgtccccccgaagcccaagctgaagtcacccttaggcaaagggcccgtcacatttagagaccccttactgaagcagagctcggattctgaattgatggcacaacagcatcacgcagcgtctgccggtctcgcttcagctgccggacccgcgagacctagatatctctttcagcgtagatccaaactgtggggggatcccgtggaaagcagaggactgccgggccccgaggacgataagcctaccgtgatttctgagctgagctcaaggctgcagcagctgaataaggacacacggagtctgggggaggaaccagtgggcggcctgggctccctcttggaccctgcaaagaaatcaccaatcgctgccgccagattattctcttccctaggcgaactttccagtatttccgctcaacgaagccctggtgggccaggcgggggagccagctatagcgtccggccttcaggtcgttatcccgtggctcgccgtgccccatctccggttaagcctgccagcctggaacgcgttgaggggctaggtgcgggggcaggcggagctggaaggccttttggccttacccctccaactatcctcaagtcctcatccctgtctatcccccatgaacccaaggaagtaaggtttgtagtccggagtgtcagtgctaggtccagatctcccagtccctccccgctgccctcgcccgccagcggaccagggcccggcgcaccagggcctcggcgtcccttccagcagaaacccctgcaactgtggtccaagttcgatgtgggcgactggctcgaaagcatacatctgggcgaacacagggaccggtttgaagatcacgaaatcgaaggagcacacctgcctgccctgactaaggatgatttcgtggagctaggcgttacacgggtcgggcatcgcatgaatattgaacgcgctctgcgccagcttgatggcagctag

SEQ ID NO: 228829 - DNA, 5229 bp, Artificial Sequence
  derived and/or modified sequence
atggacggccccggcgccagcgccgtggtggtgcgggtgggcatcccagatttgcaacagaccaaatgtttacggttggatcctgccgcccctgtatgggccgcaaagcaacgagtactgtgtgctctgaatcacagcctgcaagatgcattgaattacggcttattccagcctcccagtcggggacgagcaggtaagtttcttgacgaagagaggttgctgcaagagtacccccctaatctggatactccccttccatatctggagtttaggtacaagcgacgggtgtacgcccagaatctgattgatgacaagcaattcgccaaactgcacacaaaagccaacttaaaaaaatttatggactacgtgcagctccatagtacagacaaagtcgctcgactcctggataagggattggaccctaacttccatgatcccgattcgggggaatgccctctctctctggctgcccagctggacaacgctactgatctgctcaaggtgctcaagaatgggggagcacatttagacttccgaacccgcgacggactcaccgctgtgcactgtgccaccagacagaggaatgctgccgctctgacgactctcctggatcttggggctagtcctgattacaaagattcccgaggtcttactccactgtaccattcggccctcggcggcggcgacgctttatgttgcgaactgttactccacgaccacgcgcagctggggataactgacgagaacggatggcaagagatccaccaggcgtgtagatttggccatgtgcagcacctggagcacctgctcttctatggggcagatatgggagcccagaatgcgagcggcaatacagccctccatatctgcgcattgtacaatcaggaaagttgtgcccgggtgctgctgttcagaggagctaatcgggatgttagaaactataatagccaaacagcttttcaggtggccatcatcgccggaaatttcgaactggccgaagtgatcaagactcataaagatagtgatgtcgtaccttttagagagacccccagctacgccaagcgtcgaagattggcagggccttccgggttagcctccccccggcccttgcagaggtccgcatcggatattaaccttaaaggggaggcccagcctgcagcatcccccggaccttccctgagaagtttacctcaccaacttctgctgcaacggcttcaggaagagaaagaccgcgaccgtgatgccgaccaggagagcaacatttcaggccctctcgccgggagagccggacagagcaaaatcagcgagcccggtgcccctcgctcttgcatccgcatccgggcccggttccctgcgccgcccgcaccgcctgccccccccccccgcggaccaaaaaggaagttgtacagcgccgtgcctggccgaaaatttatcgctgtgaaggcacattccccccagggcgagggggaaattccactgcacagaggagaggcagtgaaggtgctttctatcggggaggggggcttttgggaagggacagttaagggtaggacaggctggtttcccgctgactgtgttgaagaggtgcagatgcggcaacacgacacgcgccccgagactcgcgaagaccggaccaagcggcttttcaggcactacacagtggggtcctacgattcgttgacctcccactcagattacgtgatcgatgataaggtggcagtgctgcagaaacgggatcacgagggcttcggttttgtactgaggggcgctaaggctgagactccgatagaggaattcactccaacacccgcatttccagcactgcagtacctggagtctgtcgacgtggagggcgtggcctggagggcaggcctacgaacaggggattttttgatagaagttaatggagtgaacgttgttaaagttgggcataaacaggtggtcgccctgattcgccaaggaggcaaccgcctggtaatgaaggtggtttcagtgacccgtaagcctgaagaggatggagcacgccgtagagcgccgccccctccaaaaagggctccttccacaaccttgacgctcaggagcaagtccatgacggcagagttagaggagctcggggagtggcgtggcagggaggggagcgagaaattggatgagatgctggctgcagcagctgagcccactctaagacccgatatagccgacgcggattctagagcagctaccgtgaaacagaggccaacaagccgccgcatcaccccagctgagatctcatccttgtttgaacgccaggggctgcctggccccgagaagctccccgggagcctgagaaaaggcataccccgtaccaagtcggtgggggaggatgagaaacttgccagcctcctggagggaaggttccctaggtcaacttccatgcaggaccccgtgcgagaagggcgcggaatcccgccccctcctcagacagcccccccacctccgcctgctccgtactattttgatagcggccccccgcctgcattcagtccgccgccaccccccgggagagcatacgataccgtaagatcgagcttcaaaccagggttggaggcccgtctgggtgccggagctgcagggctgtacgaacccggcgctgcccttgggcctctcccttatcctgagcggcagaagcgggcccgttcaatgattattctgcaggattcagcccctgagtccggtgatgccccccggcctcccccagccgctactccaccagagagaccaaagcggcgaccaaggccccctggaccagacagtccttacgctaatcttggcgccttcagtgcctcactttttgccccctcaaaaccccaacgccggaagagccctcttgtgaagcagttacaggtcgaggacgcacaggagcgagccgccctggctgtcggctctcctggcccgggggggggctctttcgcccgagagccctcacctacacacagggggccacgacctggggggctggactatggtgccggggatggtccaggactggcttttggaggcccagggcccgcgaaggatcgtagacttgaagaacggcggcgctctacagtgttcctctccgtcggagccattgaggggtcggccccaggcgccgatctgccctccctccaaccctcccgatccatcgacgaacggctgctgggaacaggccccaccgcaggcagggacctccttcttccctcaccagtgtccgccctgaaacccctggtttccggacccagtctagggccctctggtagtacgttcatacaccccctgaccggtaaacctctggacccctcctctcctctcgcactggcactcgctgcccgcgagcgcgccctggcatcccaggctccctccaggagcccaacccccgtgcacagtcctgatgctgaccgccccggcccactatttgttgacgttcaggccagggacccggagcgggggtccttggcgtctcctgcttttagccccaggtcccccgcctggattcctgtcccagcccggcgggaagctgagaaggtgccccgcgaagagagaaagagccctgaagacaagaagtctatgattctctcagttcttgacacatccctgcagcggccagcaggactgatcgtggttcatgccacttccaacggccaagaacctagccgactggggggcgccgaagaagagagaccaggtacaccagaactcgctccagccccgatgcagagtgcagcagtggcagaacccctgccgagcccaagggcccagccacctggtgggacccccgctgatgcgggaccaggacagggcagctctgaggaggagcccgagctcgtctttgcggtgaacctcccacctgcacagttgtccagctcagacgaggagaccagagaggagttagctcggatcggcctggttccccccccagaagaattcgcaaatggggtcctactcgctactccgctggcagggcccggccctagccccacaaccgtgcccagtcccgcgtccgggaaaccatcaagtgagccccccccagctcctgagtccgctgcggattcaggcgtggaagaggccgatactcgatcctcttcagacccgcatctggagaccacgtcaacaatatctaccgtctcaagtatgagcactctgtcctctgagagtggcgaacttacagacacacacacatcatttgccgacggccacaccttcctgctggagaaacccccagtgccccccaaacccaaactgaagtcccctctcggcaaaggccccgtgacctttcgtgatcccctgctaaagcagtcatccgatagcgagctgatggctcagcagcatcatgcagcttccgcaggtctcgcctctgcagcaggcccagcgcgccctcgctatttgtttcagcggaggtcaaaactgtggggggatccggtcgaatcccgcggactacccggtccagaggacgataagcctacagtgatatcagaactcagctctagattgcagcagctgaataaagataccagaagcctgggggaggaacctgtggggggactgggtagtctcctggaccctgcaaaaaaatcccccatcgctgccgctcggtgtaggtctccaatggttggactccggctcttttctagtttaggggagctttcttcaatttctgctcaaaggtcacccggcggtcccggaggtggggccagttacagcgttcgcccttcagggcggtatccagtagcccgacgcgcgccgtctcctgttaaaccagcatccctcgagcgggtcgagggcctgggtgcaggagctggaggcgcgggccgcccttttggcctgaccccacccactatcttgaagagctctagcttatcaattcctcacgagccaaaggaagttcgctttgtcgtccgctcagtctcggcccggtcacggtcccccagccccagcccattgccttccccagcttccgggccgggccccggagcccccggcccccgaagaccttttcagcaaaaaccccttcagctgtggagcaaatttgacgtaggagactggctggagtcgattcacctgggcgaacacagggacaggtttgaggaccatgagatcgaaggtgcccatttacccgccttaacaaaggatgattttgtggagttaggtgtgaccagggtgggacatcgaatgaatatcgaacgagccttacgtcagctcgacgggtcatag

SEQ ID NO: 228830 - DNA, 5244 bp, Artificial Sequence
  derived and/or modified sequence
atggacggcccaggggcaagcgcagtggtagtccgggtggggattccggatctccagcagaccaagtgcctgcgccttgacccggcagcccctgtgtgggcagctaagcaacgggtactgtgtgccttgaatcacagcctgcaggacgccctcaactatggcctgtttcagccacccagccggggaagagccggaaagtttctggatgaggagcggttgcttcaagagtaccccccaaacttggatacacccttgccgtacctcgaattcaggtacaagcgccgagtctacgcccagaatctgatcgatgataagcagttcgccaaactccacaccaaggccaatctgaagaaatttatggattatgtccagctgcacagcactgataaggtagctcggttgctggacaaaggactggaccccaatttccacgatcccgacagcggggagtgtcccctctccttggccgctcaactcgacaacgccaccgacctgctcaaggtactcaaaaatggaggagcccacctcgacttcagaactcgcgatggcttaacggctgttcattgcgctacacggcagaggaacgctgctgccttgacaaccttactggacctgggggcatcgcccgattataaggacagccgcggactaacgccactctaccatagtgccctgggcggtggtgatgcactgtgttgcgaacttctcctccatgaccatgctcagctggggattacggacgagaacgggtggcaggagattcaccaggcctgtcgctttggacacgttcagcacctcgagcatctcctgttttacggagctgacatgggcgcacaaaatgcttcgggtaatactgccctgcatatttgtgccctttacaaccaagagtcctgcgcccgagtcctgctgttccgcggtgctaatagggatgtcaggaactacaacagtcagactgcatttcaggtcgctatcatagcgggaaacttcgaactggccgaggtgattaaaactcataaggattctgatgtcgtgccattcagggagacaccctcgtacgccaagcgcaggagactagctggtccatccggcctcgccagcccaaggccacttcaacgctccgcctcagatattaacctgaaaggagaagcacaacctgccgcatcaccaggtccctccttgcgttctctgccccaccagctgctgctgcagaggcttcaagaggagaaagatcgggaccgtgatgctgaccaggaaagtaacatctcagggccattggctggacgagccggacaatctaagatctccgatccaggtcccggaccagggggagttggaggggcaccattgccccctcctggagctcccagatcgtgtattcgcattcgcgctcgctttcctgccccacccgctccccctgctcctccgcctcgtgggccaaagcgtaaactgtattccgctgtgccgggtagaaagtttatcgcagtaaaggcccactccccccagggcgaaggtgaaatacccttacatcgtggggaagcagttaaagtactttccataggtgaggggggtttttgggaaggtacagtgaaggggaggaccggctggtttcccgcagattgtgttgaagaagttcagatgaggcagcacgatacccgccctgaaacaagagaagatagaacaaagcgactatttcgacattacactgtgggaagctatgattctcttacctcccattctgactatgtgatagacgacaaggtggccgtgctgcagaagagagatcacgagggcttcggttttgtgctgcggggagcgaaagctgagacgccaatcgaagaatttacacctaccccagcttttcctgcgctgcaatatctagagagtgtcgacgtggaaggtgtcgcttggcgggctggcctgcgcaccggggacttcttgattgaggttaacggcgtcaacgttgtgaaagtggggcataagcaggtcgtcgcccttatacggcagggaggcaatcggctcgtcatgaaggttgtgtcagtgactagaaagccagaagaagacggtgcccgtaggagggctcctcctccacctaagcgggcaccttctaccaccttaacactgagaagcaaatcaatgaccgctgaactggaagaacttgcttctattcggaggagaaagggggagaaacttgatgagatgctggccgcagcagccgaaccaacactcagaccagacattgcggacgccgactccagggcagcgaccgtgaaacagcgacctacatctagaagaatcacccctgccgagatttcctcactttttgaacgtcaggggctgcctggcccagagaagttgcccggtagccttcggaaagggattccaagaaccaagtctgtcggggaagacgaaaaattggcctcattactcgagggccgttttcccagatcgacctcgatgcaggatcccgttcgagaaggtcggggaatcccaccgcctcctcagaccgcccctccccctcctccagcaccatattattttgacagcggtccccctcccgcattctctcctccaccaccgccaggtagggcctacgacaccgtgcgctcgtcattcaagcccggtctcgaagctcggctcggcgctggagctgccggtttgtatgaaccaggtgccgcactcggccctcttccatatcccgagcgccaaaaacgcgctcgtagtatgatcatactccaggactccgctcccgagtccggggacgctccccgtccacccccagcagctacacctcctgaacgaccaaaaaggcgccctaggccgcctggtcctgatagtccatatgccaatctgggggctttttctgcttctttatttgctccctctaagccccagcggaggaagtctccactggtgaagcagctgcaagtggaagatgcccaagaacgggcagctctcgccgtagggagtcccggacctggcggagggtccttcgctcgggagccttctccgacacacaggggccctcgaccgggtggccttgattatggggctggggatgggcctggtcttgccttcggaggacccggtcccgcaaaggaccggaggctggaggaaagaaggaggtctaccgttttcctgagtgtcggtgctatcgaaggctcagctcctggggctgacttgcctagtctgcagccaagcaggagcattgatgagaggctcttggggactggtcccactgccggacgagatcttctccttcctagccccgtgtctgccttgaagcccctagtctccgggccatctcttgggccatctggaagtacgttcatacaccccctcactgggaagccccttgacccgtcctctccgctggctcttgcactggccgctcgagaacgagctctggcaagtcaggctccctctaggtcaccaactccggttcactctcctgatgcagaccggccaggaccactttttgtagatgtgcaggccagggaccccgagagaggtagcctggctagtccggctttttccccacggagtcccgcatggatccctgtgccagctcggagggaagctgaaaaagtgccccgtgaggagcgcaagagtccagaagacaagaagagtatgattctcagcgtgcttgacacttcgctccaacgcccagccggactgatcgtggtccatgccactagcaatggccaggaacccagcagactggggggtgctgaggaggaacgacctggcactcctgaattagcgccagctcccatgcagtcagctgccgtcgctgagccccttccctcccccagggcgcagccacccggagggacccccgcagatgctggtcccggacaggggtcttcagaggaagagcctgagctcgtatttgccgttaatctacctccagcccagctcagctcttcagatgaggaaaccagggaagagctcgcgagaatcggcttggtgccgcctcccgaggaattcgcaaatggcgtgctgctcgccacgcctctggcagggcctggcccttcaccgacaacagtgcctagtcccgcatccggtaaacccagctctgagccgccaccagcaccggagagcgcagccgactccggcgtagaagaggctgataccaggtcatccagcgacccacatctggaaacaacctctaccatctccaccgtatcctcgatgtctactttgtctagcgaaagcggcgagctgactgacacccatacttcgtttgcagatggtcacacgtttctactcgaaaagccgcctgtcccaccaaagccaaagctgaaaagcccactgggcaagggcccagtgacatttcgcgacccgttgctgaaacagagctctgattcagaacttatggctcagcaacaccatgccgcatccgccggactcgcctccgccgctggtccagcccgtcctcgctacctgtttcaaaggcggtccaagctgtggggcgatcctgtggagtctcgcggtctgcccggaccagaagacgacaaaccaactgttatttccgagctgtccagccgactgcagcaactgaacaaggacacccggagcttgggagaggaacctgtagggggtctcgggtccctgctggatccggcaaagaagagccctatagccgctgcaagactgtttagttccctgggcgagctcagtagcatttccgcccagcggtccccagggggtcctggtgggggagcctcctactctgtcaggccctccggtcggtatccagtcgcaagacgcgcaccctcgccggtgaagcctgcctccctggaaagagtggaaggactcggcgctggagccggtggggcaggacggcctttcggtcttacaccacccaccatcctcaagagttcttctctgagtattccccacgaacccaaggaggtgaggttcgtggtgcgcagcgtaagtgccagatccaggagtccctccccttccccccttccatctccggcttcagggccaggcccaggcgcaccgggaccgaggagaccctttcagcagaaacctcttcagttgtggtcaaaatttgacgtcggtgactggctcgaatctatccacttgggtgaacatagagaccggtttgaggaccacgagatcgagggtgcccacttgccggctctcacgaaggacgatttcgtggagttaggtgtgacaagagtgggccacaggatgaacatcgaacgggcactgagacagctcgacggctcctag

SEQ ID NO: 228831 - DNA, 5228 bp, Artificial Sequence
  derived and/or modified sequence
atggatgggccaggggcatcggcagtggtggtcagggtcgggatcccagatctacagcaaacaaaatgcctcagattagatcctgccgcaccggtttgggccgcaaagcagcgggtcttatgcgccttgaaccactctttgcaggacgctctgaactatggattattccagcctccttcccgtggcagagccggaaagttcctggatgaggaaaggctgctccaagagtaccccccaaaccttgacaccccactgccgtacttagagtttcggtacaagcgcagagtttacgctcagaaccttatcgatgataagcagtttgcaaaacttcatacaaaggcgaaccttaagaagtttatggactacgtccagcttcattccactgataaggtagcccgtcttctcgataagggcctggacccgaatttccatgatccagatagcggtgagtgcccactcagcttggcagcgcagttggataatgcgactgacctgctgaaggtgttgaagaatggcggtgcccatctggattttcgaacaagggatggtttaacagccgtgcattgcgccacccgccaaaggaacgctgccgcattgaccacgctcttggacttgggagcgtcccccgactataaagattcccggggtttaacacctttgtatcattctgctctgggcggtggcgacgctctgtgctgtgagcttcttctgcatgaccatgctcagttaggcatcaccgacgaaaacggctggcaggaaatacatcaggcatgtcggttcgggcatgtgcagcacttagagcatctgctgttctatggcgcagacatgggtgctcagaatgccagcggcaatacggccttacacatatgcgctctctacaaccaggagagttgcgctagagttctgctgttccggggtgccaaccgggatgtgaggaactacaattcccagacagcttttcaagtggcgatcatcgccggaaattttgaactggcagaagtaattaaaacacataaagactccgatgtggtgccctttagggagactccttcatatgctaagcggcgaagactcgcaggcccatcagggctggcgtctccacgaccactgcagcggtcggcatcggatattaacttgaaaggggaagctcagcctgctgctagcccaggcccttctttgaggagtctgccccaccagctcctcctccagagattgcaagaggaaaaggacagagaccgcgatgcagaccaggagtccaatatttccgggccactagccggaagggcgggacagagcaaaatcagcgagcctggagctcctcgaagctgtataaggattagagctcggttcccagcgccacctgcccctcccgctccaccaccgagaggtcctaaacgaaaactgtacagtgctgtgcccggtcgtaaattcatagcagtaaaggcacattctccccagggagagggggaaattccgttgcaccgaggggaagctgttaaagtcctttcaattggtgaaggcggattttgggaaggcaccgttaaaggaagaacaggttggttcccggcagactgcgttgaggaggtgcagatgcggcagcacgacactcggcctgaaacccgcgaggaccggaccaagcgacttttcaggcactacaccgtgggaagctacgacagcctcacatcgcactccgattacgtgattgacgataaggtggccgtgctgcagaaaagagaccacgaaggttttggattcgtcctcaggggagctaaagctgaaacacccattgaggagttcactcccacgccagccttccccgctctccaatatctcgaaagcgtcgacgttgaaggagtcgcatggagggcagggttgcggaccggagatttcctgattgaggtcaatggcgtgaatgtcgtgaaagttggacacaagcaggtggtcgctctgatcaggcagggcggtaatcgcctggtgatgaaagttgtgtctgttacaaggaagccagaggaggacggcgcaaggagaagagccccacccccaccgaagcgggcaccttctactactctgacactcaggtccaagagtatgacggctgagttggaggagctgggggagtggagggggagggaagggagcgaaaaactcgatgaaatgttagccgctgccgctgagcccacccttaggcccgacattgcggacgctgatagccgggcagctaccgtgaaacagaggccaaccagccgtcgcattactcccgctgagatatcaagtttgttcgaaagacaggggttgccgggacccgagaagctgcctggatccctgcgtaaaggcattccgagaactaaaagcgtgggagaagatgagaaactcgctagcctcctggaagggaggttccccagaagtacgtcaatgcaggatccggtccgagaagggagaggtattccaccaccgccacaaactgcccctccaccccctcccgcaccctattacttcgactcgggaccgcctcctgccttctcccctcctcccccaccaggtcgtgcatacgacaccgtgagatccagcttcaaaccgggactggaggctcgacttggggctggggcagctggcctctatgagcccggagccgctctcgggccactcccctatcctgagcgacagaaacgagctaggagcatgattatattacaggactccgctcctgaatcaggggatgcaccgaggcccccacccgcagctactcctcctgagagaccaaaacgcaggccaaggccaccagggcctgactcaccctacgcaaatctcggcgcatttagcgcctcattgttcgcacctagtaaaccacagcggaggaaaagcccactcgtgaagcagttgcaggtggaggatgcacaggaaagagctgcactcgcggtgggctcccctggtcctgggggaggctcctttgcaagagaacctagtcccacccataggggccctaggcccggaggactcgattacggtgctggagacggtcctggcctggcttttgggggaccgggtcctgctaaagataggcggctggaggaacggagacgctcaaccgtctttctgtccgtcggcgctatagaaggttctgcacctggcgctgacttgcccagcctgcagccttcccggtctatcgacgagaggcttttgggaacaggcccaacagccggaagagaccttctgctgccctcaccagtgtccgccctcaagcccctggttagcgggccttccttaggcccttcaggatccaccttcatacacccattgaccgggaagcccctggaccccagctcccccctcgcactggctctcgcagcacgtgaaagagcgctggccagccaggccccatcacggtctcctacccccgtccactctccagacgcagacagaccaggcccactgttcgtggacgtgcaggccagagatcctgaacggggttcactggcctcacctgcttttagcccacgctctcccgcatggataccagtgccggctcgtagggaggccgagaaagtgccacgcgaagagagaaaatcccccgaggataagaaaagcatgatcctctccgttttagacaccagcctccagcgccctgcaggcctcattgttgttcacgcgacatcaaacggtcaggagccaagccgactgggtggcgctgaggaagagaggccaggaactcctgagctggcccctgcccctatgcaatccgccgctgtggctgagcccctgccctctccccgagcccaaccgcctggtggcactccagccgacgccggacctggtcaagggtcttctgaagaagagccagaattggtgtttgctgtcaacttgccgcctgcccaattatcaagtagcgacgaggaaaccagagaggagctcgctaggatcggcctggtgccacccccagaagagttcgctaacggcgtcctcctcgccacacctttagcaggacctggtccctcccctaccacagtgccgtcccctgcatctggcaaaccatcctcagaaccaccccctgctcccgagagcgccgcagactccggcgtggaagaagcagacacgcgcagttcaagcgatccccaccttgagacaacatctactatctcaacagtctcaagcatgtcaactctgtcctctgaatcgggtgagctcaccgacactcatacaagcttcgccgacggccataccttcctgctggaaaaaccccctgtacccccaaagcctaagctcaagtcccctctgggaaaaggcccagtcacgtttcgcgatcctttgctgaagcagtcttctgactcagaactcatggcacaacaacaccatgccgcttctgccggtctcgctagtgctgcgggacccgcacgtcccagatatctctttcaacgccgaagtaagctatggggcgaccccgtggaaagtaggggtctgcctggccctgaagacgacaagcctactgttatttctgagctgtcatcccggctgcagcagcttaataaggacaccaggtcattgggcgaggaaccagtggggggactgggttccctactggatccagcaaagaaatctcctattgcggctgctagatgccgtagccctatggtgggactccggcttttctcgagcttgggcgagctctcctcaatctccgctcagcgaagcccagggggacctggtgggggagctagttactcagtgaggccctcaggacgataccctgtcgccaggcgagccccaagtcctgttaaaccagcgagcctcgaaagggtggaaggtctgggcgctggcgcaggaggcgctgggagaccatttggcctaactccgccaacgattctgaagtcctccagtttgagcattcctcacgagcccaaggaggtacgcttcgttgtccggagcgtgtccgctaggtctagatctcctagcccttcgcctcttcctagtccggctagcgggcctgggccaggagcccctggcccacggcgtcctttccagcagaagcctttacagctctggagtaaatttgatgttggcgactggctggagagcatccacctaggagagcatcgagacaggtttgaagatcatgagatagaaggcgctcatcttcctgcactaacaaaggacgacttcgtagaattgggcgttactagggttggccacaggatgaacatcgagagggcacttcggcaactggacggctccta

SEQ ID NO: 228832 - DNA, 7145 bp, Artificial Sequence
  derived and/or modified sequence
atggacggccccggggccagcgccgtggtcgtgcgcgtcggcatcccggacctgcagcagacgaagtgcctgcgcctggacccggccgcgcccgtgtgggccgccaagcagcgcgtgctctgcgccctcaaccacagcctccaggacgcgctcaactatgggcttttccagccgccctcccggggccgcgccggcaagttcctggatgaggagcggctcctgcaggagtacccgcccaacctggacacgcccctgccctacctggagtttcgatacaagcggcgagtttatgcccagaacctcatcgatgataagcagtttgcaaagcttcacacaaaggcgaacctgaagaagttcatggactacgtccagctgcatagcacggacaaggtggcacgcctgttggacaaggggctggaccccaacttccatgaccctgactcaggagagtgccccctgagcctcgcagcccagctggacaacgccacggacctgctaaaggtgctgaagaatggtggtgcccacctggacttccgcactcgcgatgggctcactgccgtgcactgtgccacacgccagcggaatgcggcagcactgacgaccctgctggacctgggggcttcacctgactacaaggacagccgcggcttgacacccctctaccacagcgccctggggggtggggatgccctctgctgtgagctgcttctccacgaccacgctcagctggggatcaccgacgagaatggctggcaggagatccaccaggcctgccgctttgggcacgtgcagcatctggagcacctgctgttctatggggcagacatgggggcccagaacgcctcggggaacacagccctgcacatctgtgccctctacaaccaggagagctgtgctcgtgtcctgctcttccgtggagctaacagggatgtccgcaactacaacagccagacagccttccaggtggccatcatcgcagggaactttgagcttgcagaggttatcaagacccacaaagactcggatgttgtaccattcagggaaacccccagctatgcgaagcggcggcgactggctggccccagtggcttggcatcccctcggcctctgcagcgctcagccagcgatatcaacctgaagggggaggcacagccagcagcttctcctggaccctcgctgagaagcctcccccaccagctgctgctccagcggctgcaagaggagaaagatcgtgaccgggatgccgaccaggagagcaacatcagtggccctttagcaggcagggccggccaaagcaagatcagcgatccgggccctggacctggaggggtggggggggcgcccctccctccccctggcgcgcccaggagctgtattcgaattcgagctcggttccccgcgccccctgcgccccccgcaccgccgccccggggcccgaagcggaaactttacagcgccgtccccggccgcaagttcatcgccgtgaaggcgcacagcccgcagggtgaaggcgagatcccgctgcaccgcggcgaggccgtgaaggtgctcagcattggggagggcggtttctgggagggaaccgtgaaaggccgcacgggctggttcccggccgactgcgtggaggaagtgcagatgaggcagcatgacacacggcctgaaacgcgggaggaccggacgaagcggctctttcggcactacacagtgggctcctacgacagcctcacctcacacagcgattatgtcattgatgacaaagtggctgtcctgcagaaacgggaccacgagggctttggttttgtgctccggggagccaaagcagagacccccatcgaggagttcacgcccacgccagccttcccggcgctgcagtatctcgagtcggtggacgtggagggtgtggcctggagggccgggctgcgcacgggagacttcctcatcgaggtgaacggggtgaacgtggtgaaggtcggacacaagcaggtggtggctctgattcgccagggtggcaaccgcctcgtcatgaaggttgtgtctgtgacaaggaagccagaagaggacggggctcggcgcagagccccaccgccccccaagagggcccccagcaccacactgaccctgcgctccaagtccatgacagctgagctcgaggaacttgcctccattcggagaagaaaaggggagaagctggacgagatgctggcagccgccgcagagccaacgctgcggccagacatcgcagacgcagactccagagccgccaccgtcaaacagaggcccaccagtcggaggatcacacccgccgagattagctcattgtttgaacgccagggcctcccaggcccagagaagctgccgggctccttgcggaaggggattccacggaccaagtctgtaggggaggacgagaagctggcgtccctgctggaagggcgcttcccgcggagcacctcgatgcaagacccggtgcgcgagggtcgcggcatcccgcccccgccgcagaccgcgccgcctcccccgcccgcgccctactacttcgactcggggccgcccccggccttctcgccgccgcccccgccgggccgcgcctacgacacggtgcgctccagcttcaagcccggcctggaggcgcgcctgggcgcgggcgctgccggcctgtacgagccgggcgcggccctcggcccgctgccgtatcccgagcggcagaagcgcgcgcgctccatgatcatcctgcaggactcggcgcccgagtcgggcgacgcccctcgacccccgcccgcggccaccccgcccgagcgacccaagcgccggccgcggccgcccggccccgacagcccctacgccaacctgggcgccttcagcgccagcctcttcgctccgtccaagccgcagcgccgcaagagccccctggtgaagcagctgcaggtggaggacgcgcaggagcgcgcggccctggccgtgggcagccccggtcccggcggcggcagcttcgcccgcgagccctccccgacccaccgcggtccgcgcccgggtggcctcgactacggcgcgggcgatggcccggggctcgcgttcggcggcccgggcccggccaaggaccggcggctggaggagcggcgccgctccactgtgttcctgtccgtgggggccatcgagggcagcgcccccggcgcggatctgccatccctacagccctcccgctccatcgacgagcgcctcctggggaccggccccaccgccggccgcgacctgctgctgccctccccggtgtctgccctgaagccgttggtcagcggcccgagcctggggccctcgggttccaccttcatccacccactcaccggcaaacccctggaccccagctcacccctggcccttgccctggctgcccgagagcgagctctggcctcccaggcgccctcccggtcccccacacccgtgcacagtcccgacgccgaccgccccggacccctgtttgtggatgtacaggcccgggacccagagcgagggtccctggcttccccggctttctccccacggagcccagcctggattcctgtgcctgctcgcagggaggcagagaaggtcccccgggaggagcggaagtcacccgaggacaagaagtccatgatcctcagcgtcctggacacatccctgcagcggccagctggcctcatcgttgtgcacgccaccagcaacgggcaggagcccagcaggctggggggggccgaagaggagcgcccgggcaccccggagttggccccggcccccatgcagtcagcggctgtggcagagcccctgcccagcccccgggcccagccccctggtggcaccccggcagacgccgggccaggccagggcagctcagaggaagagccagagctggtgtttgctgtgaacctgccacctgcccagctgtcgtccagcgatgaggagaccagggaggagctggcccgaattgggttggtgccaccccctgaagagtttgccaacggggtcctgctggccaccccactcgctggcccgggcccctcgcccaccacggtgcccagcccggcctcagggaagcccagcagtgagccaccccctgcccctgagtctgcagccgactctggggtggaggaggctgacacacgcagctccagcgacccccacctggagaccacaagcaccatctccacggtgtccagcatgtccaccttgagctcggagagcggggaactcactgacacccacacctccttcgctgacggacacacttttctactcgagaagccaccagtgcctcccaagcccaagctcaagtccccgctggggaaggggccggtgaccttcagggacccgctgctgaagcagtcctcggacagcgagctcatggcccagcagcaccacgccgcctctgccgggctggcctctgccgccgggcctgcccgccctcgctacctcttccagagaaggtccaagctatggggggaccccgtggagagccgggggctccctgggcctgaagacgacaaaccaactgtgatcagtgagctcagctcccgcctgcagcagctgaacaaggacacgcgttccctgggggaggaaccagttggtggcctgggcagcctgctggaccctgccaagaagtcgcccatcgcagcagctcggctcttcagcagcctcggtgagctgagctccatttcagcgcagcgcagccccgggggcccgggcggcggggcctcgtactcggtgaggcccagtggccgctaccccgtggcgagacgcgccccgagcccggtgaagcccgcgtcgctggagcgggtggaggggctgggggcgggcgcggggggcgcagggcggcccttcggcctcacgccccccaccatcctcaagtcgtccagcctctccatcccgcacgagcccaaggaggtgcgcttcgtggtgcgcagcgtgagcgcgcgcagtcgctccccctcgccgtcgccgctgccctcgcccgcgtccggccccggccccggcgcccccggcccacgccgacccttccagcagaagccgctgcagctctggagcaagttcgacgtgggcgactggctggagagcatccacctaggcgagcaccgcgaccgcttcgaggaccatgagatagaaggcgcgcacctacccgcgcttaccaaggacgacttcgtggagctgggcgtcacgcgcgtgggccaccgcatgaacatcgagcgcgcgctcaggcagctggacggcagctgacgccccacccccactcccgccccggccgtgccctgccggcagggccccccacccccaccccgggccgcgggctcggcctgccccttacgacggcgcccgggccaggaatgttgcatgaatcgtcctgtttgctgttgctcggagactcgccctgtacattgcttagtgccctcaccggccgcccagcccacccagcgcacagtcaggaagggcgtggaccagggaggctggggcgggaggtgccgggggtggggtgccctagcgtgaccacctccttcgcagctcctggtggccattctcccagagggggaacctagtccagcatgcgaggtcaggacccgccttggtgactcggggggaggggggagacattgggattctcgatgggggccaaggagcccccctgttttgcatattttaatccactctatatttggaacgagaaaaggaacaaatatctctgtccgtaatagtttcctctcccctcccttctacttccactggtcccactgcagctgcccagtcttccatctccggcccctcactgccactgccaccccacaacggggcaggggacgctccagctggtctggggttggccagggccctagtggcccgccctggggccccagctcggcccctcgcctcgctgagctctagtgtgccccaccgacccttcaggtgctgctcgtggtgggaggggcggcaggccgcgggtcctgctgtgcacccgcgggaccagccggcctgggagaccatcggccgggggggatgagggcagggccctgccgctccaccgcagccatcttcctcacagggtctctccccaaggagggggctagcttggtccccatgctcttgggcaactacagcagagaagcctccctgccttggaccccaaagtctcctgtcctgccctttatgtgtgtgggtgaaactgggtgcgtctgagcacgtgggagccgtgtgtgtgcctgattactgagtggccaccaggggccgctctggactagcgcggggccgtggaggcgtgcaccgtgtgcatgcgtggggtgtacctgtgagagcaccctgtctcctcttccaaagaaagtcagaggccatcctgcaccctgggtccagctgtttgcccagcctgtccttccagagcctcacccagcctgagcggggttccctggtgaatccctgctgcttggggaggccccaagggccccttggaggcagcgcccccaccttgggcttctgagggcatcatagggggacccctagagtcagttcaccacaggccctggggagagtcaaagacccccgagggtgcccagccccccacactgtgactcctcacactcagcgatgacctgtggggtggggggccctgggacgtttttaaacctagggtttggagtctggactaagctccatccacgtcactcacaagtttctgtttatatttctagctttttttaataaaataaaaaaaaaaagaaaacagaagttttcacaacccaggggcctggcacgccggtctgtgcctgcccgccccgccctggcccaccggccccactccctgggcacagagtcacacccactcatccttccgccaacagtccaggtcacacagcagcagtcactgtaacagactgccacatacacactcggtctcacactcacctgtgggttttggttccgttcaatttgggtttttaactttacagggtcagttccgcttcacctccttttgtatggagttccatccggggggtttcaccccctgctccagtcctgaggcctcctgaccctgacgttgtgatacgccccacagagatctatgtttcttatattattattattgataataattattataatattattatgtaataaatttataagaaatgaag

SEQ ID NO: 228833 - DNA, 7130 bp, Artificial Sequence
  derived and/or modified sequence
atggacggccccggggccagcgccgtggtcgtgcgcgtcggcatcccggacctgcagcagacgaagtgcctgcgcctggacccggccgcgcccgtgtgggccgccaagcagcgcgtgctctgcgccctcaaccacagcctccaggacgcgctcaactatgggcttttccagccgccctcccggggccgcgccggcaagttcctggatgaggagcggctcctgcaggagtacccgcccaacctggacacgcccctgccctacctggagtttcgatacaagcggcgagtttatgcccagaacctcatcgatgataagcagtttgcaaagcttcacacaaaggcgaacctgaagaagttcatggactacgtccagctgcatagcacggacaaggtggcacgcctgttggacaaggggctggaccccaacttccatgaccctgactcaggagagtgccccctgagcctcgcagcccagctggacaacgccacggacctgctaaaggtgctgaagaatggtggtgcccacctggacttccgcactcgcgatgggctcactgccgtgcactgtgccacacgccagcggaatgcggcagcactgacgaccctgctggacctgggggcttcacctgactacaaggacagccgcggcttgacacccctctaccacagcgccctggggggtggggatgccctctgctgtgagctgcttctccacgaccacgctcagctggggatcaccgacgagaatggctggcaggagatccaccaggcctgccgctttgggcacgtgcagcatctggagcacctgctgttctatggggcagacatgggggcccagaacgcctcggggaacacagccctgcacatctgtgccctctacaaccaggagagctgtgctcgtgtcctgctcttccgtggagctaacagggatgtccgcaactacaacagccagacagccttccaggtggccatcatcgcagggaactttgagcttgcagaggttatcaagacccacaaagactcggatgttgtaccattcagggaaacccccagctatgcgaagcggcggcgactggctggccccagtggcttggcatcccctcggcctctgcagcgctcagccagcgatatcaacctgaagggggaggcacagccagcagcttctcctggaccctcgctgagaagcctcccccaccagctgctgctccagcggctgcaagaggagaaagatcgtgaccgggatgccgaccaggagagcaacatcagtggccctttagcaggcagggccggccaaagcaagatcagcgagcctggcgcgcccaggagctgtattcgaattcgagctcggttccccgcgccccctgcgccccccgcaccgccgccccggggcccgaagcggaaactttacagcgccgtccccggccgcaagttcatcgccgtgaaggcgcacagcccgcagggtgaaggcgagatcccgctgcaccgcggcgaggccgtgaaggtgctcagcattggggagggcggtttctgggagggaaccgtgaaaggccgcacgggctggttcccggccgactgcgtggaggaagtgcagatgaggcagcatgacacacggcctgaaacgcgggaggaccggacgaagcggctctttcggcactacacagtgggctcctacgacagcctcacctcacacagcgattatgtcattgatgacaaagtggctgtcctgcagaaacgggaccacgagggctttggttttgtgctccggggagccaaagcagagacccccatcgaggagttcacgcccacgccagccttcccggcgctgcagtatctcgagtcggtggacgtggagggtgtggcctggagggccgggctgcgcacgggagacttcctcatcgaggtgaacggggtgaacgtggtgaaggtcggacacaagcaggtggtggctctgattcgccagggtggcaaccgcctcgtcatgaaggttgtgtctgtgacaaggaagccagaagaggacggggctcggcgcagagccccaccgccccccaagagggcccccagcaccacactgaccctgcgctccaagtccatgacagctgagctcgaggaacttggtgagtggcgggggagggaggggagcgagaagctggacgagatgctggcagccgccgcagagccaacgctgcggccagacatcgcagacgcagactccagagccgccaccgtcaaacagaggcccaccagtcggaggatcacacccgccgagattagctcattgtttgaacgccagggcctcccaggcccagagaagctgccgggctccttgcggaaggggattccacggaccaagtctgtaggggaggacgagaagctggcgtccctgctggaagggcgcttcccgcggagcacctcgatgcaagacccggtgcgcgagggtcgcggcatcccgcccccgccgcagaccgcgccgcctcccccgcccgcgccctactacttcgactcggggccgcccccggccttctcgccgccgcccccgccgggccgcgcctacgacacggtgcgctccagcttcaagcccggcctggaggcgcgcctgggcgcgggcgctgccggcctgtacgagccgggcgcggccctcggcccgctgccgtatcccgagcggcagaagcgcgcgcgctccatgatcatcctgcaggactcggcgcccgagtcgggcgacgcccctcgacccccgcccgcggccaccccgcccgagcgacccaagcgccggccgcggccgcccggccccgacagcccctacgccaacctgggcgccttcagcgccagcctcttcgctccgtccaagccgcagcgccgcaagagccccctggtgaagcagctgcaggtggaggacgcgcaggagcgcgcggccctggccgtgggcagccccggtcccggcggcggcagcttcgcccgcgagccctccccgacccaccgcggtccgcgcccgggtggcctcgactacggcgcgggcgatggcccggggctcgcgttcggcggcccgggcccggccaaggaccggcggctggaggagcggcgccgctccactgtgttcctgtccgtgggggccatcgagggcagcgcccccggcgcggatctgccatccctacagccctcccgctccatcgacgagcgcctcctggggaccggccccaccgccggccgcgacctgctgctgccctccccggtgtctgccctgaagccgttggtcagcggcccgagcctggggccctcgggttccaccttcatccacccactcaccggcaaacccctggaccccagctcacccctggcccttgccctggctgcccgagagcgagctctggcctcccaggcgccctcccggtcccccacacccgtgcacagtcccgacgccgaccgccccggacccctgtttgtggatgtacaggcccgggacccagagcgagggtccctggcttccccggctttctccccacggagcccagcctggattcctgtgcctgctcgcagggaggcagagaaggtcccccgggaggagcggaagtcacccgaggacaagaagtccatgatcctcagcgtcctggacacatccctgcagcggccagctggcctcatcgttgtgcacgccaccagcaacgggcaggagcccagcaggctggggggggccgaagaggagcgcccgggcaccccggagttggccccggcccccatgcagtcagcggctgtggcagagcccctgcccagcccccgggcccagccccctggtggcaccccggcagacgccgggccaggccagggcagctcagaggaagagccagagctggtgtttgctgtgaacctgccacctgcccagctgtcgtccagcgatgaggagaccagggaggagctggcccgaattgggttggtgccaccccctgaagagtttgccaacggggtcctgctggccaccccactcgctggcccgggcccctcgcccaccacggtgcccagcccggcctcagggaagcccagcagtgagccaccccctgcccctgagtctgcagccgactctggggtggaggaggctgacacacgcagctccagcgacccccacctggagaccacaagcaccatctccacggtgtccagcatgtccaccttgagctcggagagcggggaactcactgacacccacacctccttcgctgacggacacacttttctactcgagaagccaccagtgcctcccaagcccaagctcaagtccccgctggggaaggggccggtgaccttcagggacccgctgctgaagcagtcctcggacagcgagctcatggcccagcagcaccacgccgcctctgccgggctggcctctgccgccgggcctgcccgccctcgctacctcttccagagaaggtccaagctatggggggaccccgtggagagccgggggctccctgggcctgaagacgacaaaccaactgtgatcagtgagctcagctcccgcctgcagcagctgaacaaggacacgcgttccctgggggaggaaccagttggtggcctgggcagcctgctggaccctgccaagaagtcgcccatcgcagcagctcggtgtcgatcccccatggtcgggctcaggctcttcagcagcctcggtgagctgagctccatttcagcgcagcgcagccccgggggcccgggcggcggggcctcgtactcggtgaggcccagtggccgctaccccgtggcgagacgcgccccgagcccggtgaagcccgcgtcgctggagcgggtggaggggctgggggcgggcgcggggggcgcagggcggcccttcggcctcacgccccccaccatcctcaagtcgtccagcctctccatcccgcacgagcccaaggaggtgcgcttcgtggtgcgcagcgtgagcgcgcgcagtcgctccccctcgccgtcgccgctgccctcgcccgcgtccggccccggccccggcgcccccggcccacgccgacccttccagcagaagccgctgcagctctggagcaagttcgacgtgggcgactggctggagagcatccacctaggcgagcaccgcgaccgcttcgaggaccatgagatagaaggcgcgcacctacccgcgcttaccaaggacgacttcgtggagctgggcgtcacgcgcgtgggccaccgcatgaacatcgagcgcgcgctcaggcagctggacggcagctgacgccccacccccactcccgccccggccgtgccctgccggcagggccccccacccccaccccgggccgcgggctcggcctgccccttacgacggcgcccgggccaggaatgttgcatgaatcgtcctgtttgctgttgctcggagactcgccctgtacattgcttagtgccctcaccggccgcccagcccacccagcgcacagtcaggaagggcgtggaccagggaggctggggcgggaggtgccgggggtggggtgccctagcgtgaccacctccttcgcagctcctggtggccattctcccagagggggaacctagtccagcatgcgaggtcaggacccgccttggtgactcggggggaggggggagacattgggattctcgatgggggccaaggagcccccctgttttgcatattttaatccactctatatttggaacgagaaaaggaacaaatatctctgtccgtaatagtttcctctcccctcccttctacttccactggtcccactgcagctgcccagtcttccatctccggcccctcactgccactgccaccccacaacggggcaggggacgctccagctggtctggggttggccagggccctagtggcccgccctggggccccagctcggcccctcgcctcgctgagctctagtgtgccccaccgacccttcaggtgctgctcgtggtgggaggggcggcaggccgcgggtcctgctgtgcacccgcgggaccagccggcctgggagaccatcggccgggggggatgagggcagggccctgccgctccaccgcagccatcttcctcacagggtctctccccaaggagggggctagcttggtccccatgctcttgggcaactacagcagagaagcctccctgccttggaccccaaagtctcctgtcctgccctttatgtgtgtgggtgaaactgggtgcgtctgagcacgtgggagccgtgtgtgtgcctgattactgagtggccaccaggggccgctctggactagcgcggggccgtggaggcgtgcaccgtgtgcatgcgtggggtgtacctgtgagagcaccctgtctcctcttccaaagaaagtcagaggccatcctgcaccctgggtccagctgtttgcccagcctgtccttccagagcctcacccagcctgagcggggttccctggtgaatccctgctgcttggggaggccccaagggccccttggaggcagcgcccccaccttgggcttctgagggcatcatagggggacccctagagtcagttcaccacaggccctggggagagtcaaagacccccgagggtgcccagccccccacactgtgactcctcacactcagcgatgacctgtggggtggggggccctgggacgtttttaaacctagggtttggagtctggactaagctccatccacgtcactcacaagtttctgtttatatttctagctttttttaataaaataaaaaaaaaaagaaaacagaagttttcacaacccaggggcctggcacgccggtctgtgcctgcccgccccgccctggcccaccggccccactccctgggcacagagtcacacccactcatccttccgccaacagtccaggtcacacagcagcagtcactgtaacagactgccacatacacactcggtctcacactcacctgtgggttttggttccgttcaatttgggtttttaactttacagggtcagttccgcttcacctccttttgtatggagttccatccggggggtttcaccccctgctccagtcctgaggcctcctgaccctgacgttgtgatacgccccacagagatctatgtttcttatattattattattgataataattattataatattattatgtaataaatttataagaaatgaag

SEQ ID NO: 228834 - DNA, 5244 bp, Artificial Sequence
  derived and/or modified sequence
atggacggccccggcgccagcgccgtggtggtgagagtgggcatccccgacctgcagcagaccaagtgcctgagactggaccccgccgcccccgtgtgggccgccaagcagagagtgctgtgcgccctgaaccacagcctgcaggacgccctgaactacggcctgttccagccccccagcagaggcagagccggcaagttcctggacgaggagagactgctgcaggagtacccccccaacctggacacccccctgccctacctggagttcagatacaagagaagagtgtacgcccagaacctgatcgacgacaagcagttcgccaagctgcacaccaaggccaacctgaagaagttcatggactacgtgcagctgcacagcaccgacaaggtggccagactgctggacaagggcctggaccccaacttccacgaccccgacagcggcgagtgccccctgagcctggccgcccagctggacaacgccaccgacctgctgaaggtgctgaagaacggcggcgcccacctggacttcagaaccagagacggcctgaccgccgtgcactgcgccaccagacagagaaacgccgccgccctgaccaccctgctggacctgggcgccagccccgactacaaggacagcagaggcctgacccccctgtaccacagcgccctgggcggcggcgacgccctgtgctgcgagctgctgctgcacgaccacgcccagctgggcatcaccgacgagaacggctggcaggagatccaccaggcctgcagattcggccacgtgcagcacctggagcacctgctgttctacggcgccgacatgggcgcccagaacgccagcggcaacaccgccctgcacatctgcgccctgtacaaccaggagagctgcgccagagtgctgctgttcagaggcgccaacagagacgtgagaaactacaacagccagaccgccttccaggtggccatcatcgccggcaacttcgagctggccgaggtgatcaagacccacaaggacagcgacgtggtgcccttcagagagacccccagctacgccaagagaagaagactggccggccccagcggcctggccagccccagacccctgcagagaagcgccagcgacatcaacctgaagggcgaggcccagcccgccgccagccccggccccagcctgagaagcctgccccaccagctgctgctgcagagactgcaggaggagaaggacagagacagagacgccgaccaggagagcaacatcagcggccccctggccggcagagccggccagagcaagatcagcgaccccggccccggccccggcggcgtgggcggcgcccccctgcccccccccggcgcccccagaagctgcatcagaatcagagccagattccccgccccccccgccccccccgcccccccccccagaggccccaagagaaagctgtacagcgccgtgcccggcagaaagttcatcgccgtgaaggcccacagcccccagggcgagggcgagatccccctgcacagaggcgaggccgtgaaggtgctgagcatcggcgagggcggcttctgggagggcaccgtgaagggcagaaccggctggttccccgccgactgcgtggaggaggtgcagatgagacagcacgacaccagacccgagaccagagaggacagaaccaagagactgttcagacactacaccgtgggcagctacgacagcctgaccagccacagcgactacgtgatcgacgacaaggtggccgtgctgcagaagagagaccacgagggcttcggcttcgtgctgagaggcgccaaggccgagacccccatcgaggagttcacccccacccccgccttccccgccctgcagtacctggagagcgtggacgtggagggcgtggcctggagagccggcctgagaaccggcgacttcctgatcgaggtgaacggcgtgaacgtggtgaaggtgggccacaagcaggtggtggccctgatcagacagggcggcaacagactggtgatgaaggtggtgagcgtgaccagaaagcccgaggaggacggcgccagaagaagagccccccccccccccaagagagcccccagcaccaccctgaccctgagaagcaagagcatgaccgccgagctggaggagctggccagcatcagaagaagaaagggcgagaagctggacgagatgctggccgccgccgccgagcccaccctgagacccgacatcgccgacgccgacagcagagccgccaccgtgaagcagagacccaccagcagaagaatcacccccgccgagatcagcagcctgttcgagagacagggcctgcccggccccgagaagctgcccggcagcctgagaaagggcatccccagaaccaagagcgtgggcgaggacgagaagctggccagcctgctggagggcagattccccagaagcaccagcatgcaggaccccgtgagagagggcagaggcatccccccccccccccagaccgcccccccccccccccccgccccctactacttcgacagcggccccccccccgccttcagccccccccccccccccggcagagcctacgacaccgtgagaagcagcttcaagcccggcctggaggccagactgggcgccggcgccgccggcctgtacgagcccggcgccgccctgggccccctgccctaccccgagagacagaagagagccagaagcatgatcatcctgcaggacagcgcccccgagagcggcgacgcccccagacccccccccgccgccaccccccccgagagacccaagagaagacccagaccccccggccccgacagcccctacgccaacctgggcgccttcagcgccagcctgttcgcccccagcaagccccagagaagaaagagccccctggtgaagcagctgcaggtggaggacgcccaggagagagccgccctggccgtgggcagccccggccccggcggcggcagcttcgccagagagcccagccccacccacagaggccccagacccggcggcctggactacggcgccggcgacggccccggcctggccttcggcggccccggccccgccaaggacagaagactggaggagagaagaagaagcaccgtgttcctgagcgtgggcgccatcgagggcagcgcccccggcgccgacctgcccagcctgcagcccagcagaagcatcgacgagagactgctgggcaccggccccaccgccggcagagacctgctgctgcccagccccgtgagcgccctgaagcccctggtgagcggccccagcctgggccccagcggcagcaccttcatccaccccctgaccggcaagcccctggaccccagcagccccctggccctggccctggccgccagagagagagccctggccagccaggcccccagcagaagccccacccccgtgcacagccccgacgccgacagacccggccccctgttcgtggacgtgcaggccagagaccccgagagaggcagcctggccagccccgccttcagccccagaagccccgcctggatccccgtgcccgccagaagagaggccgagaaggtgcccagagaggagagaaagagccccgaggacaagaagagcatgatcctgagcgtgctggacaccagcctgcagagacccgccggcctgatcgtggtgcacgccaccagcaacggccaggagcccagcagactgggcggcgccgaggaggagagacccggcacccccgagctggcccccgcccccatgcagagcgccgccgtggccgagcccctgcccagccccagagcccagccccccggcggcacccccgccgacgccggccccggccagggcagcagcgaggaggagcccgagctggtgttcgccgtgaacctgccccccgcccagctgagcagcagcgacgaggagaccagagaggagctggccagaatcggcctggtgcccccccccgaggagttcgccaacggcgtgctgctggccacccccctggccggccccggccccagccccaccaccgtgcccagccccgccagcggcaagcccagcagcgagcccccccccgcccccgagagcgccgccgacagcggcgtggaggaggccgacaccagaagcagcagcgacccccacctggagaccaccagcaccatcagcaccgtgagcagcatgagcaccctgagcagcgagagcggcgagctgaccgacacccacaccagcttcgccgacggccacaccttcctgctggagaagccccccgtgccccccaagcccaagctgaagagccccctgggcaagggccccgtgaccttcagagaccccctgctgaagcagagcagcgacagcgagctgatggcccagcagcaccacgccgccagcgccggcctggccagcgccgccggccccgccagacccagatacctgttccagagaagaagcaagctgtggggcgaccccgtggagagcagaggcctgcccggccccgaggacgacaagcccaccgtgatcagcgagctgagcagcagactgcagcagctgaacaaggacaccagaagcctgggcgaggagcccgtgggcggcctgggcagcctgctggaccccgccaagaagagccccatcgccgccgccagactgttcagcagcctgggcgagctgagcagcatcagcgcccagagaagccccggcggccccggcggcggcgccagctacagcgtgagacccagcggcagataccccgtggccagaagagcccccagccccgtgaagcccgccagcctggagagagtggagggcctgggcgccggcgccggcggcgccggcagacccttcggcctgaccccccccaccatcctgaagagcagcagcctgagcatcccccacgagcccaaggaggtgagattcgtggtgagaagcgtgagcgccagaagcagaagccccagccccagccccctgcccagccccgccagcggccccggccccggcgcccccggccccagaagacccttccagcagaagcccctgcagctgtggagcaagttcgacgtgggcgactggctggagagcatccacctgggcgagcacagagacagattcgaggaccacgagatcgagggcgcccacctgcccgccctgaccaaggacgacttcgtggagctgggcgtgaccagagtgggccacagaatgaacatcgagagagccctgagacagctggacggcagctag

SEQ ID NO: 228835 - DNA, 5229 bp, Artificial Sequence
  derived and/or modified sequence
atggacggccccggcgccagcgccgtggtggtgagagtgggcatccccgacctgcagcagaccaagtgcctgagactggaccccgccgcccccgtgtgggccgccaagcagagagtgctgtgcgccctgaaccacagcctgcaggacgccctgaactacggcctgttccagccccccagcagaggcagagccggcaagttcctggacgaggagagactgctgcaggagtacccccccaacctggacacccccctgccctacctggagttcagatacaagagaagagtgtacgcccagaacctgatcgacgacaagcagttcgccaagctgcacaccaaggccaacctgaagaagttcatggactacgtgcagctgcacagcaccgacaaggtggccagactgctggacaagggcctggaccccaacttccacgaccccgacagcggcgagtgccccctgagcctggccgcccagctggacaacgccaccgacctgctgaaggtgctgaagaacggcggcgcccacctggacttcagaaccagagacggcctgaccgccgtgcactgcgccaccagacagagaaacgccgccgccctgaccaccctgctggacctgggcgccagccccgactacaaggacagcagaggcctgacccccctgtaccacagcgccctgggcggcggcgacgccctgtgctgcgagctgctgctgcacgaccacgcccagctgggcatcaccgacgagaacggctggcaggagatccaccaggcctgcagattcggccacgtgcagcacctggagcacctgctgttctacggcgccgacatgggcgcccagaacgccagcggcaacaccgccctgcacatctgcgccctgtacaaccaggagagctgcgccagagtgctgctgttcagaggcgccaacagagacgtgagaaactacaacagccagaccgccttccaggtggccatcatcgccggcaacttcgagctggccgaggtgatcaagacccacaaggacagcgacgtggtgcccttcagagagacccccagctacgccaagagaagaagactggccggccccagcggcctggccagccccagacccctgcagagaagcgccagcgacatcaacctgaagggcgaggcccagcccgccgccagccccggccccagcctgagaagcctgccccaccagctgctgctgcagagactgcaggaggagaaggacagagacagagacgccgaccaggagagcaacatcagcggccccctggccggcagagccggccagagcaagatcagcgagcccggcgcccccagaagctgcatcagaatcagagccagattccccgccccccccgccccccccgcccccccccccagaggccccaagagaaagctgtacagcgccgtgcccggcagaaagttcatcgccgtgaaggcccacagcccccagggcgagggcgagatccccctgcacagaggcgaggccgtgaaggtgctgagcatcggcgagggcggcttctgggagggcaccgtgaagggcagaaccggctggttccccgccgactgcgtggaggaggtgcagatgagacagcacgacaccagacccgagaccagagaggacagaaccaagagactgttcagacactacaccgtgggcagctacgacagcctgaccagccacagcgactacgtgatcgacgacaaggtggccgtgctgcagaagagagaccacgagggcttcggcttcgtgctgagaggcgccaaggccgagacccccatcgaggagttcacccccacccccgccttccccgccctgcagtacctggagagcgtggacgtggagggcgtggcctggagagccggcctgagaaccggcgacttcctgatcgaggtgaacggcgtgaacgtggtgaaggtgggccacaagcaggtggtggccctgatcagacagggcggcaacagactggtgatgaaggtggtgagcgtgaccagaaagcccgaggaggacggcgccagaagaagagccccccccccccccaagagagcccccagcaccaccctgaccctgagaagcaagagcatgaccgccgagctggaggagctgggcgagtggagaggcagagagggcagcgagaagctggacgagatgctggccgccgccgccgagcccaccctgagacccgacatcgccgacgccgacagcagagccgccaccgtgaagcagagacccaccagcagaagaatcacccccgccgagatcagcagcctgttcgagagacagggcctgcccggccccgagaagctgcccggcagcctgagaaagggcatccccagaaccaagagcgtgggcgaggacgagaagctggccagcctgctggagggcagattccccagaagcaccagcatgcaggaccccgtgagagagggcagaggcatccccccccccccccagaccgcccccccccccccccccgccccctactacttcgacagcggccccccccccgccttcagccccccccccccccccggcagagcctacgacaccgtgagaagcagcttcaagcccggcctggaggccagactgggcgccggcgccgccggcctgtacgagcccggcgccgccctgggccccctgccctaccccgagagacagaagagagccagaagcatgatcatcctgcaggacagcgcccccgagagcggcgacgcccccagacccccccccgccgccaccccccccgagagacccaagagaagacccagaccccccggccccgacagcccctacgccaacctgggcgccttcagcgccagcctgttcgcccccagcaagccccagagaagaaagagccccctggtgaagcagctgcaggtggaggacgcccaggagagagccgccctggccgtgggcagccccggccccggcggcggcagcttcgccagagagcccagccccacccacagaggccccagacccggcggcctggactacggcgccggcgacggccccggcctggccttcggcggccccggccccgccaaggacagaagactggaggagagaagaagaagcaccgtgttcctgagcgtgggcgccatcgagggcagcgcccccggcgccgacctgcccagcctgcagcccagcagaagcatcgacgagagactgctgggcaccggccccaccgccggcagagacctgctgctgcccagccccgtgagcgccctgaagcccctggtgagcggccccagcctgggccccagcggcagcaccttcatccaccccctgaccggcaagcccctggaccccagcagccccctggccctggccctggccgccagagagagagccctggccagccaggcccccagcagaagccccacccccgtgcacagccccgacgccgacagacccggccccctgttcgtggacgtgcaggccagagaccccgagagaggcagcctggccagccccgccttcagccccagaagccccgcctggatccccgtgcccgccagaagagaggccgagaaggtgcccagagaggagagaaagagccccgaggacaagaagagcatgatcctgagcgtgctggacaccagcctgcagagacccgccggcctgatcgtggtgcacgccaccagcaacggccaggagcccagcagactgggcggcgccgaggaggagagacccggcacccccgagctggcccccgcccccatgcagagcgccgccgtggccgagcccctgcccagccccagagcccagccccccggcggcacccccgccgacgccggccccggccagggcagcagcgaggaggagcccgagctggtgttcgccgtgaacctgccccccgcccagctgagcagcagcgacgaggagaccagagaggagctggccagaatcggcctggtgcccccccccgaggagttcgccaacggcgtgctgctggccacccccctggccggccccggccccagccccaccaccgtgcccagccccgccagcggcaagcccagcagcgagcccccccccgcccccgagagcgccgccgacagcggcgtggaggaggccgacaccagaagcagcagcgacccccacctggagaccaccagcaccatcagcaccgtgagcagcatgagcaccctgagcagcgagagcggcgagctgaccgacacccacaccagcttcgccgacggccacaccttcctgctggagaagccccccgtgccccccaagcccaagctgaagagccccctgggcaagggccccgtgaccttcagagaccccctgctgaagcagagcagcgacagcgagctgatggcccagcagcaccacgccgccagcgccggcctggccagcgccgccggccccgccagacccagatacctgttccagagaagaagcaagctgtggggcgaccccgtggagagcagaggcctgcccggccccgaggacgacaagcccaccgtgatcagcgagctgagcagcagactgcagcagctgaacaaggacaccagaagcctgggcgaggagcccgtgggcggcctgggcagcctgctggaccccgccaagaagagccccatcgccgccgccagatgcagaagccccatggtgggcctgagactgttcagcagcctgggcgagctgagcagcatcagcgcccagagaagccccggcggccccggcggcggcgccagctacagcgtgagacccagcggcagataccccgtggccagaagagcccccagccccgtgaagcccgccagcctggagagagtggagggcctgggcgccggcgccggcggcgccggcagacccttcggcctgaccccccccaccatcctgaagagcagcagcctgagcatcccccacgagcccaaggaggtgagattcgtggtgagaagcgtgagcgccagaagcagaagccccagccccagccccctgcccagccccgccagcggccccggccccggcgcccccggccccagaagacccttccagcagaagcccctgcagctgtggagcaagttcgacgtgggcgactggctggagagcatccacctgggcgagcacagagacagattcgaggaccacgagatcgagggcgcccacctgcccgccctgaccaaggacgacttcgtggagctgggcgtgaccagagtgggccacagaatgaacatcgagagagccctgagacagctggacggcagctag

SEQ ID NO: 228836 - protein, 472 aa, Artificial Sequence
  derived and/or modified sequence
MELQDPKMNGALPSDAVGYRQEREGFLPSRGPAPGSKPVQFMDFEGKTSFGMSVFNLSNAIMGSGILGLAYAMAHTGVIFFLALLLCIALLSSYSIHLLLTCAGIAGIRAYEQLGQRAFGPAGKVVVATVICLHNVGAMSSYLFIIKSELPLVIGTFLYMDPEGDWFLKGNLLIIIVSVLIILPLALMKHLGYLGYTSGLSLTCMLFFLVSVIYKKFQLGCAIGHNETAMESEALVGLPSQGLNSSCEAQMFTVDSQMSYTVPIMAFAFVCHPEVLPIYTELCRPSKRRMQAVANVSIGAMFCMYGLTATFGYLTFYSSVKAEMLHMYSQKDPLILCVRLAVLLAVTLTVPVVLFPIRRALQQLLFPGKAFSWPRHVAIALILLVLVNVLVICVPTIRDIFGVIGSTSAPSLIFILPSIFYLRIVPSEVEPFLSWPKIQALCFGVLGVLFMAVSLGFMFANWATGQSRMSGH

SEQ ID NO: 228837 - protein, 421 aa, Artificial Sequence
  derived and/or modified sequence
MSVFNLSNAIMGSGILGLAYAMAHTGVIFFLALLLCIALLSSYSIHLLLTCAGIAGIRAYEQLGQRAFGPAGKVVVATVICLHNVGAMSSYLFIIKSELPLVIGTFLYMDPEGDWFLKGNLLIIIVSVLIILPLALMKHLGYLGYTSGLSLTCMLFFLVSVIYKKFQLGCAIGHNETAMESEALVGLPSQGLNSSCEAQMFTVDSQMSYTVPIMAFAFVCHPEVLPIYTELCRPSKRRMQAVANVSIGAMFCMYGLTATFGYLTFYSSVKAEMLHMYSQKDPLILCVRLAVLLAVTLTVPVVLFPIRRALQQLLFPGKAFSWPRHVAIALILLVLVNVLVICVPTIRDIFGVIGSTSAPSLIFILPSIFYLRIVPSEVEPFLSWPKIQALCFGVLGVLFMAVSLGFMFANWATGQSRMSGH

SEQ ID NO: 228838 - DNA, 1419 bp, Artificial Sequence
  derived and/or modified sequence
atggagttgcaggaccctaagatgaatggagctcttcctagcgatgccgtgggttaccgccaggagagggagggattcctgcctagccgcggtccagcccccgggagcaaacccgttcaattcatggactttgaaggtaaaacttcttttggtatgtcagtgtttaaccttagtaatgctatcatggggagcggtattctcggactggcatatgctatggcccacactggggtgatttttttcctggctcttctcctgtgcatagctctcctaagcagctactcaatccatttgctgttgacgtgcgcggggatcgccggcattcgggcttacgagcagttaggccagagagccttcggacctgcggggaaggttgtagtggccacagtcatctgcctgcataacgtcggggccatgtcttcctacctgtttatcataaagtccgagctacctctggtaattggcaccttcctctacatggacccggaaggagactggtttctgaagggaaacctgctgattattatcgtcagcgttctaatcattctgcctctggcgttaatgaagcacctgggatacctcggttacacatcagggctttccctcacctgcatgttattcttcctcgtgagcgttatatacaagaaatttcagctcggttgcgccataggccataacgagacggccatggagtcggaggctctggtgggactcccatctcagggccttaacagctcttgtgaggcacagatgttcactgttgactctcagatgtcatacaccgtgcctatcatggccttcgcttttgtgtgccaccctgaggtcctccccatatacacagaactgtgccgcccttccaagcggcggatgcaggctgtggctaatgtttccattggagctatgttttgtatgtatggactcacagcgaccttcgggtatctgacattttactcttccgtcaaagcggaaatgttacatatgtattcacagaaggatcccctgatactctgcgtgaggctcgcagttcttttggcggtgaccctgactgttcccgttgtgctttttcccatccgccgggcgctgcagcagttgctgtttcctggaaaagcgttcagctggccgcgccacgtcgcgatcgccctcatactgctcgttctggtcaacgtgctggtaatttgtgtaccaactattcgtgatatctttggggtcatcgggtcaacttccgctccatccttgattttcattttgccatccattttctacctgcgcatagtgccgtctgaggtggagcctttcctgtcttggccaaaaattcaggccctgtgctttggggtcctgggagttctattcatggctgttagtcttggatttatgttcgcaaactgggctaccggccagagccgcatgagcggccactag

SEQ ID NO: 228839 - DNA, 1266 bp, Artificial Sequence
  derived and/or modified sequence
atgtccgtgtttaatctgtcgaacgcaataatgggtagcggaatattaggcctggcctatgccatggcccacactggggtcatattttttctcgcccttcttctctgcatcgccttactgtcctcttactctatccacctgcttctgacctgcgcgggtattgccggcatccgcgcttatgagcagctaggccaaagagcctttggccctgccgggaaggtagtggtcgccactgtcatctgtctacacaatgtaggagccatgtcttcttacctattcattatcaaatccgagcttcccctcgtgatcggaactttcctgtacatggaccctgagggggattggtttctgaagggaaacctcctgattatcatcgtgagtgtccttatcattctgcctctcgccttgatgaagcatctgggatatctcggctacacttcaggcctgtccctaacgtgcatgctcttttttctggtgtctgtcatctataagaaattccagctgggctgcgccatcggtcataatgagaccgctatggagtccgaggccttagtgggtctcccgagccagggactcaacagctcctgtgaagcacagatgttcacagtggactcccagatgtcgtatacagtcccgatcatggcgttcgcattcgtgtgccatccggaagttctgcctatatatactgagttgtgccgtccttcgaaacgacgaatgcaggctgtcgccaatgtgagcatcggggcaatgttttgtatgtacggtcttacagctactttcggctacttaactttctactcctccgtgaaagcagagatgctgcacatgtattcccagaaagatccactgatactctgcgtacgtctggccgtcttgctcgccgtgactttgaccgtgccagtggtgctgttccctataaggcgagctctgcaacagctccttttcccgggcaaggcattttcttggcctaggcacgtggccatagcgctgatccttctggtgttggttaatgtactggtgatttgcgtgcctacaattagagacatcttcggcgtcataggatccaccagtgccccatctctcatcttcattctgcctagtatcttctacttacgaatagtgccttcagaggtggagccatttttaagttggcccaagatccaagctctctgctttggcgtgcttggggtgctgttcatggccgtttcattaggctttatgttcgcgaactgggccaccggacagtctcggatgagtggacattag

SEQ ID NO: 228840 - DNA, 1419 bp, Artificial Sequence
  derived and/or modified sequence
atggagctgcaggatccaaagatgaacggggcactgccctcggacgccgtggggtatcgccaggaaagagaaggctttctcccctctcgaggacccgcgccaggatcgaagcctgtccagtttatggattttgaaggaaagactagttttgggatgtcggtcttcaatttatctaatgcaattatgggctcgggtattttgggtctcgcctatgctatggcacacactggagtgatctttttcctcgctctactcctctgtatcgcgttgctgtcatcctatagcatccatctcttactgacatgtgctggaatcgcaggaattagggcctacgaacagctgggacagagggcctttggacctgcgggaaaggtggtcgtagctactgtgatctgcctccataacgttggggccatgagttcctacctgttcattatcaagtccgagctccctcttgtgatcggtacattcttgtacatggatccggaaggagattggttccttaaagggaatcttctcattatcattgtgtctgtgctgatcattctccctcttgccttaatgaagcacctgggttacctggggtatacaagcggcctctcattgacctgcatgctgttttttttggtcagcgtgatctataaaaagtttcaactggggtgtgctatagggcataatgagactgccatggagagtgaagcccttgtgggtcttccatctcaaggactgaatagttcttgcgaggctcaaatgtttaccgtggatagtcagatgtcctatactgttcccataatggcattcgcatttgtatgtcatccagaggttttaccaatctacaccgagctatgtagaccatcgaaacggcggatgcaggccgtggccaacgtcagcatcggtgccatgttttgcatgtacggcttgacagccacctttggttatctgacattttattcaagtgtgaaagccgagatgctccatatgtactctcagaaagatcctttaatactctgtgtccgcctggccgtcctactagcagtcacactcacggtgcccgtcgttctttttccaatcagacgggctctccaacagcttctgtttcccggcaaggcgttctcgtggccccgtcacgtggctattgccttgatactgttggtccttgtgaacgtgctggtcatttgtgttcctaccatcagagatatttttggtgtcatcggaagcacatccgcaccgtccctgatcttcattctgccctcgatattttatctcaggattgtaccatcggaggtcgagcctttcctgtcttggcccaaaattcaggctttgtgcttcggcgtgctaggcgtcctgttcatggccgtgtccttaggctttatgttcgcaaactgggccactggtcagtcaagaatgagtggacattag

SEQ ID NO: 228841 - DNA, 660 bp, Artificial Sequence
  derived and/or modified sequence
atggagctccaggatcccaagatgaatggcgccctgccttcagatgcagtgggctatagacaagaacgtgagggcttcctcccttctaggggtccagcaccgggctcaaagcccgtgcaatttatggatttcgagggcaaaacatccttcggcatgagcgtattcaacctgagcaacgccatcatgggtagcgggatcttgggactggcttacgctatggctcataccggtgttatcttctttctggcgctcctgctctgcatcgccctgctctcttcttactcgatccatctgctgctgacatgtgccggcatagccggtattagggcttacgagcagctggggcagagggcttttggaccagccgggaaagtcgtggttgccactgtcatctgtctccacaacgttggcgcaatgagcagttacctgttcattatcaagtctgagctgcccctggtcatcggaacctttctttacatggacccagaaggggactggttcctgaagggcaacttgctcattataatcgttagcgtgctgatcatcttaccattggctcttatgaaacatttaggttatctgggatatacctctggtcttagtctgacctgtatgctcttcttcttagttagcgtcatttacaaaaagttccagctgtag

SEQ ID NO: 228842 - DNA, 576 bp, Artificial Sequence
  derived and/or modified sequence
atggaacttcaagacccaaaaatgaacggggctttaccgtccgacgccgtggggtaccgccaagaaagggaaggctttctcccgtcaagggggcctgctccaggatctaaaccagtgcaattcatggatttcgagggtaaaacctctttcggcatgtcagtttttaacctgagcaatgcgatcatgggatctggcatcctcgggttggcctatgccatggcccataccggcgtgatctttttccttgccctgctcctctgtattgcgcttctgagttcctattctatccacttgctgttgacatgtgcaggaatcgccggcatcagggcttacgaacaactgggtcagagagccttcgggccagccggtaaagtggttgttgcaactgtcatctgtctgcacaatgtgggggcgatgtccagctatttattcattataaagtcagaactgccgctcgtcatcgggactttcctgtacatggatccagagggggactggttcctcaaaggcaaccttctcataataatcgtatccgtcctgattatcctacctctagcccttatgaagcatctctag

SEQ ID NO: 228843 - DNA, 495 bp, Artificial Sequence
  derived and/or modified sequence
atggagctgcaagatccaaagatgaatggcgccctgccttcggatgccgtcggctatagacaggagcgagagggattcctaccctctcgagggcccgctccaggttctaagcctgtgcagtttatggattttgaaggcaaaacaagcttcggcatgtctgtgttcaacctaagcaacgctatcatgggcagcggcattcttgggctcgcttacgccatggcccacaccggggtaatattctttctcgccctgctcctctgcatagccctcctgtccagttattcaatccacctcttactgacatgtgccggaattgccggtatcagggcctacgaacagctggggcaaagggcgttcggccctgccggcaaagtggtagtggctaccgtgatttgccttcacaatgtcggagccatgagctcgtatctatttattatcaagagtgagttgcctctagtgattggaactttcctgtatatggaccccgaagggtag

SEQ ID NO: 228844 - DNA, 840 bp, Artificial Sequence
  derived and/or modified sequence
atggagttgcaagacccaaaaatgaatggcgcactgccatccgatgccgttggatataggcaagagagggagggattcctgccaagtcggggacccgctcccggcagcaaacctgttcagtttatggatttcgaaggcaagacctccttcggcatgtcagtgtttaatctgtccaatgcgatcatgggctccggaatactgggcttagcatatgcgatggcccacacaggcgtaattttcttcctggcccttttgctatgtattgcactccttagctcatactccatccatctgctcctgacatgtgctggaatcgccgggatcagagcgtatgagcagctcgggcaaagggcttttggacccgcaggcaaggtggtggtggccacagtgatctgcttgcacaacgtgggggctatgtcttcttatcttttcatcattaagtctgagctacctctggtcataggaacttttttgtacatggaccccgagggcgactggtttctcaagggcaaccttctgataatcattgtgtccgttctgattatcctcccattggcactcatgaaacacctggggtatctgggctacacaagtgggctaagcctcacttgtatgcttttctttctggtgagtgtaatctacaagaaatttcagttgggctgtgcaattggacacaatgagacggctatggagtcggaggctctggttggcctgccttcacaaggtctcaattcaagctgcgaagcacagatgttcactgtagatagtcaaatgtcttacactgtcccaatcatggcattcgcattcgtctgccatccagaagtccttccaatttattag

SEQ ID NO: 228845 - DNA, 819 bp, Artificial Sequence
  derived and/or modified sequence
atggaactgcaagatcctaagatgaatggcgcactgccctctgatgcggtaggctacaggcaagagcgggaggggtttcttcccagtcgcggccccgctcctggctccaaacccgtgcagtttatggatttcgagggcaaaacctcttttggtatgtcagtttttaatctgtcaaacgccattatgggctccggaatacttgggctggcatatgcaatggcacatacaggcgtgatattcttcctcgccctcctattatgtattgcgctcctcagctcctactcaatccatctgttgctcacttgtgcaggtattgctggaatacgagcctatgagcaactggggcaaagagcatttggccctgccgggaaggttgtggtggcaactgtaatctgtttacataatgtaggtgctatgtcttcttatctgttcatcataaaatcggagctgcctctggtcattgggaccttcctctacatggaccccgaaggagattggtttttgaagggcaacctgctaattattatcgtgtctgttctgattatcctaccactagctctcatgaaacacttggggtaccttggatatacgagtggactgtcactaacatgtatgttattcttcctcgtgtccgtgatctacaagaaattccaactggggtgtgctataggacataacgaaacagccatggagagtgaagctctggtgggcctcccaagccaggggcttaacagcagctgtgaggcccagatgttcaccgtcgacagccagatgtcttatacagtaccgataatggccttcgcatttgtttgccactag

SEQ ID NO: 228846 - DNA, 1419 bp, Artificial Sequence
  derived and/or modified sequence
atggagctgcaggaccccaagatgaatggagccctgcccagtgatgctgtgggctaccggcaggagcgggagggcttcctgcccagccggggccctgcccctggcagcaagcctgtgcagttcatggactttgagggcaagaccagctttggcatgtctgtgttcaacctgagcaatgccatcatgggcagcggcatcctgggcctggcctatgccatggcccacactggagtcatcttcttcctggccctgctgctgtgcatcgccctgctgagcagctacagcatccacctgctgctgacctgtgccggcattgctggcatccgggcctatgagcagctgggccagagggcctttggacctgctgggaaggtggtggtggccaccgtcatctgcctgcacaacgtgggcgccatgagcagctacctgttcatcatcaagtctgagctgcccctggtgattggcaccttcctgtacatggaccctgagggggactggttcctgaagggcaacctgctgatcatcatcgtgtctgtgctgatcatcctgcccctggccctgatgaagcacctgggctacctgggctacaccagcggcctgagcctgacctgcatgctgttcttcctggtgtctgtcatctacaagaagttccagctgggctgtgccatcggccacaatgaaacagccatggagagcgaggccctggtgggcctgcccagccagggcctgaacagcagctgtgaggcccagatgttcaccgtggacagccagatgagctacacagtgcccatcatggcctttgcctttgtgtgccaccctgaggtgctgcccatctacacagagctgtgccggcccagcaagaggaggatgcaggccgtggccaacgtgtccatcggggccatgttctgcatgtatggcctgacagccaccttcggctacctgaccttctacagctctgtgaaggccgagatgctgcacatgtacagccagaaggaccccctcatcctgtgtgtgcggctggccgtgctgctggccgtgaccctgactgtgcctgtggtgctcttccccatccggcgggccctgcagcagctgctcttccctgggaaggccttctcctggcccaggcatgtggccatcgccctgatcctgctggtgctggtgaatgtgctggtgatctgtgtgcccaccatccgggacatctttggagtcatcggcagcaccagcgcccccagcctcatcttcatcctgcccagcatcttctacctgcgcatcgtgcccagcgaggtggagcccttcctgtcctggcccaagatccaggccctgtgctttggagtgctgggcgtgctcttcatggctgtgtccctgggcttcatgtttgccaactgggccaccggccagagcaggatgagcggccactag

SEQ ID NO: 228847 - DNA, 1266 bp, Artificial Sequence
  derived and/or modified sequence
atgtctgtgttcaacctgagcaatgccatcatgggcagcggcatcctgggcctggcctatgccatggcccacactggagtcatcttcttcctggccctgctgctgtgcatcgccctgctgagcagctacagcatccacctgctgctgacctgtgccggcattgctggcatccgggcctatgagcagctgggccagagggccttcggccctgctgggaaggtggtggtggccaccgtcatctgcctgcacaacgtgggcgccatgagcagctacctgttcatcatcaagtctgagctgcccctggtgattggcaccttcctgtacatggaccctgagggggactggttcctgaagggcaacctgctgatcatcatcgtgtctgtgctgatcatcctgcccctggccctgatgaagcacctgggctacctgggctacaccagcggcctgagcctgacctgcatgctgttcttcctggtgtctgtcatctacaagaagttccagctgggctgtgccatcggccacaatgaaacagccatggagagcgaggccctggtgggcctgcccagccagggcctgaacagcagctgtgaggcccagatgttcaccgtggacagccagatgagctacacagtgcccatcatggcctttgcctttgtgtgccaccctgaggtgctgcccatctacacagagctgtgccggcccagcaagaggaggatgcaggccgtggccaacgtgtccattggagccatgttctgcatgtatggcctgacagccaccttcggctacctgaccttctacagctctgtgaaggccgagatgctgcacatgtacagccagaaggaccccctcatcctgtgtgtgcggctggccgtgctgctggccgtgaccctgactgtgcctgtggtgctcttccccatcagaagagccctgcagcagctgctcttccctgggaaggccttctcctggcccaggcatgtggccatcgccctgatcctgctggtgctggtgaatgtgctggtgatctgtgtgcccaccatccgggacatcttcggcgtgattggcagcaccagcgcccccagcctcatcttcatcctgcccagcatcttctacctgagaattgtgcccagcgaggtggagcccttcctgtcctggcccaagatccaggccctgtgcttcggcgtgctgggcgtgctcttcatggctgtgtccctgggcttcatgtttgccaactgggccaccggccagagcaggatgagcggccactag

SEQ ID NO: 228848 - DNA, 660 bp, Artificial Sequence
  derived and/or modified sequence
atggagctgcaggaccccaagatgaatggagccctgcccagtgatgctgtgggctaccggcaggagcgggagggcttcctgcccagccggggccctgcccctggcagcaagcctgtgcagttcatggactttgagggcaagaccagctttggcatgtctgtgttcaacctgagcaatgccatcatgggcagcggcatcctgggcctggcctatgccatggcccacactggagtcatcttcttcctggccctgctgctgtgcatcgccctgctgagcagctacagcatccacctgctgctgacctgtgccggcattgctggcatccgggcctatgagcagctgggccagagggcctttggacctgctgggaaggtggtggtggccaccgtcatctgcctgcacaacgtgggcgccatgagcagctacctgttcatcatcaagtctgagctgcccctggtgattggcaccttcctgtacatggaccctgagggggactggttcctgaagggcaacctgctgatcatcatcgtgtctgtgctgatcatcctgcccctggccctgatgaagcacctgggctacctgggctacaccagcggcctgagcctgacctgcatgctgttcttcctggtgtctgtcatctacaagaagttccagctgtag

SEQ ID NO: 228849 - DNA, 576 bp, Artificial Sequence
  derived and/or modified sequence
atggagctgcaggaccccaagatgaatggagccctgcccagtgatgctgtgggctaccggcaggagcgggagggcttcctgcccagccggggccctgcccctggcagcaagcctgtgcagttcatggactttgagggcaagaccagctttggcatgtctgtgttcaacctgagcaatgccatcatgggcagcggcatcctgggcctggcctatgccatggcccacactggagtcatcttcttcctggccctgctgctgtgcatcgccctgctgagcagctacagcatccacctgctgctgacctgtgccggcattgctggcatccgggcctatgagcagctgggccagagggcctttggacctgctgggaaggtggtggtggccaccgtcatctgcctgcacaacgtgggcgccatgagcagctacctgttcatcatcaagtctgagctgcccctggtgattggcaccttcctgtacatggaccctgagggggactggttcctgaagggcaacctgctgatcatcatcgtgtctgtgctgatcatcctgcccctggccctgatgaagcacctgtag

SEQ ID NO: 228850 - DNA, 495 bp, Artificial Sequence
  derived and/or modified sequence
atggagctgcaggaccccaagatgaatggagccctgcccagtgatgctgtgggctaccggcaggagcgggagggcttcctgcccagccggggccctgcccctggcagcaagcctgtgcagttcatggactttgagggcaagaccagctttggcatgtctgtgttcaacctgagcaatgccatcatgggcagcggcatcctgggcctggcctatgccatggcccacactggagtcatcttcttcctggccctgctgctgtgcatcgccctgctgagcagctacagcatccacctgctgctgacctgtgccggcattgctggcatccgggcctatgagcagctgggccagagggcctttggacctgctgggaaggtggtggtggccaccgtcatctgcctgcacaacgtgggcgccatgagcagctacctgttcatcatcaagtctgagctgcccctggtgattggcaccttcctgtacatggaccctgagggctag

SEQ ID NO: 228851 - DNA, 840 bp, Artificial Sequence
  derived and/or modified sequence
atggagctgcaggaccccaagatgaatggagccctgcccagtgatgctgtgggctaccggcaggagcgggagggcttcctgcccagccggggccctgcccctggcagcaagcctgtgcagttcatggactttgagggcaagaccagctttggcatgtctgtgttcaacctgagcaatgccatcatgggcagcggcatcctgggcctggcctatgccatggcccacactggagtcatcttcttcctggccctgctgctgtgcatcgccctgctgagcagctacagcatccacctgctgctgacctgtgccggcattgctggcatccgggcctatgagcagctgggccagagggcctttggacctgctgggaaggtggtggtggccaccgtcatctgcctgcacaacgtgggcgccatgagcagctacctgttcatcatcaagtctgagctgcccctggtgattggcaccttcctgtacatggaccctgagggggactggttcctgaagggcaacctgctgatcatcatcgtgtctgtgctgatcatcctgcccctggccctgatgaagcacctgggctacctgggctacaccagcggcctgagcctgacctgcatgctgttcttcctggtgtctgtcatctacaagaagttccagctgggctgtgccatcggccacaatgaaacagccatggagagcgaggccctggtgggcctgcccagccagggcctgaacagcagctgtgaggcccagatgttcaccgtggacagccagatgagctacacagtgcccatcatggcctttgcctttgtgtgccaccctgaggtgctgcccatctactag

SEQ ID NO: 228852 - DNA, 819 bp, Artificial Sequence
  derived and/or modified sequence
atggagctgcaggaccccaagatgaatggagccctgcccagtgatgctgtgggctaccggcaggagcgggagggcttcctgcccagccggggccctgcccctggcagcaagcctgtgcagttcatggactttgagggcaagaccagctttggcatgtctgtgttcaacctgagcaatgccatcatgggcagcggcatcctgggcctggcctatgccatggcccacactggagtcatcttcttcctggccctgctgctgtgcatcgccctgctgagcagctacagcatccacctgctgctgacctgtgccggcattgctggcatccgggcctatgagcagctgggccagagggcctttggacctgctgggaaggtggtggtggccaccgtcatctgcctgcacaacgtgggcgccatgagcagctacctgttcatcatcaagtctgagctgcccctggtgattggcaccttcctgtacatggaccctgagggggactggttcctgaagggcaacctgctgatcatcatcgtgtctgtgctgatcatcctgcccctggccctgatgaagcacctgggctacctgggctacaccagcggcctgagcctgacctgcatgctgttcttcctggtgtctgtcatctacaagaagttccagctgggctgtgccatcggccacaatgaaacagccatggagagcgaggccctggtgggcctgcccagccagggcctgaacagcagctgtgaggcccagatgttcaccgtggacagccagatgagctacacagtgcccatcatggcctttgcctttgtgtgccactag

SEQ ID NO: 228853 - DNA, 1419 bp, Artificial Sequence
  derived and/or modified sequence
atggagctgcaggaccccaagatgaacggcgccctgcccagcgacgctgtaggatacaggcaggagagggaggggttcctgccatctcgaggccctgcccctggttccaagccagtacagttcatggattttgaggggaaaacctcttttgggatgtcagtgttcaacttaagtaacgccatcatgggctccggcattctggggcttgcttacgctatggcccacacgggtgtgatcttctttcttgctctgctgctctgcattgccctcttgagtagctattccatccacctgctcctgacatgtgccggcatcgctggtatccgcgcatacgagcagctcgggcagagggcctttggacccgcgggaaaagtagtggtggcaacggtgatctgtctccacaacgtcggggcaatgtcctcctacctcttcattatcaagagcgagctgcccctggtgattgggacgtttctatacatggatccagaaggggactggttcctgaagggcaatttgctaatcattatcgtaagtgtcctgattatactcccactggctttaatgaaacacctgggatacctcggatatacaagcggtctgagccttacctgcatgctcttcttcctggtatccgtcatctacaagaagttccagctgggctgtgcaataggacacaacgagacagccatggagagcgaggcattggtgggcctgccctctcagggcctgaacagctcatgcgaagctcagatgttcactgtggattcccagatgagttatacagtgcccattatggcctttgccttcgtgtgtcaccctgaagtccttccaatatacacggagctctgtagacccagcaagagacgtatgcaggctgtggccaacgtctcaataggcgctatgttttgtatgtacggacttacggcaacctttggatacctgacgttctattcctcagtgaaagccgaaatgctgcacatgtacagccagaaggatcctcttatcctttgcgtccgactagcagtactccttgctgtgacattaaccgtcccagtggtacttttccccatcagaagagccctccagcagctactgttcccggggaaagccttttcttggcctcggcacgtggcgattgcactgattcttctggtactagtgaatgtcttagtgatctgcgtcccgacaatacgcgatatctttggggtgattggtagcacatccgcaccctctctcatcttcatcttacctagcatcttctatctcagaatagtgcctagcgaagtcgagccgttcctctcgtggcccaaaatccaggccctgtgtttcggcgttctgggagtactttttatggctgttagcctaggcttcatgttcgcaaattgggcgaccgggcagtcccgcatgagcggccactag

SEQ ID NO: 228854 - DNA, 1266 bp, Artificial Sequence
  derived and/or modified sequence
atgagcgtgttcaacctgagcaacgccatcatgggcagcggcatcctcggattggcctacgccatggcacatacaggcgtcatttttttccttgccctgttgctgtgcatcgccctactctcctcctatagtatccacctgctgttgacctgtgccggcattgccggtatccgggcctacgaacagctgggccagagggcctttggccccgccggcaaggtggtcgttgctacagtcatttgcctccataatgttggggcgatgagcagctatctctttatcattaagtccgagcttcccctcgtgattggcaccttcttgtatatggatcccgagggggattggtttctgaaagggaacctgctaatcatcatcgtctctgtgctgattattctgcccctagctttaatgaagcacctgggctatcttggctacacatcgggacttagcttgacgtgtatgttattcttccttgtgtctgtaatttataaaaagttccagctgggatgcgcaatcgggcataacgagaccgccatggaatctgaagccctggtggggctcccctcccaaggcctaaacagctcctgtgaggcacagatgtttacagtggattcacaaatgtcctacaccgtgccgatcatggcgtttgcgtttgtatgtcatcctgaagttcttcccatttatacggagttgtgcaggccttctaaacggcgtatgcaagctgtggccaatgtttccataggggcaatgttctgcatgtacggcctcacggctaccttcgggtacctgaccttttactcatccgtgaaagcagagatgcttcacatgtattcgcagaaagaccctttgattctgtgtgtacgtctggccgtactgctggcggttacacttacagtgcccgtagtattatttccgattagaagagcgcttcagcagttgctgtttccagggaaagcttttagttggcctagacatgtggctatcgccctcatcctgctggtgttggtcaatgtgctggtcatctgcgtgcccacaatcagggacatttttggcgtgatcgggagcacgagcgcgcctagcctcatctttattctgccaagcatattctatctccgaatagttccctccgaagtggagccgtttctctcatggccaaagatccaggctctctgctttggcgtgctcggtgttctgttcatggcagtaagcctggggttcatgttcgctaattgggccacaggtcagtccagaatgtcgggtcattag

SEQ ID NO: 228855 - DNA, 1419 bp, Artificial Sequence
  derived and/or modified sequence
atggagctgcaggaccccaagatgaacggcgccctgcccagcgacgccgtaggatatagacaagagcgagaaggcttcttgccaagtaggggcccagccccaggctccaaaccagtccagttcatggattttgaggggaagacatctttcgggatgagtgtgttcaacctgagtaacgcgatcatgggctcaggcattttaggcctggcctacgccatggcccacaccggcgttatcttcttccttgccctgcttctatgcattgctctacttagttcttatagcatccatctccttctgacatgtgcagggatcgcgggaatcagagcgtacgaacagctgggacagagggcattcggccctgcaggcaaagtggttgtggctaccgtaatttgcttgcataatgtgggcgcaatgtcctcctatttgtttattatcaaatcagaactccctctggtgattggaacatttctatatatggatccggagggtgactggtttctgaaagggaacctgctgattatcatagtttctgtacttattatcctgccactggcccttatgaagcacttaggctacctcggctacacgagtggcctcagcctaacctgcatgctgttcttccttgtgtcagtcatctacaaaaagttccagctgggctgcgctattggacataacgaaacagcaatggagagcgaggccctggtcggcctcccttctcaggggctgaactcctcatgcgaagctcagatgttcactgtggatagccaaatgagttacactgtccctataatggccttcgctttcgtgtgtcaccccgaggtgttaccaatttataccgaactgtgtcggccctccaaaagaaggatgcaggctgtggctaacgtcagtatcggagcgatgttctgtatgtacgggctgacggctacctttgggtatctgacattctatagttctgtgaaagccgagatgttacacatgtattctcagaaagatcctctgatcctgtgcgtccgcttagccgtcctgctagcagtgacacttactgtgcctgtggttctttttcccattcgcagagcactgcagcaactgttattccctggcaaggccttcagttggccccggcatgtggccatagccctcattctcctcgttctagtgaatgtcctggtgatttgtgtcccgaccattcgggacatcttcggggtaatcggctcaacgagtgcaccatctttaattttcattctcccctctattttttacttacgcattgtaccctcagaggttgaaccttttttaagctggccaaagatccaggctctgtgtttcggtgtactaggggtgctctttatggccgtgtctctaggatttatgttcgcaaattgggctacaggccagtcaaggatgtcaggccactag

SEQ ID NO: 228856 - DNA, 660 bp, Artificial Sequence
  derived and/or modified sequence
atggagctgcaggaccccaagatgaacggcgccctgcccagcgacgccgttggataccgccaggaaagagagggctttctgccatctagagggcccgctccaggctcaaagcctgttcagtttatggatttcgagggcaaaacgagcttcggcatgtccgtgtttaatctaagcaatgctatcatgggtagtgggatacttggactggcctacgcgatggctcataccggagtgatcttttttctggcccttctcctctgtattgccctgttaagctcctactcaatccatctcctgcttacctgtgcagggatcgccggaattcgggcatatgaacagctgggacaacgcgccttcggacccgccgggaaagtggtcgtcgccaccgtcatctgtctgcataacgtcggtgccatgtcttcctatctgtttatcataaagtctgagctacccctggttattggcactttcctatatatggatccagagggagactggtttctgaagggcaacctgttgatcatcattgtgagcgtgcttatcattctgcctctggctctgatgaaacacttaggctatctgggatatacctccggattatccctgacttgcatgctcttctttctggtgtcagtgatctacaagaagttccagctctag

SEQ ID NO: 228857 - DNA, 576 bp, Artificial Sequence
  derived and/or modified sequence
atggagctgcaggaccccaagatgaacggcgccctgcccagcgacgcagtcggctacaggcaggaaagggaaggcttcctgccgtcccgtggccctgctcctgggtcaaagcctgttcaatttatggacttcgaggggaaaactagcttcggcatgtctgttttcaacctgtcaaacgcaatcatgggctcagggatcctgggactcgcttacgccatggcacatactggggtaatcttttttctggccttactgctgtgcatagccctgctgagctcgtattccatacatttgctgctcacgtgcgctggcattgccggaatccgtgcttacgagcaacttggacagcgcgccttcggtcccgctggcaaggtggttgtggctacagtgatctgcctccataacgtgggagctatgagttcttatcttttcattatcaagtcggagcttccgctggtgatcggtacctttctatacatggaccccgaaggagactggttcctcaagggaaaccttctgattattattgtgagcgtgcttatcatactgcccttggccttaatgaaacacttgtag

SEQ ID NO: 228858 - DNA, 495 bp, Artificial Sequence
  derived and/or modified sequence
atggagctgcaggaccccaagatgaacggcgccctgcccagcgacgccgtgggctatcggcaggaacgcgaagggtttctgccctcccgcggaccagccccaggcagcaaacctgtgcagtttatggacttcgagggcaaaacctcatttggtatgtctgtattcaatctaagcaacgcaatcatgggctctggaatattaggactagcctatgccatggcacatacgggcgtgatattttttctggccctgctcctgtgtatcgccctactcagctcatactctattcatttgcttctcacctgcgctggtatcgcaggcattcgagcgtacgagcagcttgggcagagggcgttcggtccagcgggcaaggtggtggtcgctacagtcatttgcctgcacaatgtgggagctatgtcaagttatctgttcatcatcaagtccgaattgccactagtgattggaactttcttgtacatggaccctgaggggtag

SEQ ID NO: 228859 - DNA, 840 bp, Artificial Sequence
  derived and/or modified sequence
atggagctgcaggaccccaagatgaacggcgccctgcccagcgacgccgtcgggtatcgacaggaacgggaggggtttttaccaagccgaggaccagcccctggcagtaaaccagtgcagtttatggattttgagggcaaaacaagctttggcatgtccgtattcaatctatccaacgctatcatgggtagcgggatccttgggttggcttatgccatggcccacaccggagtgatcttctttcttgcattgctgctgtgtattgctctgctgtcgtcctatagcatccacctgctcctgacttgcgccggaattgccgggatacgcgcgtatgagcaactgggccagagagcgtttggtcccgccggtaaagtagtggtggccactgttatatgtcttcataatgttggagcgatgagctcttacctatttataatcaagtccgagctacccctggttatcggaacgttcctttatatggaccccgagggggactggtttttgaaaggaaacttgctgatcatcattgtgagcgtgttgatcattctgccgctcgccctgatgaaacacctggggtacctgggatacacctccggtctgtccttaacctgcatgttgttcttcctggtgtctgtgatctataaaaagttccaattaggctgtgccatcggccataacgaaacggctatggagtctgaggcactagttgggctgcccagccagggcctcaactcttcctgtgaagctcagatgtttacagtggattcccagatgagctacacagtcccgatcatggccttcgcatttgtctgccatccggaagtgctgcctatttactag

SEQ ID NO: 228860 - DNA, 819 bp, Artificial Sequence
  derived and/or modified sequence
atggagctgcaggaccccaagatgaacggcgccctgcccagcgacgctgtaggttacaggcaggaaagggaaggctttttgccctcccgaggcccagccccaggatccaaacccgtccaattcatggatttcgagggaaaaacctctttcggtatgtccgtgtttaacctgtcgaatgccattatgggctcgggaatcctgggattggcatacgctatggctcacaccggagtgatctttttcttagctctcctgctatgtattgcattgctgtcgtcttactcaattcacctgttactcacttgtgcaggtattgcgggaattcgggcctacgaacagctgggacagagggcttttgggcctgcaggaaaagttgtggtggcaacagtcatctgcttacacaacgtgggcgccatgtcttcttacttattcatcatcaagagcgagctgcctttggtgatcggaacgtttctctatatggatccagaaggtgattggttcctcaaaggcaatcttcttatcattattgtgtcagttcttataatcctgccattagctctcatgaagcatctcgggtatctgggttataccagtgggctgtcacttacctgcatgctgttctttctggtgagtgtgatctataagaagtttcagttaggctgcgccattggccacaacgaaacagccatggaatccgaggctttagtgggattgccatcacaaggacttaatagttcatgcgaagcacagatgttcacagttgattcacagatgagctatacagtgccaattatggcctttgcgtttgtgtgccactag

SEQ ID NO: 228861 - DNA, 1419 bp, Artificial Sequence
  derived and/or modified sequence
atggaactccaggaccccaaaatgaacggagccctgccatctgatgccgtcggataccgccaggagcgggaaggctttttgccctcccgaggcccagccccagggtctaagcccgttcagttcatggactttgaagggaaaacatccttcggaatgtccgtctttaatctgtccaatgcaataatgggaagcggtatcctcgggctcgcatatgctatggcacacaccggtgttatttttttcctagctctgcttttgtgtatcgctctcctctccagctactccatccatcttctgctgacgtgtgctggtatcgcgggaataagagcttatgagcagttgggacaacgcgcattcggacctgccggaaaggtggtcgttgcgactgtgatctgcttacacaacgtgggggcaatgtcttcttacttattcatcatcaagtcggagctgccactggtgatcggaaccttcctgtatatggatccggagggcgattggtttctgaagggcaacctcctgattattatcgtgagcgtcctgatcatcctacccctggccctgatgaagcacctggggtatttaggctatacctcgggcctcagcttgacatgtatgctgtttttcctcgtttcagtcatctacaaaaagttccaactgggctgtgccattggccataacgaaactgcaatggaatcagaagctctggttggcctcccctcacaagggctgaattccagctgcgaggcacagatgttcactgttgattctcagatgtcatatacagttccgattatggcttttgcttttgtgtgccaccccgaggtgctacccatctataccgaactgtgccgacccagcaagcgtcgtatgcaggccgtagccaacgtgtccattggtgccatgttttgtatgtatggcctgacagcaactttcgggtatctgacattctattctagcgtcaaggcagagatgctccacatgtattctcaaaaagatcccctgatcttatgtgtccgcttggctgtgctactcgccgtcaccttaacagtgcctgtggtgctgttcccgattaggagggccctccagcaactccttttcccaggcaaggctttctcatggcctcggcacgtggccatcgcactcattctgctcgtgttagtcaatgttttagttatatgcgtgcccaccattcgcgatatttttggagtgattggtagcacctccgccccaagccttatattcattctgccgtcgattttctacttacgtatagtcccttctgaggtcgaacctttcctcagttggcctaagatccaggctctgtgcttcggagtgctcggggtcctgttcatggctgtgtccctagggttcatgtttgccaattgggctactggtcagtctcggatgagtggacattag

SEQ ID NO: 228862 - DNA, 1266 bp, Artificial Sequence
  derived and/or modified sequence
atgtccgtgttcaacctgtccaacgctattatgggatccggtattcttgggctagcctacgcaatggcacatacgggagtcatattctttttagccctgctgttatgtatcgcgctactcagctcctattctattcatctgctacttacatgtgccggaatcgcaggcattagggcctacgaacagcttggccagagagcattcggcccagcaggtaaggtggtggtggccaccgtcatttgcctgcacaacgttggagccatgtcttcatatctctttattatcaagtcggagctgccactggtgatcggcacgtttttatacatggatcctgagggagactggttccttaaaggaaatctgctcatcataattgtctctgtactgattattctgccattggcgttgatgaagcatctgggttacttgggctacacatctggattgtcgttgacatgtatgctcttcttcctggtcagcgttatctataagaagttccagctgggctgtgccatcgggcataatgagaccgccatggagtcagaggcactggtcgggcttccttcacaggggctcaactcatcttgcgaggcccagatgtttacagtcgacagtcagatgtcctatactgtacccatcatggccttcgcattcgtttgtcacccagaggtcctgcctatctacaccgagctctgtagacccagcaagcgacggatgcaggcggtggctaacgtgagtataggcgcaatgttctgtatgtacggtttgacggccacttttggctatctcactttctattcctcagttaaggccgaaatgcttcacatgtactcccaaaaggatcctttaattctgtgcgtgcgacttgcagtgttgctggctgtcacattgaccgtccccgtcgtgctgtttcccatccgcagggccctgcagcagctcttgttccccggaaaggcttttagctggcctcgacacgtggccatcgccctcatcctcctcgttctggtcaatgtactggtgatatgcgtaccaacgatccgcgacatattcggagttatcggatctaccagcgccccttctctgatctttatactaccttcgattttctaccttcggatcgtaccatcagaggtggaaccattcttgtcatggccgaagatccaggcgttgtgctttggcgtactgggcgtgctgtttatggctgtaagcttggggttcatgttcgctaattgggccacaggccagagccgaatgtcagggcactag

SEQ ID NO: 228863 - DNA, 1419 bp, Artificial Sequence
  derived and/or modified sequence
atggagctccaggatcctaaaatgaatggagccctaccgtccgatgctgtgggctataggcaggagcgagagggatttttaccctctcggggacccgctcctggtagcaaacctgtgcagttcatggactttgagggcaaaacatcatttggcatgtcagtattcaacctcagtaatgctatcatgggctctgggatcctcgggctggcttacgccatggcgcacacaggggtcattttctttctggccttgcttctttgcatcgctttgctctcctcttacagtatacacctcctccttacttgtgccggtatagcagggataagagcgtacgagcaactgggtcagagggcttttgggccagccggaaaggttgtggttgccaccgtgatttgcctgcacaacgtaggagcgatgtcttcttatctgttcataattaagagtgagctgcctctggtaatcggcacatttttgtatatggacccagagggcgattggttcttgaaaggcaaccttctgataattatagtgtctgtgctgatcattctgcctctggctctcatgaaacatttgggatatctgggttacacctcaggcttgtcattaacttgcatgctcttctttctggtctctgttatttataaaaagtttcagcttggatgtgcaattgggcataacgaaactgctatggaaagtgaggccttggttggtctgccatctcagggactcaattcatcttgcgaggcacagatgtttaccgtggactcacagatgtcctatacggtcccaatcatggccttcgcgttcgtgtgtcatcccgaggtgctgcccatctataccgaactgtgcaggcctagcaaacggagaatgcaggcggtggcaaacgtttccattggtgccatgttttgcatgtacggccttacagctacattcggatacctaactttttacagttctgtgaaagccgagatgctccacatgtacagccaaaaggacccgctaatcctatgcgtgaggttggccgtgctgttggctgtgacattaaccgtacccgtggttctatttccaattcgcagagccctacaacagcttttgttcccaggcaaggccttttcatggccgaggcacgtggccatcgctctgatcctgctggtcttggtgaacgtcctggtgatctgtgtgccaaccattcgcgacatttttggggttattggctccacatcagccccaagtctcatatttatattaccttccatcttctaccttcgcattgttccaagtgaggtcgagccatttctaagttggccaaaaatccaggcactatgtttcggcgtgttgggagtactttttatggcagtttctttaggctttatgtttgccaactgggccacaggccagtcacgcatgtcgggacattag

SEQ ID NO: 228864 - DNA, 660 bp, Artificial Sequence
  derived and/or modified sequence
atggagctccaagatccgaagatgaacggagcactgcctagtgacgcagtgggctataggcaggagcgggagggtttcctcccctcccgtggccctgctcctggttctaaaccagtgcagttcatggatttcgaaggtaaaactagctttggtatgtcagtattcaatctttctaacgccattatgggatctggtatccttgggctcgcctacgccatggctcatactggcgttatcttctttcttgcactgctgctctgtatcgcactgctgagctcatattcgatacatctgctgttaacgtgtgccggtattgccggaattcgcgcttatgagcaactcggtcagcgcgcatttggccctgcaggaaaggtcgtggtggcaactgtcatctgtctgcataatgttggggctatgtcaagctacctattcatcattaagtctgagcttccactggtaattggcacttttttatacatggatccagagggcgactggtttttaaagggtaatttactaatcataatcgtcagcgtgttgattatcctccccctcgctttgatgaaacatttgggttatctcggttacacctcggggctgtcacttacttgcatgctctttttccttgtgtctgtgatttataagaaatttcaattatag

SEQ ID NO: 228865 - DNA, 576 bp, Artificial Sequence
  derived and/or modified sequence
atggaactgcaggatccaaagatgaatggggcactaccgagtgacgccgtgggatatcggcaagagagagaaggctttctcccttctaggggaccagccccaggatccaaacccgtgcagttcatggacttcgaagggaaaacaagtttcggcatgagtgtgttcaacctctctaacgcaatcatggggtccggcattcttggcttggcatacgctatggctcatacgggagttattttctttttggctctgctgctgtgcattgcccttttatccagctactccatccacctgctcttgacgtgcgctggcatcgctgggataagggcgtacgagcagctgggccagagagcgttcggtcctgcaggaaaagttgttgtggccaccgtgatctgcctgcacaacgtaggcgctatgagttcttacctgtttattatcaaaagcgaacttccactagtcattgggacatttttatatatggatcctgaaggcgactggtttcttaagggaaacctactgattatcattgtgagcgtgctgataattctaccgctcgccctgatgaaacacctctag

SEQ ID NO: 228866 - DNA, 495 bp, Artificial Sequence
  derived and/or modified sequence
atggaactccaggacccaaagatgaacggggcacttccgtctgacgccgttgggtacagacaggagcgtgaggggtttctgccaagccgaggccctgctcccggatcaaagcctgtccagtttatggatttcgagggcaagacttcatttggcatgagcgtgtttaacctgagcaatgctatcatggggagcggaatcctgggtttggcatacgcaatggctcatacaggcgtgatcttttttctggccctgttgttgtgcatagctctgctgtcctcttactctatccatttgctgttgacctgcgccggaattgcgggaattcgagcatacgagcagctcggccagagggcgttcggaccagctgggaaggtggtggtggcaacagtgatctgcttacacaacgtgggggcaatgagctcctatctttttattattaaaagtgaactgccgcttgtcattggcacctttctgtacatggacccagagggatag

SEQ ID NO: 228867 - DNA, 840 bp, Artificial Sequence
  derived and/or modified sequence
atggagctccaagatccaaaaatgaacggtgccctgcccagtgatgctgttgggtatagacaggaaagggaaggcttcctcccttctcggggtcctgccccaggaagcaaacctgttcagtttatggactttgagggaaagacttcttttgggatgtccgtgtttaatctctccaatgccatcatgggctcaggcatcctgggactggcatatgctatggctcataccggagtaattttcttcttggccctcctactctgcattgcccttcttagcagttattctattcacctgctgctgacatgtgctggtattgcgggaatccgcgcatacgaacaactagggcaacgcgcttttggcccagccggtaaggtcgtggtggcgactgtcatttgcttacacaatgtcggcgctatgagctcctatctgttcattataaagagcgagctgccactagtaattgggaccttcctttatatggaccctgagggcgactggttcctgaaggggaatctcctcatcataattgtgtccgtgctcatcatcctgccactggccctgatgaagcacctcgggtatctcggttacacgagcggtctgagtctcacctgcatgctgttctttctggtgagcgtcatatacaagaagtttcagctcgggtgtgcaattggacataatgagaccgcgatggagtccgaggcgttggtgggcctgccctctcaggggttaaactcatcgtgtgaggcacagatgttcacagttgacagtcagatgtcctatacggtgcccataatggccttcgcctttgtgtgccatcccgaagttctcccaatttactag

SEQ ID NO: 228868 - DNA, 819 bp, Artificial Sequence
  derived and/or modified sequence
atggaactccaggatcccaagatgaatggcgctctcccatcggatgcggtgggataccgtcaagaacgtgaaggttttctgccctcacgcggacctgcaccaggttccaaacctgtgcagttcatggacttcgaaggtaagactagcttcggaatgtctgtttttaatctgtccaatgcgatcatgggcagtgggattttaggtctggcttacgccatggcccatacgggtgtgatcttctttctggccctcctgctatgcatagccttgctgagctcctactctatacatctgctgctgacctgcgccggtatcgcgggtattcgggcttatgaacagctgggccaacgcgcttttgggcctgctggaaaggtggtcgtcgctacagtgatctgcctacacaatgtgggagctatgtcatcatacctgttcattattaaaagcgaattaccactggtgattgggacttttctctacatggatcctgaaggcgactggttcctgaagggtaatctcctgattataatagtgtctgtgttaatcattctcccgttagctttaatgaaacatttaggctatctgggatatacatctggcctttcactgacatgtatgctttttttcctggtttctgttatctataagaaattccagctcgggtgtgcaatcggacacaacgagactgctatggaatcggaagccctagtggggctgccttcacaaggtctgaactcaagttgcgaggcacaaatgttcacagtggatagtcagatgtcatataccgttccaatcatggcatttgcctttgtgtgccactag

SEQ ID NO: 228869 - DNA, 1988 bp, Artificial Sequence
  derived and/or modified sequence
acaaatgccctccctgcctccctctgggggcccccaagatctagggtcctctcgtgcctaggctgtctgcctgaggaaaaaaaaaaaagtaccgctccagagcaggagcctaggcagccgagagggtgcccgaacctgagtctgagttgcggccacttcaggagctgagaggagcaggatggaactgcaggatccaaagatgaatggagccctcccttcggatgctgtgggctacaggcaagaacgtgagggcttcctgcccagtcgtggtcctgctcctgggagcaagccggtccagttcatggatttcgaggggaagacatcgtttggaatgtcagtgttcaacctcagcaacgccatcatgggcagcggcatcctggggctggcctatgccatggcccacacgggggtcatcttcttcctggccctgctgctgtgcattgcgcttctgtcgtcctactccatccacctcctgctgacctgtgctggtattgcaggcatccgagcctatgagcagctgggacagagggcattcgggcctgcggggaaggtagtggtggccacagtcatctgtctgcacaatgttggggccatgtccagttacctgttcatcatcaaatctgagctccccctggttatcggcaccttcctgtacatggaccccgagggggactggttcttgaagggaaacctcctcatcatcatcgtcagtgtgttaatcatcctgcccctcgccctcatgaaacacttgggctacctggggtacaccagtggtctctctctgacctgcatgctgtttttccttgtttcggtcatctacaagaagttccaacttggctgtgctataggccacaatgaaacagcaatggagagtgaagctctcgtgggactccccagccaaggactcaacagcagctgtgaggcccagatgttcacagttgactcacagatgtcctacacagtgcccattatggcttttgcttttgtctgccaccctgaggtgctgcccatctatacggagctctgccggccctccaagcgcaggatgcaggccgtggccaacgtgtccattggggccatgttctgcatgtatgggctcacagcaacctttggatacctcaccttctacagcagtgtgaaggcggagatgctgcacatgtacagccagaaggacccgctcatcctctgtgtgcgcctggccgtgctgctcgcggtgaccctcactgtgccagtcgtgctgttccctatccgccgggccctgcagcagctgcttttcccaggcaaggccttcagctggccacgacatgtggccatagctctgatcctgcttgttttggtcaatgtccttgtcatctgtgtgccaaccatccgggatatctttggagttatcgggtccacctcagcccccagcctcatcttcatcctccccagcatcttctacctccgcattgtaccctctgaggtggagcctttcttatcctggcccaagatccaggccctgtgctttggagtcctgggagtcctcttcatggccgtcagtctaggctttatgtttgccaactgggccacaggccagagccgcatgtctggacactgatcaggccctgctggcccaggtccctgtgcgcatgcacatggaggggtcagggccgctccctagggtccctcctgcccaacatgtggaggtggctggttcccatgaacgtggttgtcagaggcgggggacagcagaggctgcagactggcccacttccctcctccccagggatgccaagcttggatcatggccctaatcccaaccccaaccccatgggaggaggaggaggaggaagaagaggaggaggaggaggaggaggaggaggaggaggaggaggccaggtcctggtggagcctttgcccagcccagtcctctctgcctcctcctggctgaagctgtttgtcaggattaccctcgggctaaagaggaaaaataaagatgttgagctacc

SEQ ID NO: 228870 - DNA, 2103 bp, Artificial Sequence
  derived and/or modified sequence
ccgctcttcggcccagtgactgccctccctggctgctcccctcccggcctgcctttctcctccagctgttcttcctcctccagcactccccatcctcagcctatccccacccgcagcgtctcccctccccagctgttttacctctggtggctgcttcaccctcccccggtcctctccacttccagctgctccctccaaagtttgtcctagtttcccccttcccagctctccccattcgcagcctcttccatcttcaactcttcttccctgctagcctcttccctcctccgatggtctctccttggcttctctccaccccgcttgcttcttctctagtctttccctggccctggcattagtctccttaccctgtgccctgtcccaatgtgtgcccgggctttgctccttgcgtgcagttcgaggggaagacatcgtttggaatgtcagtgttcaacctcagcaacgccatcatgggcagcggcatcctggggctggcctatgccatggcccacacgggggtcatcttcttcctggccctgctgctgtgcattgcgcttctgtcgtcctactccatccacctcctgctgacctgtgctggtattgcaggcatccgagcctatgagcagctgggacagagggcattcgggcctgcggggaaggtagtggtggccacagtcatctgtctgcacaatgttggggccatgtccagttacctgttcatcatcaaatctgagctccccctggttatcggcaccttcctgtacatggaccccgagggggactggttcttgaagggaaacctcctcatcatcatcgtcagtgtgttaatcatcctgcccctcgccctcatgaaacacttgggctacctggggtacaccagtggtctctctctgacctgcatgctgtttttccttgtttcggtcatctacaagaagttccaacttggctgtgctataggccacaatgaaacagcaatggagagtgaagctctcgtgggactccccagccaaggactcaacagcagctgtgaggcccagatgttcacagttgactcacagatgtcctacacagtgcccattatggcttttgcttttgtctgccaccctgaggtgctgcccatctatacggagctctgccggccctccaagcgcaggatgcaggccgtggccaacgtgtccattggggccatgttctgcatgtatgggctcacagcaacctttggatacctcaccttctacagcagtgtgaaggcggagatgctgcacatgtacagccagaaggacccgctcatcctctgtgtgcgcctggccgtgctgctcgcggtgaccctcactgtgccagtcgtgctgttccctatccgccgggccctgcagcagctgcttttcccaggcaaggccttcagctggccacgacatgtggccatagctctgatcctgcttgttttggtcaatgtccttgtcatctgtgtgccaaccatccgggatatctttggagttatcgggtccacctcagcccccagcctcatcttcatcctccccagcatcttctacctccgcattgtaccctctgaggtggagcctttcttatcctggcccaagatccaggccctgtgctttggagtcctgggagtcctcttcatggccgtcagtctaggctttatgtttgccaactgggccacaggccagagccgcatgtctggacactgatcaggccctgctggcccaggtccctgtgcgcatgcacatggaggggtcagggccgctccctagggtccctcctgcccaacatgtggaggtggctggttcccatgaacgtggttgtcagaggcgggggacagcagaggctgcagactggcccacttccctcctccccagggatgccaagcttggatcatggccctaatcccaaccccaaccccatgggaggaggaggaggaggaagaagaggaggaggaggaggaggaggaggaggaggaggaggaggccaggtcctggtggagcctttgcccagcccagtcctctctgcctcctcctggctgaagctgtttgtcaggattaccctcgggctaaagaggaaaaataaagatgttgagctaccactctg

SEQ ID NO: 228871 - DNA, 2662 bp, Artificial Sequence
  derived and/or modified sequence
gcctggaatagcctggctactacccctgcacctgttcccctgctgtccccaggcctctctgcctgaatctgcctctctctgcctcttttctcctgtccctccaggagtctctctgcctcaaccactctctctgccccttcatctctctgagctggtgtgtctggtcctaccctctgtttggggagctgtctggctctgtcccccacctcttggccagcctgtgtctcctgtctatgactgagcccaattgcctgttgcctttctgcaggtgtttccacgagcctatccctacccacctgtttgtttctgagtctgcctgtgtgtccctttctccctgtctctgcctgtcttccaagctcccctagcatcccctcctcccgcccatctgtctttctgtcccttctgtggtctgtctgttcctgtgctgtttctcatgcctgctttctttgtaacttcagttctcctactctctctctgtctcctctctgcacctttttctgccatccatcccatcctgctgtccgtctgctctgtgagtccatcccctctgtctgcctgtcactctctctagctgtgggtctacaccctcaatctttcaggccatttcccccaccatcaacacacaaacaaaccgctgtctccctccaagtgggtccagatagggggcgccccttctccacctcttcccccgcccagggccagaaggagggaaacgaaattaaaattaacatttcttctcaggaaaaaaaaaaaagtaccgctccagagcaggagcctaggcagccgagagggtgcccgaacctgagtctgagttgcggccacttcaggagctgagaggagcaggatggaactgcaggatccaaagatgaatggagccctcccttcggatgctgtgggctacaggcaagaacgtgagggcttcctgcccagtcgtggtcctgctcctgggagcaagccggtccagttcatggatttcgaggggaagacatcgtttggaatgtcagtgttcaacctcagcaacgccatcatgggcagcggcatcctggggctggcctatgccatggcccacacgggggtcatcttcttcctggccctgctgctgtgcattgcgcttctgtcgtcctactccatccacctcctgctgacctgtgctggtattgcaggcatccgagcctatgagcagctgggacagagggcattcgggcctgcggggaaggtagtggtggccacagtcatctgtctgcacaatgttggggccatgtccagttacctgttcatcatcaaatctgagctccccctggttatcggcaccttcctgtacatggaccccgagggggactggttcttgaagggaaacctcctcatcatcatcgtcagtgtgttaatcatcctgcccctcgccctcatgaaacacttgggctacctggggtacaccagtggtctctctctgacctgcatgctgtttttccttgtttcggtcatctacaagaagttccaacttggctgtgctataggccacaatgaaacagcaatggagagtgaagctctcgtgggactccccagccaaggactcaacagcagctgtgaggcccagatgttcacagttgactcacagatgtcctacacagtgcccattatggcttttgcttttgtctgccaccctgaggtgctgcccatctatacggagctctgccggccctccaagcgcaggatgcaggccgtggccaacgtgtccattggggccatgttctgcatgtatgggctcacagcaacctttggatacctcaccttctacagcagtgtgaaggcggagatgctgcacatgtacagccagaaggacccgctcatcctctgtgtgcgcctggccgtgctgctcgcggtgaccctcactgtgccagtcgtgctgttccctatccgccgggccctgcagcagctgcttttcccaggcaaggccttcagctggccacgacatgtggccatagctctgatcctgcttgttttggtcaatgtccttgtcatctgtgtgccaaccatccgggatatctttggagttatcgggtccacctcagcccccagcctcatcttcatcctccccagcatcttctacctccgcattgtaccctctgaggtggagcctttcttatcctggcccaagatccaggccctgtgctttggagtcctgggagtcctcttcatggccgtcagtctaggctttatgtttgccaactgggccacaggccagagccgcatgtctggacactgatcaggccctgctggcccaggtccctgtgcgcatgcacatggaggggtcagggccgctccctagggtccctcctgcccaacatgtggaggtggctggttcccatgaacgtggttgtcagaggcgggggacagcagaggctgcagactggcccacttccctcctccccagggatgccaagcttggatcatggccctaatcccaaccccaaccccatgggaggaggaggaggaggaagaagaggaggaggaggaggaggaggaggaggaggaggaggaggccaggtcctggtggagcctttgcccagcccagtcctctctgcctcctcctggctgaagctgtttgtcaggattaccctcgggctaaagaggaaaaataaagatgttgagctaccactctgga

SEQ ID NO: 228872 - DNA, 910 bp, Artificial Sequence
  derived and/or modified sequence
agacagcgtgagtctggggtctgggaggagaggctatcccttctccacgtggtcggctcatctgcgctggggatggaactgcaggatccaaagatgaatggagccctcccttcggatgctgtgggctacaggcaagaacgtgagggcttcctgcccagtcgtggtcctgctcctgggagcaagccggtccagttcatggatttcgaggggaagacatcgtttggaatgtcagtgttcaacctcagcaacgccatcatgggcagcggcatcctggggctggcctatgccatggcccacacgggggtcatcttcttcctggccctgctgctgtgcattgcgcttctgtcgtcctactccatccacctcctgctgacctgtgctggtattgcaggcatccgagcctatgagcagctgggacagagggcattcgggcctgcggggaaggtagtggtggccacagtcatctgtctgcacaatgttggggccatgtccagttacctgttcatcatcaaatctgagctccccctggttatcggcaccttcctgtacatggaccccgagggggactggttcttgaagggaaacctcctcatcatcatcgtcagtgtgttaatcatcctgcccctcgccctcatgaaacacttgggctacctggggtacaccagtggtctctctctgacctgcatgctgtttttccttgtttcggtcatctacaagaagttccaacttggctgtgctataggccacaatgaaacagcaatggagagtgaagctctcgtgggactccccagccaaggactcaacagcagctgtgaggcccagatgttcacagttgactcacagatgtcctacacagtgcccattatggcttttgcttttgtctgccaccctgaggtgctgcccatctata

SEQ ID NO: 228873 - DNA, 871 bp, Artificial Sequence
  derived and/or modified sequence
cgtctggggcaggggtctccgagtctgtccccaaccctcagctcactcaacaggatggaactgcaggatccaaagatgaatggagccctcccttcggatgctgtgggctacaggcaagaacgtgagggcttcctgcccagtcgtggtcctgctcctgggagcaagccggtccagttcatggatttcgaggggaagacatcgtttggaatgtcagtgttcaacctcagcaacgccatcatgggcagcggcatcctggggctggcctatgccatggcccacacgggggtcatcttcttcctggccctgctgctgtgcattgcgcttctgtcgtcctactccatccacctcctgctgacctgtgctggtattgcaggcatccgagcctatgagcagctgggacagagggcattcgggcctgcggggaaggtagtggtggccacagtcatctgtctgcacaatgttggggccatgtccagttacctgttcatcatcaaatctgagctccccctggttatcggcaccttcctgtacatggaccccgagggggactggttcttgaagggaaacctcctcatcatcatcgtcagtgtgttaatcatcctgcccctcgccctcatgaaacacttgggctacctggggtacaccagtggtctctctctgacctgcatgctgtttttccttgtttcggtcatctacaagaagttccaacttggctgtgctataggccacaatgaaacagcaatggagagtgaagctctcgtgggactccccagccaaggactcaacagcagctgtgaggcccagatgttcacagttgactcacagatgtcctacacagtgcccattatggcttttgcttttgtctgccacc

SEQ ID NO: 228874 - DNA, 1419 bp, Artificial Sequence
  derived and/or modified sequence
atggagctgcaggaccccaagatgaacggcgccctgcccagcgacgccgtgggctacagacaggagagagagggcttcctgcccagcagaggccccgcccccggcagcaagcccgtgcagttcatggacttcgagggcaagaccagcttcggcatgagcgtgttcaacctgagcaacgccatcatgggcagcggcatcctgggcctggcctacgccatggcccacaccggcgtgatcttcttcctggccctgctgctgtgcatcgccctgctgagcagctacagcatccacctgctgctgacctgcgccggcatcgccggcatcagagcctacgagcagctgggccagagagccttcggccccgccggcaaggtggtggtggccaccgtgatctgcctgcacaacgtgggcgccatgagcagctacctgttcatcatcaagagcgagctgcccctggtgatcggcaccttcctgtacatggaccccgagggcgactggttcctgaagggcaacctgctgatcatcatcgtgagcgtgctgatcatcctgcccctggccctgatgaagcacctgggctacctgggctacaccagcggcctgagcctgacctgcatgctgttcttcctggtgagcgtgatctacaagaagttccagctgggctgcgccatcggccacaacgagaccgccatggagagcgaggccctggtgggcctgcccagccagggcctgaacagcagctgcgaggcccagatgttcaccgtggacagccagatgagctacaccgtgcccatcatggccttcgccttcgtgtgccaccccgaggtgctgcccatctacaccgagctgtgcagacccagcaagagaagaatgcaggccgtggccaacgtgagcatcggcgccatgttctgcatgtacggcctgaccgccaccttcggctacctgaccttctacagcagcgtgaaggccgagatgctgcacatgtacagccagaaggaccccctgatcctgtgcgtgagactggccgtgctgctggccgtgaccctgaccgtgcccgtggtgctgttccccatcagaagagccctgcagcagctgctgttccccggcaaggccttcagctggcccagacacgtggccatcgccctgatcctgctggtgctggtgaacgtgctggtgatctgcgtgcccaccatcagagacatcttcggcgtgatcggcagcaccagcgcccccagcctgatcttcatcctgcccagcatcttctacctgagaatcgtgcccagcgaggtggagcccttcctgagctggcccaagatccaggccctgtgcttcggcgtgctgggcgtgctgttcatggccgtgagcctgggcttcatgttcgccaactgggccaccggccagagcagaatgagcggccactag

SEQ ID NO: 228875 - DNA, 1266 bp, Artificial Sequence
  derived and/or modified sequence
atgagcgtgttcaacctgagcaacgccatcatgggcagcggcatcctgggcctggcctacgccatggcccacaccggcgtgatcttcttcctggccctgctgctgtgcatcgccctgctgagcagctacagcatccacctgctgctgacctgcgccggcatcgccggcatcagagcctacgagcagctgggccagagagccttcggccccgccggcaaggtggtggtggccaccgtgatctgcctgcacaacgtgggcgccatgagcagctacctgttcatcatcaagagcgagctgcccctggtgatcggcaccttcctgtacatggaccccgagggcgactggttcctgaagggcaacctgctgatcatcatcgtgagcgtgctgatcatcctgcccctggccctgatgaagcacctgggctacctgggctacaccagcggcctgagcctgacctgcatgctgttcttcctggtgagcgtgatctacaagaagttccagctgggctgcgccatcggccacaacgagaccgccatggagagcgaggccctggtgggcctgcccagccagggcctgaacagcagctgcgaggcccagatgttcaccgtggacagccagatgagctacaccgtgcccatcatggccttcgccttcgtgtgccaccccgaggtgctgcccatctacaccgagctgtgcagacccagcaagagaagaatgcaggccgtggccaacgtgagcatcggcgccatgttctgcatgtacggcctgaccgccaccttcggctacctgaccttctacagcagcgtgaaggccgagatgctgcacatgtacagccagaaggaccccctgatcctgtgcgtgagactggccgtgctgctggccgtgaccctgaccgtgcccgtggtgctgttccccatcagaagagccctgcagcagctgctgttccccggcaaggccttcagctggcccagacacgtggccatcgccctgatcctgctggtgctggtgaacgtgctggtgatctgcgtgcccaccatcagagacatcttcggcgtgatcggcagcaccagcgcccccagcctgatcttcatcctgcccagcatcttctacctgagaatcgtgcccagcgaggtggagcccttcctgagctggcccaagatccaggccctgtgcttcggcgtgctgggcgtgctgttcatggccgtgagcctgggcttcatgttcgccaactgggccaccggccagagcagaatgagcggccactag

SEQ ID NO: 228876 - DNA, 660 bp, Artificial Sequence
  derived and/or modified sequence
atggagctgcaggaccccaagatgaacggcgccctgcccagcgacgccgtgggctacagacaggagagagagggcttcctgcccagcagaggccccgcccccggcagcaagcccgtgcagttcatggacttcgagggcaagaccagcttcggcatgagcgtgttcaacctgagcaacgccatcatgggcagcggcatcctgggcctggcctacgccatggcccacaccggcgtgatcttcttcctggccctgctgctgtgcatcgccctgctgagcagctacagcatccacctgctgctgacctgcgccggcatcgccggcatcagagcctacgagcagctgggccagagagccttcggccccgccggcaaggtggtggtggccaccgtgatctgcctgcacaacgtgggcgccatgagcagctacctgttcatcatcaagagcgagctgcccctggtgatcggcaccttcctgtacatggaccccgagggcgactggttcctgaagggcaacctgctgatcatcatcgtgagcgtgctgatcatcctgcccctggccctgatgaagcacctgggctacctgggctacaccagcggcctgagcctgacctgcatgctgttcttcctggtgagcgtgatctacaagaagttccagctgtag

SEQ ID NO: 228877 - DNA, 576 bp, Artificial Sequence
  derived and/or modified sequence
atggagctgcaggaccccaagatgaacggcgccctgcccagcgacgccgtgggctacagacaggagagagagggcttcctgcccagcagaggccccgcccccggcagcaagcccgtgcagttcatggacttcgagggcaagaccagcttcggcatgagcgtgttcaacctgagcaacgccatcatgggcagcggcatcctgggcctggcctacgccatggcccacaccggcgtgatcttcttcctggccctgctgctgtgcatcgccctgctgagcagctacagcatccacctgctgctgacctgcgccggcatcgccggcatcagagcctacgagcagctgggccagagagccttcggccccgccggcaaggtggtggtggccaccgtgatctgcctgcacaacgtgggcgccatgagcagctacctgttcatcatcaagagcgagctgcccctggtgatcggcaccttcctgtacatggaccccgagggcgactggttcctgaagggcaacctgctgatcatcatcgtgagcgtgctgatcatcctgcccctggccctgatgaagcacctgtag

SEQ ID NO: 228878 - DNA, 495 bp, Artificial Sequence
  derived and/or modified sequence
atggagctgcaggaccccaagatgaacggcgccctgcccagcgacgccgtgggctacagacaggagagagagggcttcctgcccagcagaggccccgcccccggcagcaagcccgtgcagttcatggacttcgagggcaagaccagcttcggcatgagcgtgttcaacctgagcaacgccatcatgggcagcggcatcctgggcctggcctacgccatggcccacaccggcgtgatcttcttcctggccctgctgctgtgcatcgccctgctgagcagctacagcatccacctgctgctgacctgcgccggcatcgccggcatcagagcctacgagcagctgggccagagagccttcggccccgccggcaaggtggtggtggccaccgtgatctgcctgcacaacgtgggcgccatgagcagctacctgttcatcatcaagagcgagctgcccctggtgatcggcaccttcctgtacatggaccccgagggctag

SEQ ID NO: 228879 - DNA, 840 bp, Artificial Sequence
  derived and/or modified sequence
atggagctgcaggaccccaagatgaacggcgccctgcccagcgacgccgtgggctacagacaggagagagagggcttcctgcccagcagaggccccgcccccggcagcaagcccgtgcagttcatggacttcgagggcaagaccagcttcggcatgagcgtgttcaacctgagcaacgccatcatgggcagcggcatcctgggcctggcctacgccatggcccacaccggcgtgatcttcttcctggccctgctgctgtgcatcgccctgctgagcagctacagcatccacctgctgctgacctgcgccggcatcgccggcatcagagcctacgagcagctgggccagagagccttcggccccgccggcaaggtggtggtggccaccgtgatctgcctgcacaacgtgggcgccatgagcagctacctgttcatcatcaagagcgagctgcccctggtgatcggcaccttcctgtacatggaccccgagggcgactggttcctgaagggcaacctgctgatcatcatcgtgagcgtgctgatcatcctgcccctggccctgatgaagcacctgggctacctgggctacaccagcggcctgagcctgacctgcatgctgttcttcctggtgagcgtgatctacaagaagttccagctgggctgcgccatcggccacaacgagaccgccatggagagcgaggccctggtgggcctgcccagccagggcctgaacagcagctgcgaggcccagatgttcaccgtggacagccagatgagctacaccgtgcccatcatggccttcgccttcgtgtgccaccccgaggtgctgcccatctactag

SEQ ID NO: 228880 - DNA, 819 bp, Artificial Sequence
  derived and/or modified sequence
atggagctgcaggaccccaagatgaacggcgccctgcccagcgacgccgtgggctacagacaggagagagagggcttcctgcccagcagaggccccgcccccggcagcaagcccgtgcagttcatggacttcgagggcaagaccagcttcggcatgagcgtgttcaacctgagcaacgccatcatgggcagcggcatcctgggcctggcctacgccatggcccacaccggcgtgatcttcttcctggccctgctgctgtgcatcgccctgctgagcagctacagcatccacctgctgctgacctgcgccggcatcgccggcatcagagcctacgagcagctgggccagagagccttcggccccgccggcaaggtggtggtggccaccgtgatctgcctgcacaacgtgggcgccatgagcagctacctgttcatcatcaagagcgagctgcccctggtgatcggcaccttcctgtacatggaccccgagggcgactggttcctgaagggcaacctgctgatcatcatcgtgagcgtgctgatcatcctgcccctggccctgatgaagcacctgggctacctgggctacaccagcggcctgagcctgacctgcatgctgttcttcctggtgagcgtgatctacaagaagttccagctgggctgcgccatcggccacaacgagaccgccatggagagcgaggccctggtgggcctgcccagccagggcctgaacagcagctgcgaggcccagatgttcaccgtggacagccagatgagctacaccgtgcccatcatggccttcgccttcgtgtgccactag

SEQ ID NO: 228881 - protein, 106 aa, Artificial Sequence
  derived and/or modified sequence
MEFDLGAALEPTSQKPGVGAGHGGDPKLSPHKVQGRSEAGAGPGPKQGHHSSSDSSSSSSDSDTDVKSHAAGSKQHESIPGKAKKPKVKKKEKGKKEKGKKKEAPH

SEQ ID NO: 228882 - DNA, 321 bp, Artificial Sequence
  derived and/or modified sequence
atggagttcgatctgggagcagcccttgagcctaccagtcagaaacctggggtaggggcaggccatggaggcgaccctaaactgagcccacataaggtgcagggcaggagtgaagctggagccggcccaggacctaaacagggccaccattctagcagtgacagttcaagcagctccagtgactctgatacggacgtcaagtcccatgctgcggggagcaagcaacatgaaagcatccccggaaaagcaaaaaagccgaaggtgaaaaaaaaggagaaggggaaaaaagaaaaagggaagaagaaagaagcaccacactag

SEQ ID NO: 228883 - DNA, 321 bp, Artificial Sequence
  derived and/or modified sequence
atggagtttgacctgggcgccgccctggagcccaccagccagaagccaggagtgggcgccggccacggcggggaccccaagctgagcccccacaaggtgcagggccgctctgaggccggggccggccctggccccaagcagggccaccacagcagcagtgacagcagcagcagcagcagtgacagcgacacagatgtgaagagccacgccgccggcagcaagcagcacgagagcatccctgggaaggccaagaagcccaaggtgaagaagaaggagaagggcaagaaggagaagggcaagaagaaggaggccccccactag

SEQ ID NO: 228884 - DNA, 321 bp, Artificial Sequence
  derived and/or modified sequence
atggagttcgacctgggcgccgccctggagcccaccagccagaagccaggtgtcggcgctggacacggcggggatcccaaacttagccctcataaggttcagggcagatcagaagccggcgcagggccgggtccgaagcagggacaccatagcagctctgatagttcaagctcctcatcagactcagacacagacgttaagtctcacgccgcaggatcaaaacagcatgagtcgattcctggcaaggcaaaaaagccaaaagtgaagaaaaaagagaaggggaaaaaagaaaaaggcaaaaagaaagaagcaccgcactag

SEQ ID NO: 228885 - DNA, 321 bp, Artificial Sequence
  derived and/or modified sequence
atggaattcgatttaggcgcagccctggaacctacttctcagaagcctggggtcggggctggccatggtggagatcccaagctcagcccccacaaagtgcaagggaggtccgaggctggagcaggccctgggccaaagcaaggccaccatagcagcagcgattcttcctctagtagttccgactctgacaccgacgtcaagtctcacgctgctggtagtaaacagcacgaatccattcctggcaaagctaaaaagccaaaagtgaaaaagaaagaaaaaggcaagaaggagaaaggtaaaaagaaggaagcgcctcattag

SEQ ID NO: 228886 - DNA, 461 bp, Artificial Sequence
  derived and/or modified sequence
attcctccaacgggcaggtctcagcgctcctccccctgctccgctcctctgcagggcccaggcgcccttggccttaggacccaacttctcttaccgccatggagttcgacctgggagcagccctggagcccacctcccagaagcccggtgtgggggcgggccacgggggagatcccaagctcagtccccacaaagttcagggccggtcggaggcaggggcaggtccgggtccaaagcaaggacaccacagctcttccgactccagcagcagctccagcgattcggacacggatgtgaagtcccacgctgctggctccaagcagcacgagagcatcccgggcaaggccaagaagcccaaagtgaagaagaaggagaagggcaagaaggagaagggcaagaagaaggaggctccccactgaagggccctggacagggctcattaaaccttcctctctgccttc

SEQ ID NO: 228887 - DNA, 321 bp, Artificial Sequence
  derived and/or modified sequence
atggagttcgacctgggcgccgccctggagcccaccagccagaagcccggcgtgggcgccggccacggcggcgaccccaagctgagcccccacaaggtgcagggcagaagcgaggccggcgccggccccggccccaagcagggccaccacagcagcagcgacagcagcagcagcagcagcgacagcgacaccgacgtgaagagccacgccgccggcagcaagcagcacgagagcatccccggcaaggccaagaagcccaaggtgaagaagaaggagaagggcaagaaggagaagggcaagaagaaggaggccccccactag

SEQ ID NO: 228888 - protein, 963 aa, Artificial Sequence
  derived and/or modified sequence
MAAHLKKRVYEEFTKVVQPQEEIATKKLRLTKPSKSAALHIDLCKATSPADALQYLLQFARKPVEAESVEGVVRILLEHYYKENDPSVRLKIASLLGLLSKTAGFSPDCIMDDAINILQNEKSHQVLAQLLDTLLAIGTKLPENQAIQMRLVDVACKHLTDTSHGVRNKCLQLLGNLGSLEKSVTKDAEGLAARDVQKIIGDYFSDQDPRVRTAAIKAMLQLHERGLKLHQTIYNQACKLLSDDYEQVRSAAVQLIWVVSQLYPESIVPIPSSNEEIRLVDDAFGKICHMVSDGSWVVRVQAAKLLGSMEQVSSHFLEQTLDKKLMSDLRRKRTAHERAKELYSSGEFSSGRKWGDDAPKEEVDTGAVNLIESGACGAFVHGLEDEMYEVRIAAVEALCMLAQSSPSFAEKCLDFLVDMFNDEIEEVRLQSIHTMRKISNNITLREDQLDTVLAVLEDSSRDIREALHELLCCTNVSTKEGIHLALVELLKNLTKYPTDRDSIWKCLKFLGSRHPTLVLPLVPELLSTHPFFDTAEPDMDDPAYIAVLVLIFNAAKTCPTMPALFSDHTFRHYAYLRDSLSHLVPALRLPGRKLVSSAVSPSIIPQEDPSQQFLQQSLERVYSLQHLDPQGAQELLEFTIRDLQRLGELQSELAGVADFSATYLRCQLLLIKALQEKLWNVAAPLYLKQSDLASAAAKQIMEETYKMEFMYSGVENKQVVIIHHMRLQAKALQLIVTARTTRGLDPLFGMCEKFLQEVDFFQRYFIADLPHLQDSFVDKLLDLMPRLMTSKPAEVVKILQTMLRQSAFLHLPLPEQIHKASATIIEPAGESDNPLRFTSGLVVALDVDATLEHVQDPQNTVKVQVLYPDGQAQMIHPKPADFRNPGPGRHRLITQVYLSHTAWTEACQVEVRLLLAYNSSARIPKCPWMEGGEMSPQVETSIEGTIPFSKPVKVYIMPKPARR

SEQ ID NO: 228889 - protein, 338 aa, Artificial Sequence
  derived and/or modified sequence
MPALKQTASQVTQTLRDLQRLGELQSELAGVADFSATYLRCQLLLIKALQEKLWNVAAPLYLKQSDLASAAAKQIMEETYKMEFMYSGVENKQVVIIHHMRLQAKALQLIVTARTTRGLDPLFGMCEKFLQEVDFFQRYFIADLPHLQDSFVDKLLDLMPRLMTSKPAEVVKILQTMLRQSAFLHLPLPEQIHKASATIIEPAGESDNPLRFTSGLVVALDVDATLEHVQDPQNTVKVQVLYPDGQAQMIHPKPADFRNPGPGRHRLITQVYLSHTAWTEACQVEVRLLLAYNSSARIPKCPWMEGGEMSPQVETSIEGTIPFSKPVKVYIMPKPARR

SEQ ID NO: 228890 - DNA, 1530 bp, Artificial Sequence
  derived and/or modified sequence
ccaaatagcatctgcagacacttacatctgacagatacgtctcatggtgtaagaaataagtgcctgcagttacttggcaatcttggctctttggagaaaagtgtcacaaaagatgcagaaggcctagctgccagagatgtccagaagattataggggattacttcagtgaccaagacccacgtgtcagaacagcagctataaaagccatgttgcagctccatgaaagaggactgaaattacaccaaacaatttataatcaggcctgtaaattactctctgatgactatgaacaagtgcgcagtgctgcagtccagcttatctgggtcgtcagtcagctctatcctgaaagcattgtcccaattccttcttctaatgaagaaatacgcttagttgatgatgcgtttggcaaaatttgtcacatggtcagtgatggctcttgggtggttcgtgttcaggcagcaaaactgttgggctctatggagcaagtcagttctcatttcttggagcagacccttgacaagaagctgatgtcagatctgaggaggaaacgtactgcacatgagcgtgccaaggaactttacagttcgggggagttttccagtggcagaaagtggggagatgatgctcccaaggaagaagtagataccggggctgtgaacttgattgagtcaggagcttgtggagcttttgttcatgggttggaagatgagatgtatgaggttcgtattgctgctgtggaggccctctgcatgttggcccagtcttcaccctcttttgctgagaagtgccttgatttcctagttgacatgttcaacgatgaaattgaggaagtacgtctgcagtctatacataccatgagaaaaatctctaacaacatcaccctccgagaagatcagcttgacactgtcctggctgtgctagaggattcatccagagatattcgagaggctcttcatgaactcttatgctgtactaatgtttcaaccaaagaagggattcatcttgcattggtggagctgctgaaaaatttaaccaagtaccctactgatagggactccatatggaagtgcttgaagtttctgggaagtcggcatccaaccctggtgcttcccttggtgccagagcttctgagcacccacccattttttgacacagctgaaccagacatggatgatccagcttatattgcagttttggtacttattttcaatgctgctaaaacctgtccaacaatgccagcattgttctcagatcacaccttcaggcactatgcctacctccgagacagtctttctcatcttgttcctgccttgaggttaccaggtagaaaactggtgtcatcagctgtttctcccagcatcatacctcaagaggatccttcccagcagttcctgcagcagagccttgaaagagtgtatagtcttcagcacttggaccctcagggagcccaggagctgctggaattcaccatcagagtcgaggtttcaccatggtggccaggctggtctcaaactcctgagctcaagtga

SEQ ID NO: 228891 - DNA, 3156 bp, Artificial Sequence
  derived and/or modified sequence
tagtgtacggaagctgagagggcccgcgggtaggcatggcggcgcaccttaagaagcgggtttatgaggaattcacgaaagtggttcagccacaggaggaaattgctactaagaaactccgactaacaaaaccaagtaaatctgcagcactccacatagatctgtgtaaagctacctccccagcagatgctttgcaatacttgctccagtttgccaggaagcctgtcgaggcggaaagcgtagagggagtagtcaggattctcttggaacattattacaaggagaatgatccatctgtgagactgaaaattgcatcattgttgggtttattatcaaagacagcaggattttcaccagactgcattatggatgatgccatcaacatcctgcagaatgaaaagtctcatcaagtcctagctcaactgctggatactttgcttgcaattggcactaagctaccagagaatcaagctatccaaatgcgattagttgatgtggcctgcaagcatctgacagatacgtctcatggtgtaagaaataagtgcctgcagttacttggcaatcttggctctttggagaaaagtgtcacaaaagatgcagaaggcctagctgccagagatgtccagaagattataggggattacttcagtgaccaagacccacgtgtcagaacagcagctataaaagccatgttgcagctccatgaaagaggactgaaattacaccaaacaatttataatcaggcctgtaaattactctctgatgactatgaacaagtgcgcagtgctgcagtccagcttatctgggtcgtcagtcagctctatcctgaaagcattgtcccaattccttcttctaatgaagaaatacgcttagttgatgatgcgtttggcaaaatttgtcacatggtcagtgatggctcttgggtggttcgtgttcaggcagcaaaactgttgggctctatggagcaagtcagttctcatttcttggagcagacccttgacaagaagctgatgtcagatctgaggaggaaacgtactgcacatgagcgtgccaaggaactttacagttcgggggagttttccagtggcagaaagtggggagatgatgctcccaaggaagaagtagataccggggctgtgaacttgattgagtcaggagcttgtggagcttttgttcatgggttggaagatgagatgtatgaggttcgtattgctgctgtggaggccctctgcatgttggcccagtcttcaccctcttttgctgagaagtgccttgatttcctagttgacatgttcaacgatgaaattgaggaagtacgtctgcagtctatacataccatgagaaaaatctctaacaacatcaccctccgagaagatcagcttgacactgtcctggctgtgctagaggattcatccagagatattcgagaggctcttcatgaactcttatgctgtactaatgtttcaaccaaagaagggattcatcttgcattggtggagctgctgaaaaatttaaccaagtaccctactgatagggactccatatggaagtgcttgaagtttctgggaagtcggcatccaaccctggtgcttcccttggtgccagagcttctgagcacccacccattttttgacacagctgaaccagacatggatgatccagcttatattgcagttttggtacttattttcaatgctgctaaaacctgtccaacaatgccagcattgttctcagatcacaccttcaggcactatgcctacctccgagacagtctttctcatcttgttcctgccttgaggttaccaggtagaaaactggtgtcatcagctgtttctcccagcatcatacctcaagaggatccttcccagcagttcctgcagcagagccttgaaagagtgtatagtcttcagcacttggaccctcagggagcccaggagctgctggaattcaccatcagggatctgcaaagacttggagaacttcaatctgaattggcaggagtagctgatttctctgccacctatcttcgctgtcaactacttctcatcaaggccttgcaggaaaagttgtggaatgtagctgcccctttgtatttgaagcagagtgatttggcctcagcagcagcgaaacagattatggaagagacctacaaaatggaattcatgtacagtggtgtggagaataagcaggtggtgattatacatcacatgaggctgcaggccaaagctttgcaacttatagtaacagcacgaactacacgaggacttgaccccttatttgggatgtgtgaaaaatttttacaggaagtagacttttttcagaggtatttcatcgctgatttgccccacttgcaggacagctttgtggacaaactccttgaccttatgccccgactcatgacatccaaacctgcagaagtggtcaaaattctacagaccatgctgcgacagagtgcctttctgcatctcccgcttccagagcagatccacaaagcctcagccaccatcatcgagccagcgggcgagtcagacaaccctttgcggtttacctctgggttggtggttgccctggatgttgatgcaaccctggagcatgtgcaggatcctcagaacactgttaaggtccaggtcttatatccagatggccaggctcagatgattcaccccaagcctgcagacttccggaatcctggcccagggcggcaccggctcatcactcaggtttatctctcccacaccgcttggacagaggcatgccaggtggaagtgaggctgctgctggcctacaactccagtgctcgcattccaaaatgcccctggatggagggtggtgagatgtcaccacaggtggaaaccagcatcgagggcaccattcccttcagcaagcctgtaaaagtttatataatgcccaaacctgcacggcgctaaggcaaaaacagtcttcccaaccgtggcctagagggcccttcttaggtgtcagaatgagccaagcctgaagcacttcacctggaattgatgtgtaggcttaaggagtatgtgacccttacagtctcatctggtatcaaacacaggataaattgtttcttcattaaaaaataaaaaaccttcaagtctacttacccttctcctgtccacaataaagttgagaaaacaccaa

SEQ ID NO: 228892 - DNA, 1530 bp, Artificial Sequence
  derived and/or modified sequence
cccaacagtatatgcaggcacttacatctgacggacacatcacatggtgtccggaacaagtgtctacagttgctggggaatctgggtagtttggaaaagtctgtcacaaaggatgcagaaggcctggctgcaagggacgtacaaaaaatcataggggattatttctcagaccaggacccccgagtccggaccgcagccatcaaggctatgctgcagttacatgaacgtggcctgaagctgcatcagacaatatacaatcaagcttgcaaactcctgagtgacgattatgaacaggtcaggagcgccgccgtgcagctcatctgggtggtcagccaactctacccggaaagcatcgtgccgatcccctcatcgaacgaggagatccgcttagtggatgatgctttcggaaagatatgtcacatggtgtccgatggctcttgggtcgtacgtgtccaagccgcaaagctgctgggttccatggagcaggtatcctctcactttctggagcagactttggacaagaaactcatgagcgacctcaggagaaagcggaccgcgcacgaaagggctaaggagctgtatagcagtggcgagttcagctccggcagaaagtggggagatgacgccccaaaggaagaggtggatacaggagctgttaaccttatagagtctggggcatgcggggccttcgtccatggactggaagacgaaatgtatgaggtcaggatagccgcggttgaagccctctgtatgctggcccaaagttcaccatcttttgctgaaaagtgcctagatttcctagtggacatgttcaacgatgaaattgaggaggtgcgcctacagtctatccacacaatgcgaaagatcagcaacaacattaccctgcgcgaagatcagctggacaccgtgttagccgtcctcgaggattcctcccgggatatcagggaggcgctccatgagttactgtgctgtacgaatgtctccaccaaggaaggcattcacctggcactggtcgaactattaaagaacctgaccaagtatccaaccgaccgtgacagcatctggaagtgcctgaaatttctgggttctaggcaccccacattggtcctgcctctggttccagagctgctatctacccacccattctttgacacggccgagcccgatatggacgaccccgcgtacattgcggtgcttgtgctgatcttcaatgccgccaaaacttgtcccacgatgcccgctctcttctcagatcacacattcagacattatgcctacctgagagattctttgtcccacctggttcccgcacttcgtctgccgggtagaaagcttgtgagttcagccgtgagccccagtatcatcccccaggaggacccctcgcagcaatttctccagcaatctctcgagcgcgtgtattcactgcagcatttagatcctcagggcgctcaggagctactagagtttactatccgtgtggaagttagcccatggtggcctgggtggagtcaaacaccagaactgaagtag

SEQ ID NO: 228893 - DNA, 2892 bp, Artificial Sequence
  derived and/or modified sequence
atggctgctcacctgaagaaacgcgtttatgaggagtttaccaaggtcgttcagccccaggaggagatcgccacgaagaaactgaggttaactaaaccttcaaagtctgcagccctgcacatcgacctgtgcaaagctacaagccccgcagatgctttacaatacctgctccagttcgcacgcaaacctgtggaggctgaatctgttgaaggtgtagtgaggatcttgctggagcactattacaaggaaaacgatccgtccgtgcggctcaaaatagcaagcctgttgggtctgctgagcaagaccgccggcttcagtcccgactgtattatggacgacgcaatcaatatcttgcagaatgagaaatcgcaccaggtcctggcccagctgctcgatacccttctcgctatcggaaccaaacttcccgagaatcaggccatacagatgagactggtcgatgtggcctgcaagcaccttacagacacatcccacggtgtaagaaacaagtgtctgcagctgttgggcaacttagggtccctggagaagagtgtaactaaggacgcagagggactggcagcccgtgacgtgcaaaagataataggtgactattttagtgatcaggatccacgggtcagaacagcagcaattaaggccatgctgcagctgcatgaacgcggtctcaaactgcaccagacgatatacaaccaagcctgcaagcttctttcagacgattacgaacaggttcggtcagccgcggtgcagctcatttgggtggtatcccagctgtaccctgagtctattgtgcctataccttcaagcaacgaggagattagactggtggacgacgcgtttggtaaaatttgtcatatggtatcagatggttcctgggtggttagagttcaagccgccaagctgcttggttcaatggagcaggtttcgtctcactttctggaacagacactcgataagaagttaatgtctgatttacggcgcaaacgcacagcgcacgagcgggccaaagagctgtacagtagcggtgaattttcctcaggtcgtaagtggggcgatgacgcgcccaaggaggaagtcgatactggcgccgttaacctgatcgagtctggagcttgcggcgccttcgtgcatgggctggaagatgagatgtatgaagtcagaatcgctgccgtagaagctctgtgcatgcttgctcagtctagtcctagcttcgctgagaaatgcctcgatttcctcgttgatatgtttaacgacgagattgaagaagtgcgccttcagagtatacatacaatgagaaagatctctaacaatatcacccttagagaagatcagcttgacactgttcttgcggtcctcgaagacagctcccgcgatatcagagaggccttacacgagctgctctgttgcactaatgtgtctacgaaagaaggaatccacctcgctcttgtggaactgttgaagaatctcaccaaataccccacagatcgcgactcgatctggaagtgtttgaagtttcttggttcgaggcaccccaccctagtgctccccctggtgccagagctgttaagcacccaccccttctttgacacggctgaaccggacatggatgatcctgcctacattgccgtcctggtgttgatctttaacgctgctaagacatgccccaccatgcccgccttgttttctgatcacacatttagacactatgcgtatctgagggatagcctctcccacctggtgcctgcacttaggcttcctggcagaaaacttgtcagctccgcagtaagtcctagtatcatcccacaggaggatccgtcgcagcaattcctgcagcagagccttgaacgcgtgtatagcctgcagcacctcgacccacagggcgcccaggagctgctggaattcacaatccgggatttacaacggctgggggagctgcagagcgagctggctggtgtagctgatttctctgctacttacttacgctgtcagctgttgctgattaaagccctccaggagaagctttggaacgtcgctgcgcccctgtacttgaagcagagcgacctcgccagcgccgccgcaaaacagatcatggaagaaacatacaaaatggaattcatgtacagcggcgtggagaacaaacaggtggtgatcattcatcacatgcggctccaggcaaaagcccttcagctgatcgtgaccgctcgaacaacgagagggctcgacccgttgttcgggatgtgtgagaaatttcttcaggaagtggactttttccagcgctattttatcgccgacctgcctcaccttcaggattccttcgtggataagctgttagatctgatgcctcggctcatgactagcaagccagccgaggtggtcaaaatattgcagactatgctgagacaaagcgcttttctgcacctgccactgccggaacagattcataaagcttcagccactatcattgaacccgcgggagaaagtgataacccattacgttttacatccggactggtggttgcgctcgacgtggatgctacactcgagcatgtgcaagatccacagaacaccgtgaaggtgcaggtgctgtatccagatggccaggcccaaatgattcacccaaagccagctgacttcaggaaccccggtcccggaaggcaccggctgattacacaagtctatctttctcacaccgcatggaccgaagcctgtcaggtagaagtccggctccttctcgcatacaactcttccgcacggattcccaaatgcccctggatggaaggaggggagatgagcccccaagtggagacctcaattgagggcaccattcctttttctaagcctgttaaagtttacattatgcctaagcccgcacgtaggtag

SEQ ID NO: 228894 - DNA, 1530 bp, Artificial Sequence
  derived and/or modified sequence
cccaacagcatctgccgccacctgcacctgacagacaccagccatggagtgaggaacaagtgcctgcagctgctgggcaacctgggcagcctggagaagtctgtgaccaaggatgctgagggcctggccgccagagatgtgcagaagatcattggagactacttcagtgaccaggacccccgggtgaggacagctgccatcaaggccatgctgcagctgcacgagcggggcctgaagctgcaccagaccatctacaaccaggcctgcaagctgctgagtgatgattatgagcaggtgcgctctgctgctgtgcagctgatctgggtggtgtcccagctgtacccagagagcatcgtgcccatccccagcagcaatgaggagatccggctggtggatgatgccttcggcaagatctgccacatggtgtctgatggctcctgggtggtgcgggtgcaggccgccaagctgctgggctccatggagcaggtgagcagccacttcctggagcagaccctggacaagaagctgatgtctgacctgcggaggaagaggacagcccacgagcgggccaaggagctgtacagcagcggggagttcagcagcggcaggaagtggggagatgatgcccccaaggaggaggtggacaccggggctgtgaacctgattgagagcggggcctgtggggcctttgtgcacggcctggaggatgagatgtatgaggtgagaattgctgctgtggaggccctgtgcatgctggcccagagcagccccagctttgctgagaagtgcctggacttcctggtggacatgtttaatgatgaaattgaggaggtgcggctgcagagcatccacaccatgaggaagatcagcaacaacatcaccctgcgggaggaccagctggacacagtgctggccgtgctggaggacagcagccgggacatccgggaggccctgcacgagctgctgtgctgcaccaacgtgtccaccaaggagggcatccacctggccctggtggagctgctgaagaacctgaccaagtaccccacagaccgggacagcatctggaagtgcctgaagttcctgggcagccgccaccccaccctggtgctgcccctggtgcctgagctgctgagcacccaccccttctttgacacagctgagccagacatggatgatcctgcctacatcgctgtgctggtgctgatcttcaatgctgccaagacctgccccaccatgcctgccctcttcagtgaccacaccttccgccactacgcctacctgcgggacagcctgagccacctggtgcctgccctgcggctgcccggcaggaagctggtgagcagcgctgtgagccccagcatcatcccccaggaggaccccagccagcagttcctgcagcagagcctggagcgggtgtacagcctgcagcacctggacccccagggcgcccaggagctgctggagttcaccatccgggtggaggtgagcccctggtggccaggctggagccagaccccagagctgaagtag

SEQ ID NO: 228895 - DNA, 2892 bp, Artificial Sequence
  derived and/or modified sequence
atggccgcccacctgaagaagagggtgtatgaggagttcaccaaggtggtgcagccccaggaggagatcgccaccaagaagctgcggctgaccaagcccagcaagtctgctgccctgcacatcgacctgtgcaaggccaccagccctgcagatgccctgcagtacctgctgcagtttgccaggaagcctgtggaggccgagagcgtggagggcgtggtgcgcatcctgctggagcactactacaaggaaaatgaccccagcgtgcggctgaagatcgccagcctgctgggcctgctgagcaagacagctggcttctccccagactgcatcatggatgatgccatcaacatcctgcagaatgagaagagccaccaggtgctggcccagctgctggacaccctgctggccatcggcaccaagctgcctgagaaccaggccatccagatgaggctggtggatgtggcctgcaagcacctgacagacaccagccacggcgtgaggaacaagtgcctgcagctgctgggcaacctgggcagcctggagaagtctgtgaccaaggatgctgagggcctggccgccagagatgtgcagaagatcatcggggactacttcagtgaccaggacccccgggtgaggacagctgccatcaaggccatgctgcagctgcacgagcggggcctgaagctgcaccagaccatctacaaccaggcctgcaagctgctgagtgatgattatgagcaggtgcgctctgctgctgtgcagctgatctgggtggtgtcccagctgtacccagagagcatcgtgcccatccccagcagcaatgaggagatccggctggtggatgatgccttcggcaagatctgccacatggtgtctgatggctcctgggtggtgcgggtgcaggccgccaagctgctgggctccatggagcaggtgagcagccacttcctggagcagaccctggacaagaagctgatgtctgacctgcggaggaagaggacagcccacgagcgggccaaggagctgtacagcagtggagagttcagcagcggcaggaagtggggagatgatgcccccaaggaggaggtggacacaggagctgtgaacctgattgaaagtggggcctgtggggcctttgtgcacggcctggaggatgagatgtatgaggtgagaattgctgctgtggaggccctgtgcatgctggcccagagcagccccagctttgctgagaagtgcctggacttcctggtggacatgtttaatgatgaaattgaggaggtgcggctgcagagcatccacaccatgaggaagatcagcaacaacatcaccctgcgggaggaccagctggacacagtgctggccgtgctggaggacagcagccgggacatccgggaggccctgcacgagctgctgtgctgcaccaacgtgtccaccaaggagggcatccacctggccctggtggagctgctgaagaacctgaccaagtaccccacagaccgggacagcatctggaagtgcctgaagttcctgggcagccgccaccccaccctggtgctgcccctggtgcctgagctgctgagcacccaccccttctttgacacagctgagccagacatggatgatcctgcctacatcgctgtgctggtgctgatcttcaatgctgccaagacctgccccaccatgcctgccctcttcagtgaccacaccttccgccactacgcctacctgcgggacagcctgagccacctggtgcctgccctgcggctgcccggcaggaagctggtgtcctctgctgtgagccccagcatcatcccccaggaggaccccagccagcagttcctgcagcagagcctggagcgggtgtacagcctgcagcacctggacccccagggcgcccaggagctgctggagttcaccatccgggacctgcagaggctgggggagctgcagagcgagctggccggcgtggccgacttcagcgccacctacctgcgctgccagctgctgctgatcaaggccctgcaggagaagctgtggaatgtggccgcccccctgtacctgaagcagagcgacctggccagcgctgctgccaagcagatcatggaggagacctacaagatggagttcatgtacagcggcgtggagaacaagcaggtggtgatcatccaccacatgaggctgcaggccaaggccctgcagctgattgtgacagcccggaccacccggggcctggaccccctgtttggcatgtgtgagaagttcctgcaggaggtggacttcttccagcgctacttcatcgctgacctgccccacctgcaggacagctttgtggacaagctgctggacctgatgccccggctgatgaccagcaagccagctgaggtggtgaagatcctgcagaccatgctgcggcagagcgccttcctgcacctgcccctgcctgagcagatccacaaggccagcgccaccatcatcgagcctgctggggagagtgacaaccccctgcgcttcaccagcggcctggtggtggccctggatgtggatgccaccctggagcacgtgcaggacccccagaacacagtgaaggtgcaggtgctgtacccagatggccaggcccagatgatccaccccaagccagctgacttcagaaatcctggccctggccgccacaggctcatcacccaggtgtacctgagccacacagcctggacagaggcctgccaggtggaggtgcggctgctgctggcctacaacagcagcgcccgcatccccaagtgcccctggatggagggcggggagatgagcccccaggtggagaccagcattgagggcaccatccccttcagcaagcctgtgaaggtgtacatcatgcccaagccagcccggaggtag

SEQ ID NO: 228896 - DNA, 1530 bp, Artificial Sequence
  derived and/or modified sequence
cccaacagcatctgccggcacctgcacctgaccgacaccagccacggggttaggaacaaatgtctccagctcttgggtaacttaggctctctggagaagagtgtcactaaggatgctgaaggccttgccgccagggacgtccaaaagatcatcggtgattacttttccgaccaggacccccgcgtgcgtaccgccgctatcaaagcgatgctgcagctgcacgaacgggggctcaagctgcaccagaccatatataaccaggcgtgtaaacttctgagcgatgactacgaacaggtgaggtctgcagctgtgcagttaatttgggttgtgtcacagctgtatcccgaatcaattgtaccaatccccagtagcaacgaggaaatccgattagtggacgacgcctttggcaagatttgccacatggtgagcgatggatcttgggtggtcagggtgcaggccgccaaactcctgggcagcatggaacaggtgtcatcccattttctggaacaaactttggataaaaaactgatgtccgacctgaggcgaaagcggacagcacatgaacgagccaaagaattatacagttcgggggagttcagctctggcagaaagtggggcgacgacgctcccaaagaggaagttgataccggtgcagtgaatctcatcgaatctggagcttgtggagcgttcgtgcatggacttgaggatgagatgtacgaggtacgaatcgctgccgtggaagctctgtgcatgctggcacagtcctccccatcgttcgctgagaaatgcttagacttcttggtcgacatgttcaatgatgaaatcgaggaggtgaggctgcaatctattcacaccatgagaaaaatctcaaacaatataacgctcagagaggaccagctggatacagtcctcgcagttctggaagactcttctagggacatccgagaggccttgcatgaactgctgtgctgtacgaatgtttcaacaaaggagggtattcatttggccctggtcgaactgctgaagaacttaacgaagtaccctaccgatcgcgacagcatctggaagtgcctgaaattcctaggaagtcggcaccccacgctagtgctcccactagtgcctgagctgctctccacccatccttttttcgacactgccgagcccgacatggatgacccagcttatatcgcagtcttggtgctcatttttaatgccgcaaagacatgcccaacgatgccagccctctttagcgatcacaccttccggcactacgcatatctgagagactcactctcacacttggtgccagcattgaggctgcctggccggaaattggtaagcagtgccgtaagcccaagtatcatccctcaggaggaccctagccagcaattcctccagcaatcgctggagagagtgtactccctccagcatctcgacccacagggagcccaggagctgttggaattcactattagagtggaggtgtcaccttggtggcctgggtggagccagacccccgagcttaaatag

SEQ ID NO: 228897 - DNA, 2892 bp, Artificial Sequence
  derived and/or modified sequence
atggccgcccacctgaagaagcgggtgtacgaggagttcaccaaggtcgtccagccacaggaggaaattgcaaccaagaagttaagacttactaaaccctcgaagtcagcggccctgcacatcgacctgtgtaaggctacaagcccagctgacgctctccagtatctgctgcagtttgctagaaagccagtggaagctgagtcggtcgagggagttgtgcgaattctcttagagcattactacaaggaaaatgacccgagcgttagactaaaaatagcctccctactgggactcctcagcaaaactgctggcttctcaccggactgtatcatggatgatgctatcaacattctgcagaacgaaaaaagccaccaggttctcgcccagttgctggacactctcttggcaattggcaccaaattaccagaaaatcaggctatccaaatgaggcttgtggatgtggcctgcaagcacctgaccgacacctcccacggggtgaggaataagtgcctccagctgttaggcaaccttggcagcctggagaaatcagttaccaaggatgccgaaggcctggccgcccgcgacgtgcaaaaaatcataggcgactacttttcagaccaagaccccagggtgcgtacagccgctattaaagccatgctccagctgcacgaacgaggcttaaagctgcaccagactatctataaccaggcctgtaaactcttgtctgatgattatgaacaggtgcgctcagctgcagttcaactcatatgggtggtgagtcagttgtatcccgaaagtatagtacctatcccctctagcaacgaggaaattcgtctggtggatgacgcattcgggaaaatctgtcatatggtcagcgatgggtcctgggtggtccgcgtgcaggctgccaagttgctgggctccatggaacaagttagcagtcactttttagaacaaactttggataaaaagctgatgtctgatttgcgcagaaaacggactgcccatgagcgcgcaaaggagctgtactcctccggagagttctcctcaggccgcaagtggggtgacgacgctcctaaggaggaagtggatacaggggctgtaaatctcatagagagcggagcatgtggggccttcgtgcacggactggaggatgaaatgtatgaggtgcgaatcgcagccgtggaagccctctgcatgctggcgcaatcgagccccagctttgcagagaagtgtttggacttcctcgtggatatgttcaacgacgaaatagaggaggtcaggctgcagagcatccacacaatgagaaaaattagtaataatatcacgttacgggaggaccagttggacactgttttggctgtattagaagactctagtcgcgacatacgagaggcactacacgaacttctatgttgcaccaatgtctcgacaaaagaagggattcacttggcactggttgagctgctgaaaaacttaaccaagtatcctaccgatagagattctatatggaagtgtttgaaattccttggcagtaggcatcccactctggtgctgcctttggtacccgagctactatccacgcacccattctttgatacggcagaaccggatatggacgaccctgcatatatagctgtcctggttctgatctttaatgctgctaagacttgcccgacgatgcctgcacttttcagcgatcacacttttaggcattacgcgtatctgcgggatagcctcagccaccttgtgccagccctgaggctgccaggccgaaaacttgtgtccagcgctgtgtcccccagcattataccccaggaggacccgagccagcagttcttgcagcagagcttggaaagggtatatagccttcaacatctggatccacaaggggcccaagaactcctggaatttaccattagggacctccagaggttaggggaactgcagagtgaacttgcgggagtcgctgactttagcgcgacttatttaagatgccagctattgctgattaaagcattacaggagaaactctggaacgtggccgctcccctgtatctgaaacagagtgatctggcctctgcggccgcaaagcagatcatggaagagacatataaaatggagtttatgtatagcggggtggagaataagcaggttgtaattatccaccacatgagactacaggccaaagccttgcagttgattgtcacggccaggactactcgtggtctggaccccctgtttgggatgtgcgagaaatttttgcaagaggtagatttctttcagcgctacttcatagcagacctgccacatttacaggacagctttgttgataagctattggacttaatgccaagactgatgactagcaaaccagcagaagtggtgaaaattttgcaaacaatgctcaggcaatccgcttttttacatctgcccttaccagagcagatccacaaggcatcagccactattatcgaacctgcaggcgaaagtgacaacccactccggtttacatccggtctcgtggtagctctcgacgtggacgctacactggaacatgtccaggacccccaaaacaccgtgaaggtgcaggttctatacccagatggccaggcgcagatgatccatcctaaaccagccgacttccggaatccaggtcccggcaggcaccggctgatcactcaggtttacctaagccacaccgcgtggaccgaagcctgtcaggtggaagtgaggctactcttggcttacaactccagtgcccggataccaaaatgtccctggatggaggggggagaaatgagtcctcaggtagaaacttccattgaaggaaccattccattctcgaaacctgttaaagtgtacatcatgcctaagcctgcgcgtagatag

SEQ ID NO: 228898 - DNA, 1530 bp, Artificial Sequence
  derived and/or modified sequence
cccaattcaatctgtcggcacctccatctcaccgatactagccatggtgtccgcaacaaatgtctgcagttgcttgggaacctcggatccctcgagaagtccgtgaccaaagacgcagaggggctagctgcacgcgatgtgcagaaaatcatcggagattattttagtgaccaggacccgagggtccggaccgccgcaattaaagcaatgctgcagttgcatgaaagggggttgaagctgcatcaaacaatctacaaccaagcctgcaagcttctgtctgacgactatgaacaggtgcggagtgcagctgtccagttgatctgggtcgtcagccagctgtaccccgagtccattgtgcctattcctagctcaaacgaagaaatccgcctcgtggatgatgctttcggcaaaatatgtcacatggtgtctgatggttcctgggttgtccgcgtgcaagccgctaagctgttggggtccatggaacaagtgtcaagccactttctggaacagacacttgataaaaagctcatgtctgacctgagacggaagcgcacggcccacgaacgcgcaaaggaactttactcttccggcgaattctctagcggaaggaagtggggggatgatgctccgaaggaagaagtcgataccggtgcagtcaacctcattgaatctggtgcttgcggagctttcgtccacggattggaagacgaaatgtacgaggtgcgtatcgccgcagtcgaggcattgtgcatgctcgcccagtcctcaccctccttcgctgagaagtgcttggactttctagtcgatatgttcaacgacgaaatcgaggaagttaggctccagagcattcataccatgcggaagatcagcaataacatcaccctacgggaagaccagcttgacaccgttctggcggtccttgaggacagtagtagagacattcgggaggcactgcacgagctgctgtgctgcacaaacgtaagcacaaaagagggcatccatctggcccttgtagagttgctgaagaatctgaccaaataccctacagacagggatagtatttggaagtgcctgaagttccttggtagtcgtcatcctaccctggttctgcctctcgtcccggagctgctgtctactcaccctttcttcgataccgctgagccggacatggacgaccctgcttacattgcagtgctagtgctaatcttcaacgctgctaaaacttgtccgaccatgccggctctcttttcagaccacaccttccggcactacgcatatctgagagactccctgtctcatctagtgcccgcattgaggctcccgggacggaagctagtgtcctcagcggtttcgccatctatcatcccgcaggaggacccatcccagcagtttttgcaacagtcacttgagcgagtgtactccctccagcaccttgatccccagggagcgcaggagttgctggagttcacaatccgggttgaggtgtctccctggtggcctgggtggtcacagaccccagaactaaaatag

SEQ ID NO: 228899 - DNA, 2892 bp, Artificial Sequence
  derived and/or modified sequence
atggccgctcatctcaaaaaacgcgtctacgaagagttcactaaggtggtccagccgcaggaagaaatcgctaccaagaagctacggttgaccaagccctccaaatcagcagcattgcatattgacttgtgtaaggcaacatcaccagccgacgcgctgcagtatctgttgcagttcgcgcgtaaacccgtcgaagccgagtcggttgaaggtgtcgtgaggattctgctggaacactattacaaagaaaacgacccatctgtacggctcaaaatcgcctcactgcttggattactgagcaagacagccggtttttcacctgactgtataatggatgatgccattaacatactccagaacgaaaagagtcatcaagtgttggcacaactgctggatacattacttgcaattggcacaaaactgccagagaatcaggccattcaaatgaggctggtggacgtagcttgcaaacatctgactgacacatcgcacggcgttcggaacaagtgcctgcagctccttggcaatctgggcagtctggaaaagtcggtgaccaaggacgccgaaggtttggccgctcgcgatgtccagaagataataggcgattacttttctgatcaggaccccagagtgcgaactgccgcaatcaaggcgatgttgcaactccacgagcgtgggctaaaactgcaccaaactatctataatcaagcctgtaaactgctgtcggatgattatgagcaagtgaggtcagcggcagttcagctgatttgggtagttagccagctctatccggaatctatcgtgccaatacctagcagtaacgaggaaatcaggctagtggatgatgccttcggcaagatctgccacatggtcagtgatgggagctgggtcgtgcgcgtacaggcagctaagctgctgggctccatggagcaggtctccagtcactttcttgagcaaactttggacaagaagttgatgagcgatttgcgaaggaagaggacagcccatgaacgcgcaaaagagctgtattcctcaggggagttctctagcggaaggaagtggggcgacgacgccccaaaggaagaggtggataccggtgctgtaaacctcatcgagagcggcgcttgcggcgctttcgtacacgggctcgaagatgagatgtacgaggtgcgcatcgcggctgtggaggccctctgtatgcttgcccaatcttcgccatctttcgccgagaaatgcctagactttctggtcgacatgttcaatgatgagattgaagaagtcagactgcagtcgatacacaccatgcggaagatctccaataacatcacgcttagggaagatcaactggataccgtcctggccgtgctggaagacagttctagagacataagggaggcgctgcatgagctgctctgttgtaccaacgtctctacaaaagagggaatccatctggcactagtggaacttcttaaaaatctgacaaagtaccctacagatagggactcaatttggaaatgcctgaagttcctgggatcacgacacccgaccctggtgctccccttggtgcccgagctgcttagtacacatccattttttgacacagcggaaccagatatggacgatcctgcttacattgctgtgctcgtacttattttcaacgcagccaagacttgccccactatgcccgcacttttctctgaccacaccttccgtcattacgcctaccttagagacagtctgagtcatctggtaccggctttgcggctgcccggacggaagttagtgagttccgctgtgtctccctcaatcatcccccaggaggaccctagtcagcagttcctacagcagtcactggagagggtctacagcctccagcatctggacccacagggggcacaggaactcctcgagttcaccatcagagacttgcaacgattgggtgaacttcaatccgagctagctggggtggccgacttttccgccacgtatttacgctgccagctgctgcttattaaagcccttcaggagaagctgtggaatgtagctgccccactgtacctcaagcagagtgatctagcatcagcagccgctaaacagattatggaagagacttacaaaatggaatttatgtactctggcgtggaaaacaaacaggtggtgatcattcatcatatgcgactgcaggccaaagctctgcagttgatcgtcaccgctcggacaactcggggtctcgatccgctgttcgggatgtgtgagaaattccttcaggaggtggacttttttcagcggtattttatcgccgatctaccacacttacaggattctttcgttgataagctcctcgatctcatgccaagactgatgaccagtaagccagcggaagtcgtcaagattctacagaccatgctacgccagtcagcctttcttcacttgccattgcctgagcagatccacaaggctagcgctacaattattgagccagcaggggagagcgataacccactgagattcacttcaggcctggtcgtagcccttgacgtggatgcaaccctagagcacgtgcaggatccacagaatactgtgaaggtgcaggtcttgtaccccgatggccaggcccagatgatccatccaaagccggcagatttcagaaacccgggtccaggcaggcatcgcttgatcactcaagtgtacctgagccacactgcctggactgaggcttgccaggtggaagtacggttgctgttagcttacaactccagcgccaggatacctaaatgcccttggatggaaggaggagagatgtctccccaagtggaaacaagtatcgaaggcactattcccttcagtaaacccgtgaaggtgtacatcatgccaaaaccagccagacggtag

SEQ ID NO: 228900 - DNA, 1530 bp, Artificial Sequence
  derived and/or modified sequence
cccaacagcatctgcagacacctgcacctgaccgacaccagccacggcgtgagaaacaagtgcctgcagctgctgggcaacctgggcagcctggagaagagcgtgaccaaggacgccgagggcctggccgccagagacgtgcagaagatcatcggcgactacttcagcgaccaggaccccagagtgagaaccgccgccatcaaggccatgctgcagctgcacgagagaggcctgaagctgcaccagaccatctacaaccaggcctgcaagctgctgagcgacgactacgagcaggtgagaagcgccgccgtgcagctgatctgggtggtgagccagctgtaccccgagagcatcgtgcccatccccagcagcaacgaggagatcagactggtggacgacgccttcggcaagatctgccacatggtgagcgacggcagctgggtggtgagagtgcaggccgccaagctgctgggcagcatggagcaggtgagcagccacttcctggagcagaccctggacaagaagctgatgagcgacctgagaagaaagagaaccgcccacgagagagccaaggagctgtacagcagcggcgagttcagcagcggcagaaagtggggcgacgacgcccccaaggaggaggtggacaccggcgccgtgaacctgatcgagagcggcgcctgcggcgccttcgtgcacggcctggaggacgagatgtacgaggtgagaatcgccgccgtggaggccctgtgcatgctggcccagagcagccccagcttcgccgagaagtgcctggacttcctggtggacatgttcaacgacgagatcgaggaggtgagactgcagagcatccacaccatgagaaagatcagcaacaacatcaccctgagagaggaccagctggacaccgtgctggccgtgctggaggacagcagcagagacatcagagaggccctgcacgagctgctgtgctgcaccaacgtgagcaccaaggagggcatccacctggccctggtggagctgctgaagaacctgaccaagtaccccaccgacagagacagcatctggaagtgcctgaagttcctgggcagcagacaccccaccctggtgctgcccctggtgcccgagctgctgagcacccaccccttcttcgacaccgccgagcccgacatggacgaccccgcctacatcgccgtgctggtgctgatcttcaacgccgccaagacctgccccaccatgcccgccctgttcagcgaccacaccttcagacactacgcctacctgagagacagcctgagccacctggtgcccgccctgagactgcccggcagaaagctggtgagcagcgccgtgagccccagcatcatcccccaggaggaccccagccagcagttcctgcagcagagcctggagagagtgtacagcctgcagcacctggacccccagggcgcccaggagctgctggagttcaccatcagagtggaggtgagcccctggtggcccggctggagccagacccccgagctgaagtag

SEQ ID NO: 228901 - DNA, 2892 bp, Artificial Sequence
  derived and/or modified sequence
atggccgcccacctgaagaagagagtgtacgaggagttcaccaaggtggtgcagccccaggaggagatcgccaccaagaagctgagactgaccaagcccagcaagagcgccgccctgcacatcgacctgtgcaaggccaccagccccgccgacgccctgcagtacctgctgcagttcgccagaaagcccgtggaggccgagagcgtggagggcgtggtgagaatcctgctggagcactactacaaggagaacgaccccagcgtgagactgaagatcgccagcctgctgggcctgctgagcaagaccgccggcttcagccccgactgcatcatggacgacgccatcaacatcctgcagaacgagaagagccaccaggtgctggcccagctgctggacaccctgctggccatcggcaccaagctgcccgagaaccaggccatccagatgagactggtggacgtggcctgcaagcacctgaccgacaccagccacggcgtgagaaacaagtgcctgcagctgctgggcaacctgggcagcctggagaagagcgtgaccaaggacgccgagggcctggccgccagagacgtgcagaagatcatcggcgactacttcagcgaccaggaccccagagtgagaaccgccgccatcaaggccatgctgcagctgcacgagagaggcctgaagctgcaccagaccatctacaaccaggcctgcaagctgctgagcgacgactacgagcaggtgagaagcgccgccgtgcagctgatctgggtggtgagccagctgtaccccgagagcatcgtgcccatccccagcagcaacgaggagatcagactggtggacgacgccttcggcaagatctgccacatggtgagcgacggcagctgggtggtgagagtgcaggccgccaagctgctgggcagcatggagcaggtgagcagccacttcctggagcagaccctggacaagaagctgatgagcgacctgagaagaaagagaaccgcccacgagagagccaaggagctgtacagcagcggcgagttcagcagcggcagaaagtggggcgacgacgcccccaaggaggaggtggacaccggcgccgtgaacctgatcgagagcggcgcctgcggcgccttcgtgcacggcctggaggacgagatgtacgaggtgagaatcgccgccgtggaggccctgtgcatgctggcccagagcagccccagcttcgccgagaagtgcctggacttcctggtggacatgttcaacgacgagatcgaggaggtgagactgcagagcatccacaccatgagaaagatcagcaacaacatcaccctgagagaggaccagctggacaccgtgctggccgtgctggaggacagcagcagagacatcagagaggccctgcacgagctgctgtgctgcaccaacgtgagcaccaaggagggcatccacctggccctggtggagctgctgaagaacctgaccaagtaccccaccgacagagacagcatctggaagtgcctgaagttcctgggcagcagacaccccaccctggtgctgcccctggtgcccgagctgctgagcacccaccccttcttcgacaccgccgagcccgacatggacgaccccgcctacatcgccgtgctggtgctgatcttcaacgccgccaagacctgccccaccatgcccgccctgttcagcgaccacaccttcagacactacgcctacctgagagacagcctgagccacctggtgcccgccctgagactgcccggcagaaagctggtgagcagcgccgtgagccccagcatcatcccccaggaggaccccagccagcagttcctgcagcagagcctggagagagtgtacagcctgcagcacctggacccccagggcgcccaggagctgctggagttcaccatcagagacctgcagagactgggcgagctgcagagcgagctggccggcgtggccgacttcagcgccacctacctgagatgccagctgctgctgatcaaggccctgcaggagaagctgtggaacgtggccgcccccctgtacctgaagcagagcgacctggccagcgccgccgccaagcagatcatggaggagacctacaagatggagttcatgtacagcggcgtggagaacaagcaggtggtgatcatccaccacatgagactgcaggccaaggccctgcagctgatcgtgaccgccagaaccaccagaggcctggaccccctgttcggcatgtgcgagaagttcctgcaggaggtggacttcttccagagatacttcatcgccgacctgccccacctgcaggacagcttcgtggacaagctgctggacctgatgcccagactgatgaccagcaagcccgccgaggtggtgaagatcctgcagaccatgctgagacagagcgccttcctgcacctgcccctgcccgagcagatccacaaggccagcgccaccatcatcgagcccgccggcgagagcgacaaccccctgagattcaccagcggcctggtggtggccctggacgtggacgccaccctggagcacgtgcaggacccccagaacaccgtgaaggtgcaggtgctgtaccccgacggccaggcccagatgatccaccccaagcccgccgacttcagaaaccccggccccggcagacacagactgatcacccaggtgtacctgagccacaccgcctggaccgaggcctgccaggtggaggtgagactgctgctggcctacaacagcagcgccagaatccccaagtgcccctggatggagggcggcgagatgagcccccaggtggagaccagcatcgagggcaccatccccttcagcaagcccgtgaaggtgtacatcatgcccaagcccgccagaagatag

SEQ ID NO: 228902 - protein, 121 aa, Artificial Sequence
  derived and/or modified sequence
MAAARATTPADGEEPAPEAEALAAARERSSRFLSGLELVKQGAEARVFRGRFQGRAAVIKHRFPKGYRHPALEARLGRRRTVQEARALLRCRRAGKEYLPQLSFLWTMLPTAYIWKKLKAQ

SEQ ID NO: 228903 - protein, 253 aa, Artificial Sequence
  derived and/or modified sequence
MAAARATTPADGEEPAPEAEALAAARERSSRFLSGLELVKQGAEARVFRGRFQGRAAVIKHRFPKGYRHPALEARLGRRRTVQEARALLRCRRAGISAPVVFFVDYASNCLYMEEIEGSVTVRDYIQSTMETEKTPQGLSNLAKTIGQVLARMHDEDLIHGDLTTSNMLLKPPLEQLNIVLIDFGLSFISALPEDKGVDLYVLEKAFLSTHPNTETVFEAFLKSYSTSSKKARPVLKKLDEVRLRGRKRSMVG

SEQ ID NO: 228904 - DNA, 366 bp, Artificial Sequence
  derived and/or modified sequence
atggccgccgcccgggctacgacacccgccgacggagaggagccagccccagaggctgaagccctagctgcagctagagaaaggtcgagccgatttctatctggactcgagctagttaaacagggggccgaggctcgggtatttcgaggcaggtttcaaggaagagcagctgtcatcaagcaccgctttcctaaggggtatcgccaccccgccctggaagcccggctcggcagacgccgcacagtgcaggaagcgagggcgcttctcagatgtaggcgggccggaaaggagtatctgcctcagctcagcttcctttggacaatgctgccaacagcttatatctggaagaaactgaaggcccagtag

SEQ ID NO: 228905 - DNA, 762 bp, Artificial Sequence
  derived and/or modified sequence
atggccgccgccagagccaccacacctgcagatggagaagaacctgcacccgaggcagaggccctggccgcagcgagggagaggagttccaggttcctgtcaggactcgaactggtcaagcagggcgccgaggctagggttttccggggccgattccagggtagggcagcagtcataaagcatcgtttccctaaaggatataggcatccagcactggaggctcggctgggaaggagaagaaccgttcaagaagcaagggcattgctacgctgcaggcgggcaggcatcagtgcgccagttgtgttcttcgttgactacgccagcaactgcctatacatggaagaaatagagggtagtgtgaccgtgcgtgattatatccaaagcactatggagaccgagaagactccacaaggtctgtcaaacctggcgaaaaccatcggacaggttctggcccgcatgcatgatgaggatctcatacatggggacctgaccaccagcaatatgttactgaaaccccccttggagcagctgaatatcgttctcatcgatttcgggctatcattcattagcgctctccccgaggacaaaggtgtcgatctgtatgttctggagaaagcctttctgtccacgcacccaaacaccgaaacagtgttcgaggcttttctcaaaagctacagcaccagctcaaaaaaagcgagacctgtgttaaaaaagctcgatgaggtgcgacttcggggacggaaacgcagcatggtgggctag

SEQ ID NO: 228906 - DNA, 366 bp, Artificial Sequence
  derived and/or modified sequence
atggctgctgcccgggccaccaccccagcagatggagaggagcccgcccctgaggccgaggccctggccgccgcccgggagaggagcagccgcttcctgagcggcctggagctggtgaagcagggcgctgaggcccgggtcttccggggccgcttccagggccgggctgctgtgatcaagcaccgcttccccaagggctaccgccacccagccctggaggcccggctgggcagaagaagaacagtgcaggaggcccgggccctgctgcgctgccggcgggccggcaaggagtacctgccccagctgtccttcctgtggaccatgctgcccacagcctacatctggaagaagctgaaggcccagtag

SEQ ID NO: 228907 - DNA, 762 bp, Artificial Sequence
  derived and/or modified sequence
atggctgctgcccgggccaccaccccagcagatggagaggagcccgcccctgaggccgaggccctggccgccgcccgggagaggagcagccgcttcctgagcggcctggagctggtgaagcagggcgctgaggcccgggtcttccggggccgcttccagggccgggctgctgtgatcaagcaccgcttccccaagggctaccgccacccagccctggaggcccggctgggcagaagaagaacagtgcaggaggcccgggccctgctgcgctgccggcgggccggcatcagcgcccctgtggtgttctttgtggactatgccagcaactgcctgtacatggaggagattgagggctctgtgacagtgcgggactacatccagagcaccatggagacagagaagaccccccagggcctgagcaacctggccaagaccatcggccaggtgctggccaggatgcatgatgaggacctgatccacggggacctgaccaccagcaacatgctgctgaagccacccctggagcagctgaacatcgtgctgattgactttggcctgtccttcatcagcgccctgcctgaggacaagggcgtggacctgtatgtgctggagaaggccttcctgagcacccaccccaacacagagaccgtgtttgaggccttcctgaagagctacagcaccagcagcaagaaggcccggcctgtgctgaagaagctggatgaggtgcggctgcggggcaggaagaggtccatggtgggctag

SEQ ID NO: 228908 - DNA, 366 bp, Artificial Sequence
  derived and/or modified sequence
atggccgccgcccgggccaccacccccgccgacggcgaggagcccgctccagaggcggaggcccttgctgccgcacgggagcgctctagcagattcctatccggcttggagttagtaaagcagggagccgaagcacgggtgttcaggggtcggtttcaagggagggctgcagtcatcaagcatcgtttcccaaagggctacaggcaccctgcactcgaggcacgactgggcaggcgtcgcaccgtccaggaagccagagctctgcttcggtgtcgccgcgccgggaaagagtatttgccccagctcagttttctgtggaccatgctccctaccgcttatatctggaaaaaactgaaggcccagtag

SEQ ID NO: 228909 - DNA, 762 bp, Artificial Sequence
  derived and/or modified sequence
atggccgccgcccgggccaccacccccgccgacggcgaggagcccgccccagaggccgaagccctggccgcagcaagggagcgttcttcacgatttctgagcggcctggagctggtcaagcagggcgctgaggcgcgagtatttagggggagatttcaggggcgcgcggcggtaatcaagcatcggttccctaaaggctacaggcatcctgctctggaggcgagattgggtaggcggcgcacagtacaagaggccagggccctccttaggtgccgccgcgcgggaatttctgcacctgtagtcttctttgtggactacgcttcaaactgtttgtacatggaggaaattgagggctctgtcacagtacgggactatatccagtcaaccatggaaaccgagaaaacgcctcaggggctgagtaacctggctaagaccattggccaggtgctcgctcgaatgcatgacgaagacttgattcacggggacttgacaacctccaacatgctcctgaaaccacccctggagcagctcaacatagtactcatagacttcggcctgtcctttattagcgctctgcccgaagacaaaggggtggatctatacgtacttgagaaagcgtttttatctacacacccgaataccgagaccgtgtttgaggcgtttctcaaatcatattccacttcatccaaaaaagcaagaccagtgctcaaaaaactggatgaagtgaggcttagaggccgcaaaagatcaatggtgggttag

SEQ ID NO: 228910 - DNA, 2012 bp, Artificial Sequence
  derived and/or modified sequence
ggttggagctgttgcgccgagcagtcatggcggcggccagagctactacgccggccgatggcgaggagcccgccccggaggctgaggctctggccgcagcccgggagcggagcagccgcttcttgagcggcctggagctggtgaagcagggtgccgaggcgcgcgtgttccgtggccgcttccagggccgcgcggcggtgatcaagcaccgcttccccaagggctaccggcacccggcgctggaggcgcggcttggcagacggcggacggtgcaggaggcccgggcgctcctccgctgtcgccgcgctggtaaggaatatctgccccagttgtcttttttgtggactatgcttccaactgcttatatatggaagaaattgaaggctcagtgactgttcgagattatattcagtccactatggagactgaaaaaactccccagggtctctccaacttagccaagacaattgggcaggttttggctcgaatgcacgatgaagacctcattcatggtgatctcaccacctccaacatgctcctgaaaccccccctggaacagctgaacattgtgctcatagactttgggctgagtttcatttcagcacttccagaggataagggagtagacctctatgtcctggagaaggccttcctcagtacccatcccaacactgaaactgtgtttgaagcctttctgaagagctactccacctcctccaaaaaggccaggccagtgctaaaaaaattagatgaagtgcgcctgagaggaagaaagaggtccatggttgggtagaagaatgtgtatgacaaccacacacagtgaagctcttttttcaaagtaaatttgaagaaatgctacaagtatgagatgagatctaagtaaaggtgttaagatatttttaagtggtatgtgatcgtgtcattatcatctgcacttcactcaagagcttactatgtgtctaagtcatgttctaggcagaattgggtatttaaagtaaattgaggacaggcttctcccagattgtgacatgtatatctcagatacatgggtgtggcattgaaccacataatgagaacattattctctttttagtccttgtgagacaaggatgaagtctcagttgctgatactcgctgagcttactggccctctaacccagtgtttttttttgttgttgttgtgtacatgttatatttattttgaaaccagtttaatgggatacaaccagcattttaaaaaatgaaatagaatacagcatggaaaatatcagtgtattgttttatgaaactttcacgtgtatatatagaccaaggatatgtgctgagttttgatgtcaaatatatttctctttcagggtcatgatcaaaaaatgaaaagtctgcttaactccaatttctcttttaaaaaagcagacttacagctttcaggcaactgaaattcatgttaacatgtttttatttttattgctttgtatttttgtggttaccttctaagacaagtgattgatctaaagttccttttaagtttataccgctaaacaaactgagttgatttctatcacaggcagtaagtaggtagagcaaaaatggtgaagtgacttgtgaagactgaagtttgatgaagtctggtttaaggcacaggtaaactgagtgtggatgcaaaagtaccaggagctagcttttaaccttgcccagcctcagtttcttttcttagaagaagctatgtttgggtgggaagggaagagagggataagaaaatacctttcttccttgtaaactccaatcaacaaacatattttgagtgccttttgtgttccttggcaccctgttgggtattgggtacttggcaccctgttgggtattgggtacaatggtgagccagacagacacagcgcctgtccttttgtaagaatatttatttttataaaaaagtataaagtatacagtgggatgttttgatatacattatgaaatgattgctacagctgagctaattaacacccatcacctca

SEQ ID NO: 228911 - DNA, 3515 bp, Artificial Sequence
  derived and/or modified sequence
gaaagagacgaccaactgagaggtgggcccccaaagccggctgcgagagtcaccgaagatttccggagagccaaggagtcgggaagagccacttactgagcgttgccgaacgtgtacggagatagccgaagaggcggaaggcggggccacaagagcccttcctgcagggaacctcaggcttcagagagccgaaaagttgggaggcgtaaccacttacaggccggaagtgtccggggtggacgcattcgggtagccgaagaagtcccaggattgccgaagaagtcccaggatttccgaagcgagccgaagcatcgcgacagttttcagagacagctgatcggttggagctgttgcgccgagcagtcatggcggcggccagagctactacgccggccgatggcgaggagcccgccccggaggctgaggctctggccgcagcccgggagcggagcagccgcttcttgagcggcctggagctggtgaagcagggtgccgaggcgcgcgtgttccgtggccgcttccagggccgcgcggcggtgatcaagcaccgcttccccaagggctaccggcacccggcgctggaggcgcggcttggcagacggcggacggtgcaggaggcccgggcgctcctccgctgtcgccgcgctggaatatctgccccagttgtcttttttgtggactatgcttccaactgcttatatatggaagaaattgaaggctcagtgactgttcgagattatattcagtccactatggagactgaaaaaactccccagggtctctccaacttagccaagacaattgggcaggttttggctcgaatgcacgatgaagacctcattcatggtgatctcaccacctccaacatgctcctgaaaccccccctggaacagctgaacattgtgctcatagactttgggctgagtttcatttcagcacttccagaggataagggagtagacctctatgtcctggagaaggccttcctcagtacccatcccaacactgaaactgtgtttgaagcctttctgaagagctactccacctcctccaaaaaggccaggccagtgctaaaaaaattagatgaagtgcgcctgagaggaagaaagaggtccatggttgggtagaagaatgtgtatgacaaccacacacagtgaagctcttttttcaaagtaaatttgaagaaatgctacaagtatgagatgagatctaagtaaaggtgttaagatatttttaagtggtatgtgatcgtgtcattatcatctgcacttcactcaagagcttactatgtgtctaagtcatgttctaggcagaattgggtatttaaagtaaattgaggacaggcttctcccagattgtgacatgtatatctcagatacatgggtgtggcattgaaccacataatgagaacattattctctttttagtccttgtgagacaaggatgaagtctcagttgctgatactcgctgagcttactggccctctaacccagtgtttttttttgttgttgttgtgtacatgttatatttattttgaaaccagtttaatgggatacaaccagcattttaaaaaatgaaatagaatacagcatggaaaatatcagtgtattgttttatgaaactttcacgtgtatatatagaccaaggatatgtgctgagttttgatgtcaaatatatttctctttcagggtcatgatcaaaaaatgaaaagtctgcttaactccaatttctcttttaaaaaagcagacttacagctttcaggcaactgaaattcatgttaacatgtttttatttttattgctttgtatttttgtggttaccttctaagacaagtgattgatctaaagttccttttaagtttataccgctaaacaaactgagttgatttctatcacaggcagtaagtaggtagagcaaaaatggtgaagtgacttgtgaagactgaagtttgatgaagtctggtttaaggcacaggtaaactgagtgtggatgcaaaagtaccaggagctagcttttaaccttgcccagcctcagtttcttttcttagaagaagctatgtttgggtgggaagggaagagagggataagaaaatacctttcttccttgtaaactccaatcaacaaacatattttgagtgccttttgtgttccttggcaccctgttgggtattgggtacttggcaccctgttgggtattgggtacaatggtgagccagacagacacagcgcctgtccttttgtaagaatatttatttttataaaaaagtataaagtatacagtgggatgttttgatatacattatgaaatgattgctacagctgagctaattaacacccatcacctcacatagttactgtcttgtttcttaatatggacatttgcagctatgaatttccctctgcacactgttgtcatcacacactctcagttttggtattttgtgtttttgttttcattcatctcaaagtattttctaatttcccttgtgatttcttctttgaccccttgattgtttagaaatctgttaatttccacacatttgtaaatgttccaatttttcttttgttattgccagcttcattccattgtgttcagagatgatacagtcagtgcctgttcttatgaagcaaacattctataatagtaggaccagtaccctgtctgtttcattcaccacagtcagcatgccccaagtgcccagcatggggcggatggccaggaatgagtgaaaacttcccttcctgggtagttgtgactagtagagaggaaaaataatataattgcctgcttactgcatgccaggcattgggctgggaatttttatattggatctaaaataactcttaagttaggcattatccccattttatagatggagaaactggccccaaaaggtgggaacttgtccaagacgtcacaggtagcaagaggtacttttacctggctccaaatctgtgttctttccactgacaaatgagatatgggatatggtgcatctttacagtactataataagtattggcgtataacattattttcaaggaactccaagggccacaggagctgacaggtttttcaattaatattcccaacatgaatgagatgcctcattcctcagtttcctcacgtgtactataaggctagtacctgctttgttggggtatggttggctcgtgtgcattaagtcaacaaatccctagttgatagggtttggctgtgtccccatccaaatctcatcttgaattgttcccgtaatccccacgtgacatgggagggacccagtgggaggtaatttaatcctcggggcggctacctccgtgctgttctcgtgatagcgagtgagttctcacgagatctgatggttttataaggggcttttccctcttgttcggcacttcctgctgccacgtggagaagggtgtgtttgtttccccatctgccatgattataagttttctgaggcatccccagccatgctgaactgtgagttattaaacttttcctttataaatta

SEQ ID NO: 228912 - DNA, 366 bp, Artificial Sequence
  derived and/or modified sequence
atggccgctgccagagccacaaccccggctgatggggaggagcctgcacctgaagcagaggcgctcgccgctgcacgagaaaggtccagccgatttttatccggcttggagctggtcaaacagggggcagaagcacgcgtgttccgtgggcgattccaggggagagctgcggtaattaaacaccggtttcctaaaggatatcgacaccccgctcttgaggctcggctgggaaggagacgtacagtccaggaagctcgcgcactactgcggtgccggagggcaggcaaggagtaccttcctcagttatctttcttatggacgatgttacctactgcctacatttggaaaaaactgaaggctcagtag

SEQ ID NO: 228913 - DNA, 762 bp, Artificial Sequence
  derived and/or modified sequence
atggctgccgctcgggcaactaccccagccgacggggaggaaccagcgcctgaggctgaagctctcgctgccgcacgagagcgcagctcacgctttctgtctggcctagagcttgttaagcagggagcagaggctagagttttcaggggcaggttccaggggagagccgctgtcataaagcatcgatttccaaaggggtacagacatcccgctcttgaagctcgcctgggtagacgcagaacggtccaagaagccagagctctactgaggtgccggagggccggtatttccgcgcctgttgtcttctttgttgattacgcatcgaattgcctgtatatggaggagattgagggctctgtcactgtgcgtgattatattcaaagtactatggagactgagaagacaccccaaggactgtccaacctagcgaagaccatcggccaagtgttagcaaggatgcatgatgaggatctgatccatggcgacttaacgacgtctaacatgttgctcaaacctcctctggagcagctcaatattgtgctgattgacttcggtttaagctttatctctgcactcccggaggataagggtgttgatctgtacgtacttgaaaaagccttcctgtcaacgcatcctaacacagaaaccgtttttgaggcttttttaaagagctactccacatctagtaaaaaagcgcgtcccgtgcttaagaaattagacgaagtgcggctgcggggtaggaagcgctcaatggtgggctag

SEQ ID NO: 228914 - DNA, 366 bp, Artificial Sequence
  derived and/or modified sequence
atggccgccgccagagccaccacccccgccgacggcgaggagcccgcccccgaggccgaggccctggccgccgccagagagagaagcagcagattcctgagcggcctggagctggtgaagcagggcgccgaggccagagtgttcagaggcagattccagggcagagccgccgtgatcaagcacagattccccaagggctacagacaccccgccctggaggccagactgggcagaagaagaaccgtgcaggaggccagagccctgctgagatgcagaagagccggcaaggagtacctgccccagctgagcttcctgtggaccatgctgcccaccgcctacatctggaagaagctgaaggcccagtag

SEQ ID NO: 228915 - DNA, 762 bp, Artificial Sequence
  derived and/or modified sequence
atggccgccgccagagccaccacccccgccgacggcgaggagcccgcccccgaggccgaggccctggccgccgccagagagagaagcagcagattcctgagcggcctggagctggtgaagcagggcgccgaggccagagtgttcagaggcagattccagggcagagccgccgtgatcaagcacagattccccaagggctacagacaccccgccctggaggccagactgggcagaagaagaaccgtgcaggaggccagagccctgctgagatgcagaagagccggcatcagcgcccccgtggtgttcttcgtggactacgccagcaactgcctgtacatggaggagatcgagggcagcgtgaccgtgagagactacatccagagcaccatggagaccgagaagaccccccagggcctgagcaacctggccaagaccatcggccaggtgctggccagaatgcacgacgaggacctgatccacggcgacctgaccaccagcaacatgctgctgaagccccccctggagcagctgaacatcgtgctgatcgacttcggcctgagcttcatcagcgccctgcccgaggacaagggcgtggacctgtacgtgctggagaaggccttcctgagcacccaccccaacaccgagaccgtgttcgaggccttcctgaagagctacagcaccagcagcaagaaggccagacccgtgctgaagaagctggacgaggtgagactgagaggcagaaagagaagcatggtgggctag

SEQ ID NO: 228916 - protein, 314 aa, Artificial Sequence
  derived and/or modified sequence
MGSQALPPGPMQTLIFFDMEATGLPFSQPKVTELCLLAVHRCALESPPTSQGPPPTVPPPPRVVDKLSLCVAPGKACSPAASEITGLSTAVLAAHGRQCFDDNLANLLLAFLRRQPQPWCLVAHNGDRYDFPLLQAELAMLGLTSALDGAFCVDSITALKALERASSPSEHGPRKSYSLGSIYTRLYGQSPPDSHTAEGDVLALLSICQWRPQALLRWVDAHARPFGTIRPMYGVTASARTKPRPSAVTTTAHLATTRNTSPSLGESRGTKDLPPVKDPGALSREGLLAPLGLLAILTLAVATLYGLSLATPGE

SEQ ID NO: 228917 - DNA, 945 bp, Artificial Sequence
  derived and/or modified sequence
atgggcagccaggccctgccccccggccccatgcagaccctgatcttcttcgacatggaggccaccggcctgcccttcagccagcccaaggtgaccgagctgtgcctgctggccgtgcacagatgcgccctggagagcccccccaccagccagggccccccccccaccgtgccccccccccccagagtggtggacaagctgagcctgtgcgtggcccccggcaaggcctgcagccccgccgccagcgagatcaccggcctgagcaccgccgtgctggccgcccacggcagacagtgcttcgacgacaacctggccaacctgctgctggccttcctgagaagacagccccagccctggtgcctggtggcccacaacggcgacagatacgacttccccctgctgcaggccgagctggccatgctgggcctgaccagcgccctggacggcgccttctgcgtggacagcatcaccgccctgaaggccctggagagagccagcagccccagcgagcacggccccagaaagagctacagcctgggcagcatctacaccagactgtacggccagagcccccccgacagccacaccgccgagggcgacgtgctggccctgctgagcatctgccagtggagaccccaggccctgctgagatgggtggacgcccacgccagacccttcggcaccatcagacccatgtacggcgtgaccgccagcgccagaaccaagcccagacccagcgccgtgaccaccaccgcccacctggccaccaccagaaacaccagccccagcctgggcgagagcagaggcaccaaggacctgccccccgtgaaggaccccggcgccctgagcagagagggcctgctggcccccctgggcctgctggccatcctgaccctggccgtggccaccctgtacggcctgagcctggccacccccggcgagtag

SEQ ID NO: 228918 - DNA, 945 bp, Artificial Sequence
  derived and/or modified sequence
atgggctcccaagccctgccccctggaccgatgcaaacgctcattttttttgacatggaagctacaggcctgcccttctcacaaccaaaggtgacagaactgtgcctgctggcagtccacaggtgcgcactcgaatctcctcccacgagccaagggcctcctcctaccgtgccaccaccacccagagtggtggacaaactgtccctgtgtgtagctccggggaaggcctgttctccagcagctagtgagatcacaggcctgtcgacagcagttttggccgcccatggtaggcagtgttttgacgacaacctagcaaatctgctgttagctttcctcagacgccaaccacagccctggtgcttagtggctcacaacggcgacagatatgattttccactgctgcaggctgagctcgctatgctcggcctgacgtctgccctcgacggcgctttctgcgtggacagcatcactgcccttaaagcgttagagcgcgcctcaagccctagcgaacacgggccccgaaagagttactcgttaggatccatctacacacggttgtatggccagagccctcccgactctcacacggcagagggtgatgtgctggcccttctgtcaatctgtcagtggcgcccacaagctctgctcagatgggttgatgcccatgccagacctttcgggaccattcggcccatgtacggagtgaccgccagcgcaaggaccaagccccgcccttccgccgtgaccacaacagcccatctggcaactaccaggaatacgtccccatcactgggcgagtctcgtggcactaaggacctacccccagtgaaggaccccggtgccctcagcagggagggcttgttagctcctctgggcctgctggctatcctaacactggccgtggcgactctgtacggactaagcctggcaacccccggcgagtag

SEQ ID NO: 228919 - DNA, 945 bp, Artificial Sequence
  derived and/or modified sequence
atgggctctcaggccctcccgcccggtcctatgcaaacccttatcttttttgacatggaagcgacaggcctgccatttagtcagcccaaggtgactgagctctgtttattggccgtacatcgctgcgcactggagtctcccccgacctcacaaggcccgcctcccactgtgcccccgcctccccgggttgtggataagctgtctttatgtgtcgctcccggaaaggcttgtagcccagctgccagcgagatcaccggcttatccaccgccgtcctcgccgctcatggtcgccagtgcttcgacgataatctggccaacttgttactcgctttcctgcgtcggcagccacaaccttggtgtctggtggcccacaatggtgacaggtatgacttcccgctgctgcaggcagagctagccatgctgggactgacaagcgctctggacggggccttttgtgtcgacagtatcactgcattgaaggcccttgaacgtgccagttctccaagtgaacatggccccaggaaatcgtacagccttggatctatttacactcgcctatacggacagtctccacccgatagccacaccgccgagggtgacgtgttagccctgctgagtatttgtcaatggcggccgcaggcactcctcaggtgggtggacgcccatgccagacccttcggaaccatacgccctatgtatggtgtaaccgcctctgctcggacaaagccgcgcccaagtgcagttactacgacagcccatctcgccaccacgaggaacacgtcgccatcccttggagaatctcgaggcacaaaggacttgcctccggtgaaagaccccggggcactctcaagagaaggactgctcgctcccctaggccttttagccattctgacccttgccgtggcaaccctatatgggctgtctttagcgacaccgggcgagtag

SEQ ID NO: 228920 - DNA, 945 bp, Artificial Sequence
  derived and/or modified sequence
atgggcagccaggccctgcccccaggccccatgcagaccctcatcttctttgacatggaggccaccggcctgcccttcagccagcccaaggtgacagagctgtgcctgctggccgtgcaccgctgtgccctggagagcccccccaccagccagggccccccacccaccgtgcccccaccaccccgggtggtggacaagctgagcctgtgtgtggcccctgggaaggcctgcagccctgctgccagcgagatcaccggcctgagcacagctgtgctggccgcccacggccggcagtgctttgatgacaacctggccaacctgctgctggccttcctgcggcggcagccccagccctggtgcctggtggcccacaatggagacagatatgacttccccctgctgcaggccgagctggccatgctgggcctgaccagcgccctggatggagccttctgtgtggacagcatcacagccctgaaggccctggagcgggccagcagccccagcgagcacggccccaggaagagctacagcctgggcagcatctacacccggctgtatggccagagccccccagacagccacacagcagaaggagatgtgctggccctgctgagcatctgccagtggaggccccaggccctgctgcgctgggtggatgcccacgcccggcccttcggcaccatccggcccatgtatggagtgacagccagcgcccggaccaagccccggcccagcgctgtgaccaccacagcccacctggccaccaccaggaacaccagccccagcctgggggagagccggggcaccaaggacctgccccctgtgaaggaccccggggccctgagccgggagggcctgctggcccccctgggcctgctggccatcctgaccctggccgtggccaccctgtatggcctgagcctggccaccccaggagagtag

SEQ ID NO: 228921 - DNA, 945 bp, Artificial Sequence
  derived and/or modified sequence
atgggcagccaggccctgccccccggccccatgcagaccctgatcttcttcgatatggaggccacgggcctgccattttctcaacccaaagtcactgagttgtgtcttttagccgtgcatcgatgtgctttagagtccccgccaacatcacagggcccacctccaacagtccccccccctcccagggtggtggataaattatcactctgcgtggcccccggtaaggcatgctctcccgccgcctccgaaatcacaggactgagcaccgctgtgctcgctgcccatggccggcagtgttttgacgataacctggctaacctcctgcttgcctttcttaggcgccaacctcagccttggtgcctggtggcgcataatggagatcgctacgactttccgctcctgcaggccgagctcgcgatgcttggacttacgtcggctctggatggagccttttgcgttgactctattactgccctgaaggctctggaacgagcttcttccccctccgaacatggaccccgcaagtcatattcacttgggtcaatctatactagactgtatggccagtctccccccgattcccacacagcggagggagatgtgctggcgttgctgtccatctgtcagtggcgaccacaggctctcctacggtgggtggatgcccatgctagacctttcggcacaatcagaccaatgtatggcgtgaccgcctctgcccgaactaaacctcgacccagcgctgttacaacaaccgcccacctggcaacaacacggaatacttctccctcattaggcgagtcaagagggaccaaagacctgccacccgtgaaagacccgggcgctctatctcgggagggactactggctccactgggtctgctggctatcctcaccctggctgtcgctaccctgtatggactatctcttgctactcctggagaatag

SEQ ID NO: 228922 - DNA, 945 bp, Artificial Sequence
  derived and/or modified sequence
atgggcagccaggccctgccccccggccccatgcagaccctgatctttttcgacatggaggccaccgggttaccattcagccaacctaaagtcaccgagctttgtttgctggcagtgcatagatgcgccttggagtcccccccaacaagtcaagggccccctccaactgttcctccgccccctagagtagtagacaaactcagcctttgcgtggcacctggaaaagcctgctcgccggctgcaagcgaaataacggggctgagcacagcagtgctcgcggctcatgggcgacaatgtttcgatgacaacctcgcaaatttactgctggctttcctacgcaggcagcctcagccatggtgccttgttgcccacaatggtgacaggtatgacttcccactattgcaggccgagttggcaatgttggggttaaccagtgcattagacggggctttctgcgtcgattcaattacagccctgaaggctttagaaagagccagctcacccagcgagcatggcccaagaaagtcgtacagcttgggaagtatctacactcgcctgtacggccagtcccctcccgacagccatacagctgaaggagacgtgctggcgctactctctatctgccaatggcggccacaagcgctcttgagatgggtggatgcacacgccaggcccttcggcaccatccgccctatgtatggtgtgacagctagcgcccggaccaaaccccgcccatcagcagtaactactacagcccacctggccacaacccgaaatacaagcccctctttaggcgagtcccgcggtaccaaagatctacccccggttaaggatcctggtgctttgtctcgcgaagggcttctagccccattaggactactggctatccttaccttggctgtggccaccctgtacgggctctctcttgcaactccaggagagtag

SEQ ID NO: 228923 - DNA, 945 bp, Artificial Sequence
  derived and/or modified sequence
atgggatcccaggcactgcctcccggtccaatgcagacgctgatcttctttgacatggaggcaaccggactcccattcagccagcccaaagtgaccgaattatgtcttctggccgtgcatcgatgtgccctggagagcccgccaacttcccagggaccgcctcccacagtacccccaccacctcgcgtggtagacaaactgagtctttgcgtagctcccggtaaggcctgctctccagcggcttcagagatcactgggctttccaccgccgtgctcgccgcacatggcaggcagtgtttcgatgataaccttgctaatctgttgttggctttcctgagacgtcagccacagccgtggtgccttgtggctcacaatggcgataggtacgattttcctctgctgcaagcagagctagccatgctcggcctcaccagcgctctcgatggcgcattctgcgtggacagtatcactgcccttaaggcccttgaacgtgccagttcgcccagtgaacacggccctcgcaagtcctactctttaggttccatatatacacgcctttacggtcaatctccgccagacagtcacaccgccgagggagacgtgctcgcactactctccatttgccagtggcgccctcaggctttgttacgatgggtggatgcccacgccaggcctttcggaactatccgaccaatgtatggtgtgacagcaagtgccaggaccaaaccaaggccaagcgcggtcacgaccaccgcccacttagctaccactcgcaacacatcccccagccttggtgaatcaagaggtacaaaggatctgcccccagtgaaggaccctggagctctctctagggaagggctgctggcacctctggggctcctcgcgatcctgacccttgcagtggccaccctgtatgggttatcattggctacacctggcgaatag

SEQ ID NO: 228924 - DNA, 945 bp, Artificial Sequence
  derived and/or modified sequence
atgggttctcaagcattgccacccggacctatgcagaccctaatatttttcgatatggaggccacaggattgccgttctcacagcccaaggtaacagagctctgcctccttgccgtacacagatgtgccctggaaagcccgcctacaagccaaggaccaccccctaccgtgcctccccctcctagggttgttgataagttatccctctgtgtagcccctggcaaagcctgttcacccgcagcaagtgagataactgggttaagtacagctgtgttggccgctcacggcaggcaatgttttgacgacaacctggctaatctgctgcttgccttcctgcgaagacagccacaaccatggtgtctggtagctcataacggcgatcggtacgattttccgctgctccaggctgagttagcaatgcttggtctgaccagtgccctcgatggcgcattttgcgttgacagtatcaccgccttaaaggcgctcgagcgggcatccagtccatctgaacatggacccagaaaatcctactcgttgggcagtatttacacacgtctgtacggacagtccccacccgactcccacactgccgagggagatgtgctggcgctgctgtctatttgtcagtggaggcctcaggctttgctccgatgggtcgatgcccatgcacgcccttttgggacaataaggccgatgtatggtgtgactgcatcggctaggaccaagcctagaccgtcggcggtcaccacgacagcgcacctggcaaccacccgaaacacctccccctctttgggggagtctcggggtacaaaggacctcccgccagtgaaggatccaggcgctctaagcagagagggtctgctggcgcctctgggcctgctggccatcctaacgctggcggttgctacactgtatggcctgtcactcgccaccccaggtgagtag

SEQ ID NO: 228925 - DNA, 1200 bp, Artificial Sequence
  derived and/or modified sequence
tgaaagggccgcagcaggggctcccagcagtgtgtaagaccgggagctggtctggcaccactgccctggtccttccagctgcctgtcactggtatgatggccccggtgcattgtgccaccagcaggccacagctgtggatcttggaaggcctctggggtcccccgggagcaggggagtgggtgtgggggggaacggatggtggtgagagggacagaccaggcaggccctgcccccggggcccatgcagaccctcatctttttcgacatggaggccactggcttgcccttctcccagcccaaggtcacggagctgtgcctgctggctgtccacagatgtgccctggagagcccccccacctctcaggggccacctcccacagttcctccaccaccgcgtgtggtagacaagctctccctgtgtgtggctccggggaaggcctgcagccctgcagccagcgagatcacaggtctgagcacagctgtgctggcagcgcatgggcgtcaatgttttgatgacaacctggccaacctgctcctagccttcctgcggcgccagccacagccctggtgcctggtggcacacaatggtgaccgctacgacttccccctgctccaagcagagctggctatgctgggcctcaccagtgctctggatggtgccttctgtgtggatagcatcactgcgctgaaggccctggagcgagcaagcagcccctcagaacacggcccaaggaagagctacagcctaggcagcatctacactcgcctgtatgggcagtcccctccagactcgcacacggctgagggtgatgtcctggccctgctcagcatctgtcagtggagaccacaggccctgctgcggtgggtggatgctcacgccaggcctttcggcaccatcaggcccatgtatggggtcacagcctctgctaggaccaagccaagaccatctgctgtcacaaccactgcacacctggccacaaccaggaacactagtcccagccttggagagagcaggggtaccaaggatcttcctccagtgaaggaccctggagccctatccagggaggggctgctggccccactgggtctgctggccatcctgaccttggcagtagccacactgtatggactatccctggccacacctggggagtaggccaagaaggaaaatctgacgaataaagacccccgctgcccca

SEQ ID NO: 228926 - protein, 605 aa, Artificial Sequence
  derived and/or modified sequence
MDPAEAVLQEKALKFMCSMPRSLWLGCSSLADSMPSLRCLYNPGTGALTAFQNSSEREDCNNGEPPRKIIPEKNSLRQTYNSCARLCLNQETVCLASTAMKTENCVAKTKLANGTSSMIVPKQRKLSASYEKEKELCVKYFEQWSESDQVEFVEHLISQMCHYQHGHINSYLKPMLQRDFITALPARGLDHIAENILSYLDAKSLCAAELVCKEWYRVTSDGMLWKKLIERMVRTDSLWRGLAERRGWGQYLFKNKPPDGNAPPNSFYRALYPKIIQDIETIESNWRCGRHSLQRIHCRSETSKGVYCLQYDDQKIVSGLRDNTIKIWDKNTLECKRILTGHTGSVLCLQYDERVIITGSSDSTVRVWDVNTGEMLNTLIHHCEAVLHLRFNNGMMVTCSKDRSIAVWDMASPTDITLRRVLVGHRAAVNVVDFDDKYIVSASGDRTIKVWNTSTCEFVRTLNGHKRGIACLQYRDRLVVSGSSDNTIRLWDIECGACLRVLEGHEELVRCIRFDNKRIVSGAYDGKIKVWDLVAALDPRAPAGTLCLRTLVEHSGRVFRLQFDEFQIVSSSHDDTILIWDFLNDPAAQAEPPRSPSRTYTYISR

SEQ ID NO: 228927 - DNA, 576 bp, Artificial Sequence
  derived and/or modified sequence
atgccgcgttcactgtggctgggctgcagttccctcgccgacagtatgccgtccttacgctgcctttacaaccccggcactggcgctctgaccgctttccagaattcctccgagagggaggattgcaataatggggaaccaccaagaaagattatacccgaaaaaaattcactcagacagacctataacagttgtgcacggttgtgcttgaaccaggaaactgtttgcctggcgtccacggccatgaaaacagagaattgcgtcgccaaaaccaagctggctaacggcacatctagtatgatcgtaccaaaacaaaggaagctgtcagcctcctacgagaaggagaaagagctgtgcgttaaatattttgagcagtggtcagaatccgaccaggttgaatttgtggagcatctgatctcacaaatgtgccattaccagcatgggcatattaactcatatctgaaaccgatgctgcagagagacttcattacagcactccctgcccgtggactagatcatattgcagagaatatcctctcctatctggatgcaaaatcgctctgcgcagcggagtag

SEQ ID NO: 228928 - DNA, 1818 bp, Artificial Sequence
  derived and/or modified sequence
atggaccctgccgaagccgtcctgcaggagaaggcccttaagtttatgtgctccatgcctcgctccctgtggctggggtgcagctccttggcagatagtatgccatcactacgctgtctctacaacccgggaactggcgccctcactgcatttcaaaacagctcagagagagaagattgtaacaacggcgaaccccccaggaagattatcccagagaagaactccctgcgacaaacttataactcctgtgcccgactatgtttgaaccaggagacagtgtgtctggcaagcacagccatgaaaacggagaactgtgttgccaagaccaaactggctaacggcacctcaagcatgatcgtgcccaagcaacgcaaactgagcgcgtcctatgagaaggaaaaggaactgtgcgtaaagtacttcgaacaatggtccgagtccgaccaggtggagtttgttgagcacctgatcagccagatgtgtcattaccagcatggacatattaatagttatctcaaacctatgctccagcgcgattttatcactgcgctgccagccaggggcctggaccacattgccgagaatatcctgtcttatctggacgccaaatcactgtgtgctgccgaacttgtgtgcaaagagtggtaccgagttacttccgacggcatgttgtggaaaaagttgattgagaggatggtacggaccgactcattgtggcggggactggcagaaagaagagggtggggacagtatctgtttaagaataagcctccagacggcaatgccccacctaactccttctatagagccttataccctaagattattcaggacatagaaactatcgagtcgaactggcgatgtggccgccattcactgcaacgaatacattgtcggtccgaaacatctaagggtgtgtattgtttgcaatacgatgatcagaagattgtatctgggctgcgcgataatacaatcaagatctgggataaaaacactctggaatgtaaaaggattctgactgggcatactggcagcgttctgtgtttacagtacgatgagcgtgtgatcattacgggctccagtgactctacggtgagggtgtgggatgttaatacgggagagatgctcaacactctgatccaccattgcgaggcggtcttgcatctgagatttaacaatggtatgatggtgacatgtagtaaggaccggtccatcgcagtgtgggatatggcatcccctactgacataaccctccgtagagtgctcgtaggtcaccgcgctgctgtgaatgtcgtagacttcgatgataagtacattgtttccgcaagcggagatagaaccattaaggtgtggaacacttctacctgcgaattcgtcagaactctcaacggccacaaacgggggatcgcttgcctccagtatagggatcgtctcgtcgtgtcggggtcctccgataacactataaggctctgggacattgagtgcggtgcgtgcctacgtgtgctcgaaggtcatgaggagctggtgcgatgcatccgtttcgacaacaagaggattgtcagcggggcctacgatggcaaaataaaagtgtgggatctagtggcagcactggaccctagggccccagccggcacactctgccttagaacccttgtggaacattctggacgcgtgtttcggctgcagtttgacgagttccagattgtgtcctcatcacatgatgacacgattctgatctgggactttttaaatgaccccgcagcacaggccgagccgccaaggtcaccaagcaggacttacacatacatcagtcggtag

SEQ ID NO: 228929 - DNA, 576 bp, Artificial Sequence
  derived and/or modified sequence
atgcccaggagcctgtggctgggctgcagcagcctggccgacagcatgcccagcctgcgctgcctgtacaaccctggcactggagccctgacagccttccagaacagcagcgagcgggaggactgcaacaacggggagccccccaggaagatcatccctgagaagaacagcctgcggcagacctacaacagctgtgcccggctgtgcctgaaccaggagaccgtgtgcctggccagcacagccatgaagacagagaactgtgtggccaagaccaagctggccaacggcaccagctccatgattgtgcccaagcagaggaagctgagcgccagctatgagaaggagaaggagctgtgtgtgaagtactttgagcagtggagcgagagtgaccaggtggagtttgtggagcacctgatcagccagatgtgccactaccagcacggccacatcaacagctacctgaagcccatgctgcagagggacttcatcacagccctgcctgcccggggcctggaccacatcgccgagaacatcctgagctacctggatgccaagagcctgtgtgccgctgagtag

SEQ ID NO: 228930 - DNA, 1818 bp, Artificial Sequence
  derived and/or modified sequence
atggaccctgctgaggccgtgctgcaggagaaggccctgaagttcatgtgcagcatgcccaggagcctgtggctgggctgcagcagcctggccgacagcatgcccagcctgcgctgcctgtacaaccctggcactggagccctgacagccttccagaacagcagcgagcgggaggactgcaacaacggggagccccccaggaagatcatccctgagaagaacagcctgcggcagacctacaacagctgtgcccggctgtgcctgaaccaggagaccgtgtgcctggccagcacagccatgaagacagagaactgtgtggccaagaccaagctggccaacggcaccagctccatgattgtgcccaagcagaggaagctgagcgccagctatgagaaggagaaggagctgtgtgtgaagtactttgagcagtggagcgagagtgaccaggtggagtttgtggagcacctgatcagccagatgtgccactaccagcacggccacatcaacagctacctgaagcccatgctgcagagggacttcatcacagccctgcctgcccggggcctggaccacatcgccgagaacatcctgagctacctggatgccaagagcctgtgtgccgctgagctggtgtgcaaggagtggtacagagtgaccagtgatggcatgctgtggaagaagctgattgaaagaatggtgaggacagacagcctgtggaggggcctggccgagcggcggggctggggccagtacctgttcaagaacaagcccccagatggaaatgccccacccaacagcttctaccgggccctgtaccccaagatcatccaggacatcgagaccatcgagagcaactggaggtgtggccgccacagcctgcagaggatccactgccgctctgagaccagcaagggcgtgtactgcctgcagtatgatgaccagaagatcgtgtctggcctgcgggacaacaccatcaagatctgggacaagaacaccctggagtgcaagaggatcctgaccggccacactggatctgtgctgtgcctgcagtatgatgagagggtcatcatcaccggcagcagtgacagcacagtgcgggtgtgggatgtgaacacaggagagatgctgaacaccctcatccaccactgtgaggccgtgctgcacctgcgcttcaacaacggcatgatggtgacctgcagcaaggacaggagcattgctgtgtgggacatggccagccccacagacatcaccctgcggcgggtgctggtgggccacagagctgctgtgaatgtggtggactttgatgacaagtacatcgtgtctgccagcggggacaggaccatcaaggtgtggaacaccagcacctgtgaatttgtgaggaccctgaatggccacaagaggggcatcgcctgcctgcagtacagagaccggctggtggtgtctggcagcagtgacaacaccatccggctgtgggacattgaatgtggggcctgcctgcgggtgctggagggccacgaggagctggtgcgctgcatccgctttgacaacaagagaattgtgtctggggcctatgatggcaagatcaaggtgtgggacctggtggccgccctggacccccgggccccagctggcaccctgtgcctgcggaccctggtggagcacagcggccgggtcttccggctgcagtttgatgagttccagatcgtgagcagcagccatgatgacaccatcctgatctgggacttcctgaatgaccctgctgcccaggccgagccccccaggagccccagcaggacctacacctacatcagcaggtag

SEQ ID NO: 228931 - DNA, 576 bp, Artificial Sequence
  derived and/or modified sequence
atgccccggagcctgtggctgggctgcagcagcctggccgacagcatgcctagccttaggtgcctgtacaaccctgggacgggggccctgactgcgttccagaactcttctgaaagggaggattgcaataacggcgagccccctcgaaagatcatcccagagaagaacagcctcagacagacatacaacagttgtgctaggctctgtttaaatcaggaaacggtctgtttggcgtcgactgctatgaaaaccgaaaattgtgtcgctaaaaccaaactcgcaaacggaacaagctctatgattgtccccaaacagcgtaagctctcagcctcttacgagaaggaaaaagagctttgcgtgaagtatttcgagcagtggtctgagtccgatcaggtcgagtttgtggagcacctgatttcacagatgtgtcactaccagcacgggcatatcaactcatacctcaagcctatgcttcagcgcgattttattacagctctgcccgcacgaggactggatcacattgcagaaaacatcctgtcctatctcgatgcaaaatccttgtgcgccgccgagtag

SEQ ID NO: 228932 - DNA, 1818 bp, Artificial Sequence
  derived and/or modified sequence
atggaccccgccgaggccgtgctgcaggagaaggccctgaagttcatgtgcagcatgccaaggtcattgtggctcggctgcagctcactcgctgacagtatgccgagcttgcgctgcttgtataaccctggcaccggagctctgacagctttccagaactcaagtgagcgcgaggattgcaacaatggcgaaccccctcggaaaatcattcccgaaaagaacagtctgaggcagacctacaacagctgtgccagactgtgtctcaatcaggagacggtttgtctcgcatccacagcgatgaagaccgagaattgcgttgccaagaccaagcttgccaacggcaccagttccatgatcgtcccaaaacagcgcaagttaagtgcttcatatgaaaaggaaaaagaactgtgcgttaagtatttcgaacaatggagtgagagtgatcaggtcgagtttgtcgagcatctgatcagccaaatgtgccactatcagcacgggcatatcaatagttacctgaagccgatgctgcagcgggatttcatcaccgctctgcccgctagaggcctggaccacatcgcagaaaatatcctttcctatctagacgcaaaaagtctgtgcgccgccgagctggtctgcaaagagtggtaccgcgtgaccagtgacggaatgctctggaagaagctgattgagagaatggtcagaactgacagtttgtggaggggcctagccgaacgcaggggatggggtcaatacttgttcaagaataaaccgcccgacggcaacgctcctcccaacagcttctatcgagccctctaccctaaaattatccaggatatagagacaatagagtctaattggcgctgcggcaggcatagtttgcagcggatccactgtaggtctgaaacatctaagggagtttactgtctgcagtacgatgaccagaaaattgtgtccggcctgcgagacaatactattaaaatctgggacaaaaacacacttgagtgtaagagaattctgacgggccacaccgggtccgttctctgccttcagtatgatgagagggtcatcattaccggctctagcgatagcaccgtgagggtgtgggatgttaataccggggaaatgctcaacacccttattcaccattgtgaggcggttttacaccttcgatttaataacggcatgatggttacatgtagtaaggatcggagtatcgctgtgtgggacatggctagccctacagacatcactctgaggcgggtcctagtgggacacagggccgctgtgaatgtcgttgatttcgatgacaagtatatcgtttcagcaagtggagaccggacgattaaggtttggaatacatccacatgtgaatttgtcagaaccctcaacggtcacaagagaggcatcgcatgtttacagtaccgcgacagattggtggtgagcgggagttcggataatactataaggctttgggacatagagtgtggggcttgcctgcgcgttctggagggacacgaagagctggtgcgatgcatccgctttgacaacaaacggatagtctctggcgcctacgatgggaaaatcaaggtctgggatctcgttgccgccctggatccacgggccccggccggaactctgtgtcttcggaccctcgtggaacatagtggaagagtgttcaggttacagtttgatgagtttcagatcgtgagttcgtctcatgacgataccattttaatctgggacttcctgaatgaccctgccgctcaggctgagccaccgcggtctccttctagaacatacacatatattagcaggtag

SEQ ID NO: 228933 - DNA, 576 bp, Artificial Sequence
  derived and/or modified sequence
atgccgcgttcactttggctgggctgtagcagtctcgcagacagcatgcccagccttcggtgcttatacaatcccggtaccggcgcacttaccgcctttcagaatagctccgaacgggaagactgcaacaatggagaaccacctcgaaaaatcataccagaaaaaaactctcttcgccagacatacaacagctgcgccaggctgtgtcttaatcaggagaccgtttgtctggcctccacagccatgaaaactgagaactgcgtggccaagaccaagctcgccaacggaacttcttcaatgatcgtgcccaaacagcggaaactcagtgcctcttatgagaaagaaaaagagctatgtgtgaagtattttgagcagtggtccgagtcagaccaggtggagttcgttgaacatctgatttcccaaatgtgtcattatcagcacggacacattaactcgtacctcaagcctatgcttcagagggactttatcacagcgctacctgcgagagggttggaccacatcgctgagaatatactgtcttacctcgacgccaaatctctctgtgctgccgagtag

SEQ ID NO: 228934 - DNA, 1818 bp, Artificial Sequence
  derived and/or modified sequence
atggatcccgcagaggcagtactccaagagaaagctctgaaattcatgtgctcaatgcctcggtctctctggctcgggtgctcatccctcgctgactcgatgcccagtttgcgctgtctgtacaaccctgggactggcgcattgacagcattccagaactcctccgaaagagaggattgcaacaacggagaaccaccaaggaagatcatcccagagaagaatagccttcgtcagacctacaactcctgcgcaaggctctgccttaaccaggagaccgtctgcttggctagtacggctatgaaaactgaaaactgtgtggctaagaccaagcttgccaacggcacctcatctatgattgtccccaaacagaggaaactgagtgcttcttatgagaaggagaaagaactctgtgtaaagtattttgagcaatggagtgagagcgatcaagtcgaattcgtggagcacctgatctctcagatgtgtcactaccagcacggacacattaattcgtatctgaagcccatgttgcagagggattttatcactgctctcccagctcggggactggaccatatagctgagaatattctgagctacctggacgccaaatcgctttgcgctgcggagctggtgtgtaaagagtggtaccgggtcacaagcgacggcatgctctggaaaaaactgatcgaacgcatggttagaaccgactccctctggagaggcctggccgagcgtcgcggatggggtcagtacctcttcaagaacaagccgcctgatggcaacgcccctccaaacagtttttatagggccctgtacccaaagataatccaggacattgagaccatagagagcaactggcgatgcggtaggcacagcttgcagcggatccactgcagaagcgaaacaagtaagggggtttactgcctgcaatacgatgatcagaagattgttagtggtcttagagataacaccattaaaatatgggacaagaataccttggaatgtaaaaggatcctcaccggtcatacgggttctgtgttgtgcctccagtacgatgagagggtcattattaccggcagtagcgacagcacggtgagggtgtgggacgtgaacaccggggagatgctgaatacattaattcatcattgtgaggccgtcctgcacctcaggttcaacaacggtatgatggtgacctgtagtaaggaccgcagcattgcagtctgggatatggcttctcccacggacatcaccctgagacgcgtactggtcgggcacagagcagccgtgaatgtcgttgatttcgatgacaagtatattgtgtccgcttctggggaccggacaatcaaagtgtggaacacctccacgtgtgaattcgtgaggacactaaacgggcataagagaggcatagcatgcctgcagtatcgggatcggctcgttgtatccggctcaagcgacaataccatcaggctctgggatatcgagtgcggcgcttgtctccgggtgctggagggccacgaagagctcgtgaggtgcatccggtttgataacaaacgcatcgtgagcggcgcatatgacgggaaaattaaagtgtgggatctcgttgcggctctcgatcccagggctcccgcagggacactttgcctgcgtacactggtggaacactctggaagggtctttcggctccagttcgacgaattccagattgtgtcctctagtcacgacgatactatcttgatctgggacttcctcaatgatccggctgctcaagctgagcccccaagaagtccttctcggacgtacacttatattagcagatag

SEQ ID NO: 228935 - DNA, 6134 bp, Artificial Sequence
  derived and/or modified sequence
agaggtaagagagggcggggggaaggaagaggaggcgggatccgggcgctgcgttggctgcggcctggcaccaaaggggcggccccggcggagagcggacccagtggcctcggcgattatggacccggccgaggcggtgctgcaagagaaggcactcaagtttatgtgctctatgcccaggtctctgtggctgggctgctccagcctggcggacagcatgccttcgctgcgatgcctgtataacccagggactggcgcactcacagctttccagaattcctcagagagagaagactgtaataatggcgaaccccctaggaagataataccagagaagaattcacttagacagacatacaacagctgtgccagactctgcttaaaccaagaaacagtatgtttagcaagcactgctatgaagactgagaattgtgtggccaaaacaaaacttgccaatggcacttccagtatgattgtgcccaagcaacggaaactctcagcaagctatgaaaaggaaaaggaactgtgtgtcaaatactttgagcagtggtcagagtcagatcaagtggaatttgtggaacatcttatatcccaaatgtgtcattaccaacatgggcacataaactcgtatcttaaacctatgttgcagagagatttcataactgctctgccagctcggggattggatcatattgctgagaacattctgtcatacctggatgccaaatcactatgtgctgctgaacttgtgtgcaaggaatggtaccgagtgacctctgatggcatgctgtggaagaagcttatcgagagaatggtcaggacagattctctgtggagaggcctggcagaacgaagaggatggggacagtatttattcaaaaacaaacctcctgacgggaatgctcctcccaactctttttatagagcactttatcctaaaattatacaagacattgagacaatagaatctaattggagatgtggaagacatagtttacagagaattcactgccgaagtgaaacaagcaaaggagtttactgtttacagtatgatgatcagaaaatagtaagcggccttcgagacaacacaatcaagatctgggataaaaacacattggaatgcaagcgaattctcacaggccatacaggttcagtcctctgtctccagtatgatgagagagtgatcataacaggatcatcggattccacggtcagagtgtgggatgtaaatacaggtgaaatgctaaacacgttgattcaccattgtgaagcagttctgcacttgcgtttcaataatggcatgatggtgacctgctccaaagatcgttccattgctgtatgggatatggcctccccaactgacattaccctccggagggtgctggtcggacaccgagctgctgtcaatgttgtagactttgatgacaagtacattgtttctgcatctggggatagaactataaaggtatggaacacaagtacttgtgaatttgtaaggaccttaaatggacacaaacgaggcattgcctgtttgcagtacagggacaggctggtagtgagtggctcatctgacaacactatcagattatgggacatagaatgtggtgcatgtttacgagtgttagaaggccatgaggaattggtgcgttgtattcgatttgataacaagaggatagtcagtggggcctatgatggaaaaattaaagtgtgggatcttgtggctgctttggacccccgtgctcctgcagggacactctgtctacggacccttgtggagcattccggaagagtttttcgactacagtttgatgaattccagattgtcagtagttcacatgatgacacaatcctcatctgggacttcctaaatgatccagctgcccaagctgaacccccccgttccccttctcgaacatacacctacatctccagataaataaccatacactgacctcatacttgcccaggacccattaaagttgcggtatttaacgtatctgccaataccaggatgagcaacaacagtaacaatcaaactactgcccagtttccctggactagccgaggagcagggctttgagactcctgttgggacacagttggtctgcagtcggcccaggacggtctactcagcacaactgactgcttcagtgctgctatcagaagatgtcttctatcttttgtgaatgattggaacttttaaacctcccctcctctcctcctttcacctctgcacctagttttttcccattggttccagacaaaggtgacttataaatatatttagtgttttgccagaatctctcttgctttgccattaagcagaagaactagtttccctgtatagcctgctgggagagacccacttctagggtatgggggatgcagcttcaagcccagtgcccagtgtctccctgttaactgcaggaatgccaagcacctggccagagcagcccagccccaatatgcttaggaggagacagagttccctctgtatagcctctgggacaagaaaaagaaaacacaagaatgtatacactggaagatttgggcctcctgcctgccttctctttgtttctgttcctcttcccatctactcccctacgccccttcaaccttttttctctgtctgcttcacctgagaagaaagtgtacgaagagagtgtcctcctctcacatgagccagatcagccagaaaatgcaacacttggaagagttaaatgctgttcagtgaagatttcagccccaggcctttgctgcaagtgaccctgtggcaacagtggattctcagacatgatactctcatcatatttgcaactcttctctctctttcttccccacacccaagaggaggattggtggtagggggcaggcagagggggtggggagaagtttcctgggctccatcaatggctgcatcttttctggactcagcagtctccttgattccatgtagagtgtggaaaggagttgctgattgcatttcctctcattaacaattgggtgtgtaataaaaagcattgtacttcatcttaaatcactggtaaggctcagcctacagaaagatttgaaatggccagagccaatcgcttggtgcattctgcgtaatggtttccatctccgatttcctcatcagggcctgtgaatacccaggtgcctgtatctttgccaagaccgtgatcaaggtagcttaagagagatggtcaggagaaaacactgtttttgttttttttgttgttttgttttgttttggccagttaaatatcatctctcaaatattgatctcaccgtgtcaaccttgcactgcacaaccttccttctgcttctcccacacccagtatttgcagaagggcaaagctgcttaagagagaggatcagggtgaagtttggcacacagggtttattaatggggcaaaaactgccttttcttcctcctcctgaccttattttgctcttcactctccccagccaataaagcgtctgtggcgattggtgaacagcataaacagctggacctcagcaagggtcaggcaaacccagtcactcggaaggcagctgtgtgagctgccaagctagtgggcttcaggtgcaagggtacctgtgccacaccaacctgggagcacacagaatactattaatgtgcacccagctggtctccccaggcaagaaggtatcctcttcccaaggtgtacccactgaatgttgttactacatattgagagtcattttatgcatatgcattctacctttcctgctttatgagtatttttaagcttttagttcaaggttatattcagaaaatatttcccagtataatgatacatcgtagcctaagaaatattttctcaatgtaattcccttcccagctacccaaatgctacagagaaatgttttctacttggccactatcagggttcgtcatctattgtgttgactattaatggctttttgattgggtaaggattttgctatagatgaaggtagagggctgtcagccctgaaaaacacacaggtcagacatttaaaaggcatgggtttcgagctgtctcaaaatattgcccaatagccataattttaccagcctttctgtcatatgctgctattacaaagtggaagctgttgaatgtttattggtgcccagggttttgctctccaatctaggttcagttgaaggaatattgtttctaagactgttttgagacatgtccagtacatcacaaaggagatcggggcgacccctgcagatgtggagccattagcccagttgaggatattctccaagttgtcctctctcctgctgatggaaatgggaatgaagttaagtggtctgaaaaacttgaatcgttcacatttctcagctctgggggtcatttaccagtttgttgtagaagaaataatcaggtaagttaaaagttcatttccagagaaggtaaaccccacttaccatctctgcatgatttcagtgggaattgattatcactaatccccaactgggctagaataaatgtaaagtttgacctttttaaaacgaaaagagagacaaagtctcagcacattccaaggagtggtagaaacagagctgaaggtgtccccattgtagattagtctcttctcactaaaatttactttccaacgtagggcctaaaggaaacctttcttaaagacaggctgaaaccccttcaaaggcagatgaggaggtacagacacgtgaccttttggtgcacactggagctacttggacaagaccagcatgccttgctgcacgtgtgtgtatttcactgctgagaacatcctttaacttggtgtgcaatttgaaaggatgtgaatcatggatggaaggccatttgtacatgtcccttggcaaaattctttctggtgtctcctaacttcagagacagggactctttttggatctctattgacaagtaataaaagtctggccctcataacttgtttccgaactagaaaagtctgtgagacccctacatcattctggtttttttgcttgagtaagaacaatccttttttatttttcttctgtacagtctaaagctacagagaaaaaaaaatgcactcttcccttgccggctcctggtaccattggtctgaacagctgtagttggtctactccttacttagcacttgattgtgtggggaaacaaaggtgggaggggtggggaatactggaaataatcagggcaatttttttctttcccataattggactagataccttggtactgttgaccttctcagcatctcccttttgccttagatggcaacaccctccagtctgtagcagagcagtccaacccagattagtgcagcccggaggcttagggtgcagcctccctggtcttcctccacacagttgttcaccaacagaccagacctcctttaaccacagtgtcaacatagtatcggaaagagagccatttcttaggggaataaaacagtttcgcttctttagctcatctgtggtgtcagaatccttggagctgaagagagaaatcaaaagagcatgatgatggctgcctggtttcaggtggaacttaatgcattgatctttagaagctccttctgttggaagttgagtacctgtgatctaaaatgtcctggaggcagatgacatctaaaatatgtgctttccaaccagcacagctggcgctcttagctcctgattggttgtgtgttttattaaggatcagtgcagttaagtcgtattttaaagtgttacctcccctcctaacccttccccttcttggacactgaaggaaaaggccaactagggtgttagccctctgggcaccaaggaaactaacagctttctcaaagcggtgaccactcaggccagcccagacaaatctgagggatggccagtgcactccaatgatgggacaggcctaacaacacatgtaagcttccccgagagctttcagctggttcacctctttgttctctagactcttaagtactgactgctttgacttttgtgattatgttatggtgatgtgtagtcagtgtaccaatatgttcacaacctaggatcatgataatggagtgtgttttgggttttttttaactgttcagaaaaaaagtaaattacaaatataagattaaagtgaattttctaa

SEQ ID NO: 228936 - DNA, 576 bp, Artificial Sequence
  derived and/or modified sequence
atgcccagaagcctgtggctgggctgcagcagcctggccgacagcatgcccagcctgagatgcctgtacaaccccggcaccggcgccctgaccgccttccagaacagcagcgagagagaggactgcaacaacggcgagccccccagaaagatcatccccgagaagaacagcctgagacagacctacaacagctgcgccagactgtgcctgaaccaggagaccgtgtgcctggccagcaccgccatgaagaccgagaactgcgtggccaagaccaagctggccaacggcaccagcagcatgatcgtgcccaagcagagaaagctgagcgccagctacgagaaggagaaggagctgtgcgtgaagtacttcgagcagtggagcgagagcgaccaggtggagttcgtggagcacctgatcagccagatgtgccactaccagcacggccacatcaacagctacctgaagcccatgctgcagagagacttcatcaccgccctgcccgccagaggcctggaccacatcgccgagaacatcctgagctacctggacgccaagagcctgtgcgccgccgagtag

SEQ ID NO: 228937 - DNA, 1818 bp, Artificial Sequence
  derived and/or modified sequence
atggaccccgccgaggccgtgctgcaggagaaggccctgaagttcatgtgcagcatgcccagaagcctgtggctgggctgcagcagcctggccgacagcatgcccagcctgagatgcctgtacaaccccggcaccggcgccctgaccgccttccagaacagcagcgagagagaggactgcaacaacggcgagccccccagaaagatcatccccgagaagaacagcctgagacagacctacaacagctgcgccagactgtgcctgaaccaggagaccgtgtgcctggccagcaccgccatgaagaccgagaactgcgtggccaagaccaagctggccaacggcaccagcagcatgatcgtgcccaagcagagaaagctgagcgccagctacgagaaggagaaggagctgtgcgtgaagtacttcgagcagtggagcgagagcgaccaggtggagttcgtggagcacctgatcagccagatgtgccactaccagcacggccacatcaacagctacctgaagcccatgctgcagagagacttcatcaccgccctgcccgccagaggcctggaccacatcgccgagaacatcctgagctacctggacgccaagagcctgtgcgccgccgagctggtgtgcaaggagtggtacagagtgaccagcgacggcatgctgtggaagaagctgatcgagagaatggtgagaaccgacagcctgtggagaggcctggccgagagaagaggctggggccagtacctgttcaagaacaagccccccgacggcaacgccccccccaacagcttctacagagccctgtaccccaagatcatccaggacatcgagaccatcgagagcaactggagatgcggcagacacagcctgcagagaatccactgcagaagcgagaccagcaagggcgtgtactgcctgcagtacgacgaccagaagatcgtgagcggcctgagagacaacaccatcaagatctgggacaagaacaccctggagtgcaagagaatcctgaccggccacaccggcagcgtgctgtgcctgcagtacgacgagagagtgatcatcaccggcagcagcgacagcaccgtgagagtgtgggacgtgaacaccggcgagatgctgaacaccctgatccaccactgcgaggccgtgctgcacctgagattcaacaacggcatgatggtgacctgcagcaaggacagaagcatcgccgtgtgggacatggccagccccaccgacatcaccctgagaagagtgctggtgggccacagagccgccgtgaacgtggtggacttcgacgacaagtacatcgtgagcgccagcggcgacagaaccatcaaggtgtggaacaccagcacctgcgagttcgtgagaaccctgaacggccacaagagaggcatcgcctgcctgcagtacagagacagactggtggtgagcggcagcagcgacaacaccatcagactgtgggacatcgagtgcggcgcctgcctgagagtgctggagggccacgaggagctggtgagatgcatcagattcgacaacaagagaatcgtgagcggcgcctacgacggcaagatcaaggtgtgggacctggtggccgccctggaccccagagcccccgccggcaccctgtgcctgagaaccctggtggagcacagcggcagagtgttcagactgcagttcgacgagttccagatcgtgagcagcagccacgacgacaccatcctgatctgggacttcctgaacgaccccgccgcccaggccgagccccccagaagccccagcagaacctacacctacatcagcagatag

SEQ ID NO: 228938 - protein, 1690 aa, Artificial Sequence
  derived and/or modified sequence
MHPGLWLLLVTLCLTEELAAAGEKSYGKPCGGQDCSGSCQCFPEKGARGRPGPIGIQGPTGPQGFTGSTGLSGLKGERGFPGLLGPYGPKGDKGPMGVPGFLGINGIPGHPGQPGPRGPPGLDGCNGTQGAVGFPGPDGYPGLLGPPGLPGQKGSKGDPVLAPGSFKGMKGDPGLPGLDGITGPQGAPGFPGAVGPAGPPGLQGPPGPPGPLGPDGNMGLGFQGEKGVKGDVGLPGPAGPPPSTGELEFMGFPKGKKGSKGEPGPKGFPGISGPPGFPGLGTTGEKGEKGEKGIPGLPGPRGPMGSEGVQGPPGQQGKKGTLGFPGLNGFQGIEGQKGDIGLPGPDVFIDIDGAVISGNPGDPGVPGLPGLKGDEGIQGLRGPSGVPGLPALSGVPGALGPQGFPGLKGDQGNPGRTTIGAAGLPGRDGLPGPPGPPGPPSPEFETETLHNKESGFPGLRGEQGPKGNLGLKGIKGDSGFCACDGGVPNTGPPGEPGPPGPWGLIGLPGLKGARGDRGSGGAQGPAGAPGLVGPLGPSGPKGKKGEPILSTIQGMPGDRGDSGSQGFRGVIGEPGKDGVPGLPGLPGLPGDGGQGFPGEKGLPGLPGEKGHPGPPGLPGNGLPGLPGPRGLPGDKGKDGLPGQQGLPGSKGITLPCIIPGSYGPSGFPGTPGFPGPKGSRGLPGTPGQPGSSGSKGEPGSPGLVHLPELPGFPGPRGEKGLPGFPGLPGKDGLPGMIGSPGLPGSKGATGDIFGAENGAPGEQGLQGLTGHKGFLGDSGLPGLKGVHGKPGLLGPKGERGSPGTPGQVGQPGTPGSSGPYGIKGKSGLPGAPGFPGISGHPGKKGTRGKKGPPGSIVKKGLPGLKGLPGNPGLVGLKGSPGSPGVAGLPALSGPKGEKGSVGFVGFPGIPGLPGIPGTRGLKGIPGSTGKMGPSGRAGTPGEKGDRGNPGPVGIPSPRRPMSNLWLKGDKGSQGSAGSNGFPGPRGDKGEAGRPGPPGLPGAPGLPGIIKGVSGKPGPPGFMGIRGLPGLKGSSGITGFPGMPGESGSQGIRGSPGLPGASGLPGLKGDNGQTVEISGSPGPKGQPGESGFKGTKGRDGLIGNIGFPGNKGEDGKVGVSGDVGLPGAPGFPGVAGMRGEPGLPGSSGHQGAIGPLGSPGLIGPKGFPGFPGLHGLNGLPGTKGTHGTPGPSITGVPGPAGLPGPKGEKGYPGIGIGAPGKPGLRGQKGDRGFPGLQGPAGLPGAPGISLPSLIAGQPGDPGRPGLDGERGRPGPAGPPGPPGPSSNQGDTGDPGFPGIPGPKGPKGDQGIPGFSGLPGELGLKGMRGEPGFMGTPGKVGPPGDPGFPGMKGKAGPRGSSGLQGDPGQTPTAEAVQVPPGPLGLPGIDGIPGLTGDPGAQGPVGLQGSKGLPGIPGKDGPSGLPGPPGALGDPGLPGLQGPPGFEGAPGQQGPFGMPGMPGQSMRVGYTLVKHSQSEQVPPCPIGMSQLWVGYSLLFVEGQEKAHNQDLGFAGSCLPRFSTMPFIYCNINEVCHYARRNDKSYWLSTTAPIPMMPVSQTQIPQYISRCSVCEAPSQAIAVHSQDITIPQCPLGWRSLWIGYSFLMHTAAGAEGGGQSLVSPGSCLEDFRATPFIECSGARGTCHYFANKYSFWLTTVEERQQFGELPVSETLKAGQLHTRVSRCQVCMKSL

SEQ ID NO: 228939 - protein, 1691 aa, Artificial Sequence
  derived and/or modified sequence
MHPGLWLLLVTLCLTEELAAAGEKSYGKPCGGQDCSGSCQCFPEKGARGRPGPIGIQGPTGPQGFTGSTGLSGLKGERGFPGLLGPYGPKGDKKFSIPVLLIYDSRPGHPGQPGPRGPPGLDGCNGTQGAVGFPGPDGYPGLLGPPGLPGQKGSKGDPVLAPGSFKGMKAFIPLFESIRGPQGAPGFPGAVGPAGPPGLQQGQPPFLEVLFPHWHEGEEAKVRDSLFGDVGLPGPAGPPPSTGELEFMGFPKGKKGSKGEPGPKGFPGISGPPGFPGLGTTGEKGEKGEKGIPGLPGPRTLLCSHTFHLVVTMFLSQGKKGTLGFPGLNGFQGIEGQKGDIGLPGPDVFIDIDGAVISGNPGDPGVPGLPGLKGDEGIQGLRGPSGVPGLPALSGVPGALGPQGFPGLKGDQGNPGRTTIGAAGLPGRDGLPGPPGPPGPPSPEFETETLHNKESGFPGLRGEQGPKGNLGLKGIKGDSGFCACDGGVPNTGPPGEPGPPGPWGLIGLPGLKGARGDRGSGGAQGPAGAPGLVGPLGPSGPKGKKGEPILSTIQGMPGDRGDSGSQGFRGVIGEPGKDGVPGLPGLPGLPGDGGQGFPGEKGLPGLPGEKGHPGPPGLPGNGLPGLPGPRGLPGDKGKDGLPGQQGLPGSKGITLPCIIPGSYGPSGFPGTPGFPGPKGSRGLPGTPGQPGSSGSKGEPGSPGLVHLPELPGFPGPRGEKGLPGFPGLPGKDGLPGMIGSPGLPGSKGATGDIFGAENGAPGEQGLQGLTGHKGFLGDSGLPGLKGVHGKPGLLGPKGERGSPGTPGQVGQPGTPGSSGPYGIKGKSGLPGAPGFPGISGHPGKKGTRGKKGPPGSIVKKGLPGLKGLPGNPGLVGLKGSPGSPGVAGLPALSGPKGEKGSVGFVGFPGIPGLPGIPGTRGLKGIPGSTGKMGPSGRAGTPGEKGDRGNPGPVGIPSPRRPMSNLWLKGDKGSQGSAGSNGFPGPRGDKGEAGRPGPPGLPGAPGLPGIIKGVSGKPGPPGFMGIRGLPGLKGSSGITGFPGMPGESGSQGIRGSPGLPGASGLPGLKGDNGQTVEISGSPGPKGQPGESGFKGTKGRDGLIGNIGFPGNKGEDGKVGVSGDVGLPGAPGFPGVAGMRGEPGLPGSSGHQGAIGPLGSPGLIGPKGFPGFPGLHGLNGLPGTKGTHGTPGPSITGVPGPAGLPGPKGEKGYPGIGIGAPGKPGLRGQKGDRGFPGLQGPAGLPGAPGISLPSLIAGQPGDPGRPGLDGERGRPGPAGPPGPPGPSSNQGDTGDPGFPGIPGPKGPKGDQGIPGFSGLPGELGLKGMRGEPGFMGTPGKVGPPGDPGFPGMKGKAGPRGSSGLQGDPGQTPTAEAVQVPPGPLGLPGIDGIPGLTGDPGAQGPVGLQGSKGLPGIPGKDGPSGLPGPPGALGDPGLPGLQGPPGFEGAPGQQGPFGMPGMPGQSMRVGYTLVKHSQSEQVPPCPIGMSQLWVGYSLLFVEGQEKAHNQDLGFAGSCLPRFSTMPFIYCNINEVCHYARRNDKSYWLSTTAPIPMMPVSQTQIPQYISRCSVCEAPSQAIAVHSQDITIPQCPLGWRSLWIGYSFLMHTAAGAEGGGQSLVSPGSCLEDFRATPFIECSGARGTCHYFANKYSFWLTTVEERQQFGELPVSETLKAGQLHTRVSRCQVCMKSL

SEQ ID NO: 228940 - protein, 1678 aa, Artificial Sequence
  derived and/or modified sequence
MHPGLWLLLVTLCLTEELAAAGEKSYGKPCGGQDCSGSCQCFPEKGARGRPGPIGIQGPTGPQGFTGSTGLSGLKGERGFPGLLGPYGPKGDKGPMGVPGFLGINGIPGHPGQPGPRGPPGLDGCNGTQGAVGFPGPDGYPGLLGPPGLPGQKGSKGDPVLAPGSFKGMKGDPGLPGLDGITGPQGAPGFPGAVGPAGPPGLQGPPGPPGPLGPDGNMGLGFQGEKGVKGDVGLPGPAGPPPSTGELEFMGFPKGKKGSKGEPGPKGFPGISGPPGFPGLGTTGEKGEKGEKGIPGLPGPRGPMGSEGVQGPPGQQGKKGTLGFPGLNGFQGIEGQKGDIGLPGPDVFIDIDGAVISGNPGDPGVPGLPGLKGDEGIQGLRGPSGVPGLPALSGVPGALGPQGFPGLKGDQGNPGRTTIGAAGLPGRDGLPGPPGPPGPPSPEFETETLHNKESGFPGLRGEQGPKGNLGLKGIKGDSGFCACDGGVPNTGPPGEPGPPGPWGLIGLPGLKGARGDRGSGGAQGPAGAPGLVGPLGPSGPKGKKGEPILSTIQGMPGDRGDSGSQGFRGVIGEPGKDGVPGLPGLPGLPGDGGQGFPGEKGLPGLPGEKGHPGPPGLPGNGLPGLPGPRGLPGDKGKDGLPGQQGLPGSKGITLPCIIPGSYGPSGFPGTPGFPGPKGSRGLPGTPGQPGSSGSKGEPGSPGLVHLPELPGFPGPRGEKGLPGFPGLPGKDGLPGMIGSPGLPGSKGATGDIFGAENGAPGEQGLQGLTGHKGFLGDSGLPGLKGVHGKPGLLGPKGERGSPGTPGQVGQPGTPGSSGPYGIKGKSGLPGAPGFPGISGHPGKKGTRGKKGPPGSIVKKGLPGLKGLPGNPGLVGLKGSPGSPGVAGLPALSGPKGEKGSVGFVGFPGIPGLPGIPGTRGLKGIPGSTGKMGPSGRAGTPGEKGDRGNPGPVGIPSPRRPMSNLWLKGDKGSQGSAGSNGFPGPRGDKGEAGRPGPPGLPGAPGLPGIIKGVSGKPGPPGFMGIRGLPGLKGSSGITGFPGMPGESGSQGIRGSPGLPGASGLPGLKGDNGQTVEISGSPGPKGQPGESGFKGTKGRDGLIGNIGFPGNKGEDGKVGVSGDVGLPGAPGFPGVAGMRGEPGLPGSSGHQGAIGPLGSPGLIGPKGFPGFPGLHGLNGLPGTKGTHGTPGPSITGVPGPAGLPGPKGEKGYPGIGIGAPGKPGLRGQKGDRGFPGLQGPAGLPGAPGISLPSLIAGQPGDPGRPGLDGERGRPGPAGPPGPPGPSSNQGDTGDPGFPGIPGFSGLPGELGLKGMRGEPGFMGTPGKVGPPGDPGFPGMKGKAGPRGSSGLQGDPGQTPTAEAVQVPPGPLGLPGIDGIPGLTGDPGAQGPVGLQGSKGLPGIPGKDGPSGLPGPPGALGDPGLPGLQGPPGFEGAPGQQGPFGMPGMPGQSMRVGYTLVKHSQSEQVPPCPIGMSQLWVGYSLLFVEGQEKAHNQDLGFAGSCLPRFSTMPFIYCNINEVCHYARRNDKSYWLSTTAPIPMMPVSQTQIPQYISRCSVCEAPSQAIAVHSQDITIPQCPLGWRSLWIGYSFLMHTAAGAEGGGQSLVSPGSCLEDFRATPFIECSGARGTCHYFANKYSFWLTTVEERQQFGELPVSETLKAGQLHTRVSRCQVCMKSL

SEQ ID NO: 228941 - protein, 192 aa, Artificial Sequence
  derived and/or modified sequence
MALLRKSYSEPQLKGIVTKLYSRQGYHLQLQADGTIDGTKDEDSTYTLFNLIPVGLRVVAIQGVQTKLYLAMNSEGYLYTSELFTPECKFKESVFENYYVTYSSMIYRQQQSGRGWYLGLNKEGEIMKGNHVKKNKPAAHFLPKPLKVAMYKEPSLHDLTEFSRSGSGTPTKSRSVSGVLNGGKSMSHNEST

SEQ ID NO: 228942 - DNA, 579 bp, Artificial Sequence
  derived and/or modified sequence
atggccctgctgagaaagagctacagcgagccccagctgaagggcatcgtgaccaagctgtacagcagacagggctaccacctgcagctgcaggccgacggcaccatcgacggcaccaaggacgaggacagcacctacaccctgttcaacctgatccccgtgggcctgagagtggtggccatccagggcgtgcagaccaagctgtacctggccatgaacagcgagggctacctgtacaccagcgagctgttcacccccgagtgcaagttcaaggagagcgtgttcgagaactactacgtgacctacagcagcatgatctacagacagcagcagagcggcagaggctggtacctgggcctgaacaaggagggcgagatcatgaagggcaaccacgtgaagaagaacaagcccgccgcccacttcctgcccaagcccctgaaggtggccatgtacaaggagcccagcctgcacgacctgaccgagttcagcagaagcggcagcggcacccccaccaagagcagaagcgtgagcggcgtgctgaacggcggcaagagcatgagccacaacgagagcacctag

SEQ ID NO: 228943 - DNA, 579 bp, Artificial Sequence
  derived and/or modified sequence
atggccctgctccgaaagtcctactcagagcctcagcttaagggtatcgttacaaaattatatagtagacaggggtaccatctgcagctccaggcggatggaacaatcgacggtacaaaagatgaagactccacatacaccctgttcaacttaatcccagtcggcctgcgggtcgtcgcaatccagggggtacaaaccaagctttacctagcaatgaacagcgaagggtacctatacactagtgaactgttcactcctgagtgcaaatttaaggagtccgtgttcgagaactactatgtgacctacagttctatgatataccgccagcagcagtccggaaggggctggtacctcggattgaataaagaaggagaaatcatgaaggggaatcacgtcaaaaagaataaacctgccgcacactttctgcctaagccactcaaagtcgccatgtataaggagcctagtcttcatgaccttacagagttttccagatccgggtctggcacacctaccaagagccgcagtgtgtcaggtgtcctcaatggaggcaagtctatgtcccacaacgagtccacctag

SEQ ID NO: 228944 - DNA, 579 bp, Artificial Sequence
  derived and/or modified sequence
atggccctgctgaggaagagctacagcgagccccagctgaagggcatcgtgaccaagctgtacagccggcagggctaccacctgcagctgcaggctgatggcaccattgatggcaccaaggatgaggacagcacctacaccctcttcaacctgatccctgtgggcctgcgggtggtggccatccagggcgtgcagaccaagctgtacctggccatgaacagcgagggctacctgtacaccagcgagctgttcaccccagagtgcaagttcaaggagagcgtgtttgagaactactacgtgacctacagctccatgatctaccggcagcagcagagcggccggggctggtacctgggcctgaacaaggagggggagatcatgaagggcaaccacgtgaagaagaacaagccagctgcccacttcctgcccaagcccctgaaggtggccatgtacaaggagcccagcctgcatgacctgacagagttcagccgcagcggcagcggcacccccaccaagagccgctctgtgtctggagtgctgaatggaggcaagtccatgagccacaatgaaagcacctag

SEQ ID NO: 228945 - DNA, 579 bp, Artificial Sequence
  derived and/or modified sequence
atggccctgctgcggaagagctacagcgagccccagctgaagggcatagtaacaaagctctactcccgtcaaggctaccatctgcagcttcaggccgatgggacgatcgacggcaccaaagacgaagactctacatacactctctttaacctaataccagtgggtttgagggttgtcgctatccaaggagtccagacaaagctgtacctcgcaatgaactctgaaggttatctatatacatccgagctcttcactcccgaatgcaaattcaaggagtcagtgttcgaaaattattacgtgacttactcatcaatgatttaccggcagcaacaatcaggacgggggtggtatctcggcctgaacaaagagggagagattatgaaggggaaccacgttaagaaaaataaaccagctgcccacttcctgcctaaacctctcaaggtcgccatgtataaggagccctcgttgcatgacctaacagaattcagtcgatccggatcgggtacaccgactaagagcaggagcgtaagcggggtgctgaatggcggtaagtccatgtcccacaacgaaagtacctag

SEQ ID NO: 228946 - DNA, 579 bp, Artificial Sequence
  derived and/or modified sequence
atggcactgcttagaaagtcttatagtgaaccgcagttaaagggtatcgtgacaaaactctactcaagacaaggctatcatctccagctccaggcagatggaacaatcgatgggacgaaagacgaggactcgacctatacgctgtttaacctaattccagttggcctcagggtggttgccattcagggggtgcagaccaagctgtacttagccatgaattccgaaggatacttgtatacgtcggaattgttcactccggaatgtaaattcaaagagagtgtgttcgagaactactacgtgacgtattcatcaatgatataccggcaacagcagtccggccgtggatggtatttgggtttaaacaaagaaggagagatcatgaaagggaaccacgtgaaaaaaaataaacccgctgcacatttcctcccaaagcccttaaaagtagcaatgtacaaagaaccgagtttacatgatctaactgagttttcaagatcgggctcggggactcccacaaaaagtcggagcgttagcggcgtgctgaacggtggaaagagtatgagccacaacgaatcgacctag

SEQ ID NO: 228947 - DNA, 1939 bp, Artificial Sequence
  derived and/or modified sequence
aaactttctctgatctcctctctctctgtgtctgctccaaatgtagacagcaattgtctgggtaggaccagcttataaagaagcatggctttgttaaggaagtcgtattcagagcctcagcttaagggtatagttaccaagctatacagccgacaaggctaccacttgcagctgcaggcggatggaaccattgatggcaccaaagatgaggacagcacttacactctgtttaacctcatccctgtgggtctgcgagtggtggctatccaaggagttcaaaccaagctgtacttggcaatgaacagtgagggatacttgtacacctcggaacttttcacacctgagtgcaaattcaaagaatcagtgtttgaaaattattatgtgacatattcatcaatgatataccgtcagcagcagtcaggccgagggtggtatctgggtctgaacaaagaaggagagatcatgaaaggcaaccatgtgaagaagaacaagcctgcagctcattttctgcctaaaccactgaaagtggccatgtacaaggagccatcactgcacgatctcacggagttctcccgatctggaagcgggaccccaaccaagagcagaagtgtctctggcgtgctgaacggaggcaaatccatgagccacaatgaatcaacgtagccagtgagggcaaaagaagggctctgtaacagaaccttacctccaggtgctgttgaattcttctagcagtccttcacccaaaagttcaaatttgtcagtgacatttaccaaacaaacaggcagagttcactattctatctgccattagaccttcttatcatccatactaaagccccattatttagattgagcttgtgcataagaatgccaagcattttagtgaactaaatctgagagaaggactgccaaattttctcatgatctcacctatactttggggatgataatccaaaagtatttcacagcactaatgctgatcaaaatttgctctcccaccaagaaaatgtaaaagaccacaattgttcttcaaaaacaaacaaaacaaaacaaaacaaaattaactgcttaaatgttttgtcggggcaaacaaaattatgtgaattgtgttgttttcttggcttgatgttttctatctacgcttgattcacatgtactcttttctttggcatagtgcaactttatgatttctgaaattcaatggttctattgactttttgcgtcacttaatccaaatcaaccaaattcagggttgaatctgaattggcttctcaggctcaaggtaacagtgttcttgtggtttgaccaattgtttttctttctttttttttttttttagatttgtggtattctggtcaagttattgtgctgtactttgtgcgtagaaattgagttgtattgtcaaccccagtcagtaaagagaacttcaaaaaattatcctcaagtgtagatttctcttaattccatttgtgtatcatgttaaactattgttgtggcttcttgtgtaaagacaggaactgtggaactgtgatgttgtcttttgtgttgttaaaataagaaatgtcttatctgtatatgtatgagtcttcctgtcattgtatttggcacatgaatattgtgtacaaggaattgttaagactggttttccctcaacaacatatattatacttgctactggaaaagtgtttaagacttagctaggtttccatttagatcttcatatctgttgcatggaagaaagttgggttcttggcatagagttgcatgatatgtaagattttgtgcattcataattgttaaaaatctgtgttccaaaagtggacatagcatgtacaggcagttttctgtcctgtgcacaaaaagtttaaaaaagttgtttaatatttgttgttgtatacccaaatacgcaccgaataaactctttatattcattcaaaga

SEQ ID NO: 228948 - DNA, 1968 bp, Artificial Sequence
  derived and/or modified sequence
aaactttctctgatctcctctctctctgtgtctgctccaaatgtagacagcaattgtctgggtaggaccagcttataaagaagcatggctttgttaaggaagtcgtattcagagcctcagcttaagggtatagttaccaagctatacagccgacaaggctaccacttgcagctgcaggcggatggaaccattgatggcaccaaagatgaggacagcacttacactctgtttaacctcatccctgtgggtctgcgagtggtggctatccaaggagttcaaaccaagctgtacttggcaatgaacagtgagggatacttgtacacctcggaacttttcacacctgagtgcaaattcaaagaatcagtgtttgaaaattattatgtgacatattcatcaatgatataccgtcagcagcagtcaggccgagggtggtatctgggtctgaacaaagaaggagagatcatgaaaggcaaccatgtgaagaagaacaagcctgcagctcattttctgcctaaaccactgaaagtggccatgtacaaggagccatcactgcacgatctcacggagttctcccgatctggaagcgggaccccaaccaagagcagaagtgtctctggcgtgctgaacggaggcaaatccatgagccacaatgaatcaacgtagccagtgagggcaaaagaagggctctgtaacagaaccttacctccaggtgctgttgaattcttctagcagtccttcacccaaaagttcaaatttgtcagtgacatttaccaaacaaacaggcagagttcactattctatctgccattagaccttcttatcatccatactaaagccccattatttagattgagcttgtgcataagaatgccaagcattttagtgaactaaatctgagagaaggactgccaaattttctcatgatctcacctatactttggggatgataatccaaaagtatttcacagcactaatgctgatcaaaatttgctctcccaccaagaaaatgtaaaagaccacaattgttcttcaaaaacaaacaaaacaaaacaaaacaaaattaactgcttaaatgttttgtcggggcaaacaaaattatgtgaattgtgttgttttcttggcttgatgttttctatctacgcttgattcacatgtactcttttctttggcatagtgcaactttatgatttctgaaattcaatggttctattgactttttgcgtcacttaatccaaatcaaccaaattcagggttgaatctgaattggcttctcaggctcaaggtaacagtgttcttgtggtttgaccaattgtttttctttctttttttttttttttagatttgtggtattctggtcaagttattgtgctgtactttgtgcgtagaaattgagttgtattgtcaaccccagtcagtaaagagaacttcaaaaaattatcctcaagtgtagatttctcttaattccatttgtgtatcatgttaaactattgttgtggcttcttgtgtaaagacaggaactgtggaactgtgatgttgtcttttgtgttgttaaaataagaaatgtcttatctgtatatgtatgagtcttcctgtcattgtatttggcacatgaatattgtgtacaaggaattgttaagactggttttccctcaacaacatatattatacttgctactggaaaagtgtttaagacttagctaggtttccatttagatcttcatatctgttgcatggaagaaagttgggttcttggcatagagttgcatgatatgtaagattttgtgcattcataattgttaaaaatctgtgttccaaaagtggacatagcatgtacaggcagttttctgtcctgtgcacaaaaagtttaaaaaagttgtttaatatttgttgttgtatacccaaatacgcaccgaataaactctttatattcattcaaagaaaaaaaaaaaaaaaaaaaaaaaaaaaaaa

SEQ ID NO: 228949 - protein, 529 aa, Artificial Sequence
  derived and/or modified sequence
MEPDSVIEDKTIELMNTSVMEDQNEDESPKKNTLWQISNGTSSVIVSRKRPSEGNYQKEKDLCIKYFDQWSESDQVEFVEHLISRMCHYQHGHINSYLKPMLQRDFITALPEQGLDHIAENILSYLDARSLCAAELVCKEWQRVISEGMLWKKLIERMVRTDPLWKGLSERRGWDQYLFKNRPTDGPPNSFYRSLYPKIIQDIETIESNWRCGRHNLQRIQCRSENSKGVYCLQYDDEKIISGLRDNSIKIWDKTSLECLKVLTGHTGSVLCLQYDERVIVTGSSDSTVRVWDVNTGEVLNTLIHHNEAVLHLRFSNGLMVTCSKDRSIAVWDMASATDITLRRVLVGHRAAVNVVDFDDKYIVSASGDRTIKVWSTSTCEFVRTLNGHKRGIACLQYRDRLVVSGSSDNTIRLWDIECGACLRVLEGHEELVRCIRFDNKRIVSGAYDGKIKVWDLQAALDPRAPASTLCLRTLVEHSGRVFRLQFDEFQIISSSHDDTILIWDFLNVPPSAQNETRSPSRTYTYISR

SEQ ID NO: 228950 - protein, 510 aa, Artificial Sequence
  derived and/or modified sequence
MEDQNEDESPKKNTLWQISNGTSSVIVSRKRPSEGNYQKEKDLCIKYFDQWSESDQVEFVEHLISRMCHYQHGHINSYLKPMLQRDFITALPEQGLDHIAENILSYLDARSLCAAELVCKEWQRVISEGMLWKKLIERMVRTDPLWKGLSERRGWDQYLFKNRPTDGPPNSFYRSLYPKIIQDIETIESNWRCGRHNLQRIQCRSENSKGVYCLQYDDEKIISGLRDNSIKIWDKTSLECLKVLTGHTGSVLCLQYDERVIVTGSSDSTVRVWDVNTGEVLNTLIHHNEAVLHLRFSNGLMVTCSKDRSIAVWDMASATDITLRRVLVGHRAAVNVVDFDDKYIVSASGDRTIKVWSTSTCEFVRTLNGHKRGIACLQYRDRLVVSGSSDNTIRLWDIECGACLRVLEGHEELVRCIRFDNKRIVSGAYDGKIKVWDLQAALDPRAPASTLCLRTLVEHSGRVFRLQFDEFQIISSSHDDTILIWDFLNVPPSAQNETRSPSRTYTYISR

SEQ ID NO: 228951 - DNA, 4539 bp, Artificial Sequence
  derived and/or modified sequence
gtagtcgtggcgctctcgaggccctgccatgagcaagctcttaactcttcaggtctgcacgtcctacgcccaccgtccagtgctactctcagctcggagttcagcttcgggctgccaagagccagcaacctggtgtcagaggctcggtcccacaacgctctgcgggccgcggcgcctgctgggaggtgtagtccccgatctgcgtactgcgttcgccgagggggagggcggagctgccggcggcccgggcgggctggcagctagagtgggtgcgatagccgcctccgcctctgccgcctccgccgtcgcctcctccgcccgggccgttcgctgctgcgcggggagagcgaggcggggccgccggggccgccatggagcccgactcggtgattgaggacaagaccatcgagctcatgaacacttcagttatggaagatcaaaatgaagatgagtccccaaagaaaaatactctttggcagataagtaatggaacatcatctgtgatcgtctccagaaagaggccatcagaaggaaactatcaaaaagaaaaagacttgtgtattaaatattttgaccagtggtctgaatcagatcaagtggaatttgtggaacatcttatttcacgaatgtgtcattatcagcatggacatattaactcttacctgaagcccatgttgcagcgggactttattaccgctttaccagagcaaggcttagatcacatagcagaaaacattctttcgtacctggatgccaggtctctgtgtgcagcagagctggtatgtaaagaatggcagcgagtgatctcagaaggaatgctttggaagaagctgattgaacgaatggtacgcactgatcccctatggaaaggactttcagaaagaagagggtgggatcagtacctgtttaaaaacagacccacagatggccctccaaattcattttataggtcattatacccaaagattatccaggatatagagactatagaatctaactggcggtgtggacgacacaacttgcagaggattcagtgccgctctgaaaatagtaaaggtgtctactgtttacagtacgatgatgaaaaaattatcagtggcctacgagataattctattaagatatgggataaaaccagcctggaatgtttgaaagtgttaacaggacacacaggctctgtcctctgtctgcagtatgatgagcgtgtcattgtaactggctcttcagattctacggtgagagtgtgggatgtgaacacgggtgaagttcttaacacattgatccaccacaatgaggctgtattgcacttacgcttcagcaatggactgatggtgacctgttccaaggaccgctccattgctgtgtgggacatggcttctgcgaccgacatcactttacgccgtgtcctggttggccaccgggctgccgtcaatgtagtagactttgacgacaagtacatcgtgtctgcctctggtgacaggaccatcaaagtctggagcacgagcacctgtgaatttgttcgtactctcaatgggcacaagcggggcattgcctgtctccagtacagggatcgcctggttgttagtggatcatcagataataccattaggctctgggatattgaatgtggtgcctgtttaagagtcctagagggacatgaagaattggtccgatgcatccggtttgataacaagaggattgtcagtggggcctatgatgggaaaattaaagtttgggacttgcaagctgctcttgaccctcgagccccagcaagcacattgtgtttgcgcacattggtggaacattctggacgtgtgtttcggctccagtttgatgagtttcagatcatcagcagctcccatgatgacactattttgatttgggatttcttaaatgtgcctcccagtgcccagaatgagacccgttctccctccagaacatacacttacatctctagataacagtctgcactttcacccgtttcagggttttctagtcttgaactactggctacgtggctaccaaatgcctaagggagttcgttcacagctgagttatgaagctggaattggttctagacgctgggtagatgcaaagcagcctaactcttcaagtaccgacatttctcacctctgattccggctctcctttgagaaggagaccttagcttccccggcttcaagtagaacagaagcccgtttccttccctcatcagtgaaaaaatctaatgtttcaaatgtaaattgttcatagaaaaggaacatagaatctgttttacagaagtaaatcgaccgtcaagagaagacttggcctctaatttatattgctttgcactttggtttgatattaagaaacagcattcttcttcagtgaaattttgggtgccaaacacctacccagaatgtccagggctttcattttcaaaagttagcattctccttttgaccgtccaagtcattatgaattctgacttgttgtattaggaacatgttggacagtggaaaattttctctggattgttttagtaatatttttgggattatacttcctttctgtaccaatttcttttaatttaaagaactataagtcagttatattatctaccaacaggtaatatagctctttcttttattaactgttctctgtcccccaaccatctcctgatatttggtagagtaacacctttatacgtgtgcttgcctcctaatttaaaatactgtattcgcatgtagatataatgtacataacagtttaacctcaaagttgctggagtcagggccccctgtgcttgagacactaatacagagtgtgttcgcacttagccatgggctgggctcaagaacctgatacctgggttgatgtggattacctagaacccttcctgcagtattcatacagtgtttttattttgttgttgtcattgcgtgtgtgtggtttgtgtgtgtttttaatgagaatcttgttttaaaatgtaatttctaaggtttaacaccaaaatgttttatttgttgtggagtatatattatacaatagagaggtaccttaaacattttttgttcttattctttttctcataagtactcctgagtacaagtggtcacctcccatagtattcatttggcttcgctgtcaaaaatcattattctgtgcagtcgtggccctgggaaggggaaataagaaggccctgttgacgggctgtcttggctctggaattcatgcatcctggccttgccaaggttctggcagggcctgctggtgtgttggagcctgcagggcaggtcaggctggttcagaggcccatgctgaggggtgggtgctctgaagtggagtgaagcctcaagcccatgaatgccaccccagtcatctctggtgtcagctgctgctgtggccccagcaggttctcaaagctcccaagtcctccctacgacacagcccaaatgtgtaaatggcactgttgccctgacagtgcatggaaaggacgttggcatccaattggcactccttctcccttattcaatattaggtttgatttgcccttcgccattgtttccaaagatcaaggaatgtcaataacattttaaaggaccaataaacagcctcctataaagtaaacctcttcccgtggaagcacactctactactaaagggaaggccctgggctctgatttgtcctttgcattgagaacggtgtggggatcagtgtgtgtgtatgtgatttgtttattgagttggctttgcttttttagtttttcttttaaaaataaaatccttccttcccatgttactaaattaatttatgtttttgagaggttgagtctcaaagtgtaaacaataaacctccattcataaggtggatgttgtaagcttgatggtggttgtgaaagtgatttagctttgaccacttttcatcctacagcttcaatatcaaactggttaggaaagcccagggggaagggagggggcaggggaggaggcaattctgaatgaatgaatggattttttgttgtttttgcatgtttaatatagaagttcccctcgttccttgggagatgatggcctttgaatatgcagacaacctttgaattgtgcctactaaattatagcaggggactttggcacccaaggagttctgactttctgggattataatagtaattcccagccatactctggactttattttgctaaccataactgagcaaatgtaaattactgctatattaatgttttaaagcactgggatagtctaattctaacttgtaattaattatgtttgccaattatctgtttgaaataaatttgtgtctgaacagctattgaaactgttaaattgtacagatattattcatgacagctttgtactgtggaatgtgcttaataaaaaacaaaaaagtttgacttttgtccagtaaattgctaagtaatgtcaataaatcgagtatgggtattatgcagtgcacctaatctggcttcatgcaattgttacttcagctactgattcaaagccaatactcttaataaagtgttgcaatactctga

SEQ ID NO: 228952 - DNA, 1590 bp, Artificial Sequence
  derived and/or modified sequence
atggagcccgacagtgtgatcgaagacaaaactattgagctgatgaatactagcgtgatggaagatcagaacgaggatgagtcacccaagaagaacaccctttggcaaatctctaacgggacatcctccgtaatcgtgtccagaaaacgcccctcggaaggcaattaccagaaagagaaggatctctgtatcaaatattttgaccagtggagcgagagcgatcaagttgaattcgtggagcatttgatatcgcgtatgtgtcactaccagcacgggcacataaactcctacttgaaacctatgctgcaaagagattttattaccgcgctacccgaacaaggccttgatcatattgccgaaaatatactgtcgtatctggatgcccgatctctgtgtgctgcggagctggtctgtaaagagtggcagagagtgatcagcgagggcatgctgtggaaaaagttaatcgaaagaatggttagaacagatcctttatggaaggggctgagtgagcgcaggggctgggaccagtacctcttcaagaatcggcctactgacggcccacctaattcgttctatcgctcgttgtatcctaaaatcatccaggacattgagacaattgagagcaactggagatgcggcaggcataacctgcagagaattcagtgcagaagtgaaaactccaaaggggtttactgcctgcagtatgacgatgagaagatcatcagcggcctgcgcgataacagcatcaagatttgggataaaacaagcttagaatgtctgaaagtcctgacgggccatactgggtctgtgctgtgtctgcaatacgatgaacgcgtgatcgtcacaggatcaagtgattccaccgtgcgagtgtgggatgtgaatacaggagaggtgctaaataccctgatccaccataacgaggctgttctgcacttacggttttcgaatgggttaatggtaacctgctccaaggataggagtatcgccgtgtgggatatggcctccgctacagacatcacactgagaagggttctggtcggacacagagcagccgttaatgtagttgatttcgatgataagtacatcgtgtcagccagcggggacaggactatcaaggtgtggagcacttccacgtgcgagtttgtgaggacgcttaatggccataagagaggtatcgcatgcctccagtacagggaccgtctcgtggtcagcggtagctcagacaacaccataagactctgggatatcgagtgcggagcctgcctcagagtgttggagggccacgaggagctggttcgctgcattcgcttcgataacaagcggatcgtgagcggcgcctacgacggtaagatcaaggtctgggacctgcaggccgccctcgaccctcgcgctcctgcatcgacattgtgtttaagaaccctggtggaacactccggacgcgtttttcggctccaattcgatgaatttcagatcatatccagcagtcacgacgatactattctcatctgggacttcctcaacgttccaccaagcgctcagaatgagacccggtccccgagccgaacgtatacgtacatcagtcggtag

SEQ ID NO: 228953 - DNA, 1533 bp, Artificial Sequence
  derived and/or modified sequence
atggaggatcagaacgaggacgagagcccgaagaagaacaccttatggcaaatatctaacgggacaagctctgtgatagtgtcaagaaaacggccaagtgaaggaaactaccagaaggagaaggatctgtgcataaaatacttcgaccagtggtcagaatccgaccaggttgagttcgttgaacatctgattagtaggatgtgtcactaccagcatgggcacataaacagctacttgaaacccatgctgcaacgtgacttcatcacggccctccccgaacagggcctagatcatatagcagagaacattctgagttatctggacgctagatctctgtgcgccgcagagctggtttgtaaggagtggcagcgcgtgatctctgaaggtatgttatggaagaaactcatcgaacgcatggtgcgaaccgaccctctgtggaagggcttgtctgagcgcagaggctgggatcagtacctcttcaaaaatcgcccaacagatgggcctcctaattcgttttataggtccctgtacccaaaaatcatccaggatattgagacgatcgagtcaaattggcgctgcgggaggcacaatcttcaaaggattcaatgcaggtccgaaaactcgaagggtgtttactgcctccagtatgacgacgaaaaaattattagtgggttgagggataattcgatcaagatttgggataaaacgtctctggaatgcctgaaagttctaacaggacatactggcagcgtcctctgcctgcaatatgacgagagagtgattgtcactggatcatccgacagcacagtgagggtttgggatgtcaacacaggcgaggtgctgaataccttgatccaccataacgaggctgtcttgcacctgagattttcgaacggcttaatggtcacatgttccaaagatcgctctatcgctgtgtgggacatggcaagcgctacagacatcacgctgaggcgggtgctggtgggtcatagggcggcagtaaatgtggtggatttcgacgataaatatatcgtttctgccagcggggatcggaccataaaagtttggagcaccagtacttgtgagtttgtgaggactctcaatgggcacaagagaggcatagcctgccttcaatatagggaccgcctggtggtgtccggcagcagcgacaatacaattcgcttgtgggatatcgagtgtggtgcttgtctccgcgtcctggaggggcatgaggagctggtgcggtgcattcgatttgataacaaacggatagtctctggggcatatgacgggaaaattaaggtctgggatcttcaagcggccctagatccgcgagcaccagcctcaaccctgtgtctcagaactctggtcgagcactccggccgggtgtttaggttgcagttcgacgagtttcagatcatttccagctcccatgatgatactatactgatttgggattttctgaacgtaccaccatctgcacagaacgagacccgctctccatcaaggacttacacatacattagccgctag

SEQ ID NO: 228954 - DNA, 1590 bp, Artificial Sequence
  derived and/or modified sequence
atggagccagattctgtgattgaggacaagaccatcgagctgatgaacacctctgtgatggaggaccagaatgaagatgagagccccaagaagaacaccctgtggcagatcagcaatggcaccagctctgtgattgtgtccaggaagaggcccagcgagggcaactaccagaaggagaaggacctgtgcatcaagtactttgaccagtggagcgagagtgaccaggtggagtttgtggagcacctgatcagcaggatgtgccactaccagcacggccacatcaacagctacctgaagcccatgctgcagagggacttcatcacagccctgcctgagcagggcctggaccacatcgccgagaacatcctgagctacctggatgcccggagcctgtgtgccgctgagctggtgtgcaaggagtggcagagggtcatcagcgagggcatgctgtggaagaagctgattgaaagaatggtgaggacagaccccctgtggaagggcctgtctgaaagaagaggctgggaccagtacctgttcaagaaccggcccacagatggcccccccaacagcttctaccgcagcctgtaccccaagatcatccaggacatcgagaccatcgagagcaactggaggtgtggccgccacaacctgcagaggatccagtgccgctctgagaacagcaagggcgtgtactgcctgcagtatgatgatgagaagatcatcagcggcctgcgggacaacagcatcaagatctgggacaagaccagcctggagtgcctgaaggtgctgaccggccacactggatctgtgctgtgcctgcagtatgatgagagggtcatcgtgacaggcagcagtgacagcacagtgcgggtgtgggatgtgaacacaggagaggtgctgaacaccctcatccaccacaatgaagctgtgctgcacctgcgcttcagcaatggcctgatggtgacctgcagcaaggacaggagcattgctgtgtgggacatggccagcgccacagacatcaccctgcggcgggtgctggtgggccacagagctgctgtgaatgtggtggactttgatgacaagtacatcgtgtctgccagcggggacaggaccatcaaggtgtggagcaccagcacctgtgaatttgtgaggaccctgaatggccacaagaggggcatcgcctgcctgcagtacagagaccggctggtggtgtctggcagcagtgacaacaccatccggctgtgggacattgaatgtggggcctgcctgcgggtgctggagggccacgaggagctggtgcgctgcatccgctttgacaacaagagaattgtgtctggggcctatgatggcaagatcaaggtgtgggacctgcaggccgccctggacccccgggccccagccagcaccctgtgcctgcggaccctggtggagcacagcggccgggtcttccggctgcagtttgatgagttccagatcatcagcagcagccatgatgacaccatcctgatctgggacttcctgaatgtgccccccagcgcccagaatgagaccaggagccccagcaggacctacacctacatcagcaggtag

SEQ ID NO: 228955 - DNA, 1533 bp, Artificial Sequence
  derived and/or modified sequence
atggaggaccagaatgaagatgagagccccaagaagaacaccctgtggcagatcagcaatggcaccagcagcgtcatcgtgtccaggaagaggccttctgagggcaactaccagaaggagaaggacctgtgcatcaagtactttgaccagtggagcgagagtgaccaggtggagtttgtggagcacctgatcagcaggatgtgccactaccagcacggccacatcaacagctacctgaagcccatgctgcagagggacttcatcacagccctgcctgagcagggcctggaccacatcgccgagaacatcctgagctacctggatgcccggagcctgtgtgccgctgagctggtgtgcaaggagtggcagagggtcatcagcgagggcatgctgtggaagaagctgattgaaagaatggtgaggacagaccccctgtggaagggcctgtctgagcggcggggctgggaccagtacctgttcaagaaccggcccacagatggcccccccaacagcttctaccgcagcctgtaccccaagatcatccaggacatcgagaccatcgagagcaactggaggtgtggccgccacaacctgcagaggatccagtgccgctctgagaacagcaaaggagtgtactgcctgcagtatgatgatgagaagatcatcagcggcctgcgggacaacagcatcaagatctgggacaagaccagcctggagtgcctgaaggtgctgaccggccacacaggctctgtgctgtgcctgcagtatgatgagcgggtgattgtgacaggcagcagtgacagcacagtgcgggtgtgggatgtgaacacaggagaggtgctgaacaccctcatccaccacaatgaggccgtgctgcacctgcgcttcagcaatggcctgatggtgacctgcagcaaggacaggagcattgctgtgtgggacatggccagcgccacagacatcaccctgcggcgggtgctggtgggccacagagctgctgtgaatgtggtggactttgatgacaagtacatcgtgtctgccagcggggacaggaccatcaaggtgtggagcaccagcacctgtgaatttgtgaggaccctgaatggccacaagaggggcatcgcctgcctgcagtacagagaccggctggtggtgtctggcagcagtgacaacaccatccggctgtgggacattgaatgtggggcctgcctgcgggtgctggagggccacgaggagctggtgcgctgcatccgctttgacaacaagagaattgtgtctggggcctatgatggcaagatcaaggtgtgggacctgcaggccgccctggacccccgggccccagccagcaccctgtgcctgcggaccctggtggagcacagcggccgggtcttccggctgcagtttgatgagttccagatcatcagcagcagccatgatgacaccatcctgatctgggacttcctgaatgtgcccccatctgcccagaatgagaccaggagccccagcaggacctacacctacatcagcaggtag

SEQ ID NO: 228956 - DNA, 1590 bp, Artificial Sequence
  derived and/or modified sequence
atggagcccgacagcgtgatcgaggacaagaccatcgagctgatgaacacctctgtaatggaggatcagaacgaagacgagtcacctaagaagaataccctttggcaaattagtaatgggacatcgagtgtcattgtttctcgaaaacggcccagtgagggaaattaccaaaaagagaaggacctctgtattaaatattttgatcagtggagcgagagcgatcaggtcgaatttgtcgagcacctgatcagtaggatgtgccattatcaacacgggcacataaacagctacctcaaaccaatgcttcagcgtgattttatcacagctttgcctgagcagggccttgatcacattgcggagaatattctatcctatctggatgctcgttccctgtgcgctgccgaactggtctgtaaagaatggcagagggttatttcggagggcatgctgtggaaaaaactaattgaacggatggtccgaactgatcctctgtggaaagggctcagtgagagaagggggtgggaccagtacctgttcaaaaatcgccccaccgacgggccccccaactcattttataggtccttgtaccccaagatcattcaggatatcgagaccatcgaatccaattggcggtgcggaaggcataatctacaaagaattcagtgccgctccgagaacagcaaaggtgtgtattgcctgcagtacgatgatgagaagattatctccggacttcgtgacaattcaatcaaaatttgggataagacctcactggaatgccttaaggtactaacaggtcatacgggcagcgttctgtgtctacagtatgacgaaagggtgattgtgacgggcagttctgattcaaccgtgcgtgtgtgggatgtgaacacgggtgaggtcctgaacaccctgattcaccacaacgaggcagttctgcacctgcgtttctcaaatggacttatggtgacatgctctaaagaccgaagtatcgccgtgtgggatatggcgtccgcaaccgatatcaccttaagacgcgttctcgttgggcatagggctgctgtcaatgttgtggattttgatgataagtacatagtcagtgcctctggagacaggactattaaggtgtggtctacttcgacttgcgagttcgtcagaacgctgaacggccataagcgggggatcgcatgtttacagtatcgcgaccggctcgtggtttctgggtcctcggataacaccataaggctttgggatatcgagtgtggcgcttgcctccgggtgctggagggccatgaagagttggtccgatgtattcgcttcgacaataagaggatagtttccggagcgtacgatggtaagataaaggtgtgggacctacaggcagcgttggacccccgcgcgccggcttccaccctgtgcctcagaaccctcgtggagcactcgggaagggtctttcggttgcagtttgatgagttccagattatctcgtcctcccatgacgacactattctaatctgggacttcctcaatgtgccccctagcgcgcagaacgagactcgcagtccatctcgaacttacacctacatctctcgatag

SEQ ID NO: 228957 - DNA, 1533 bp, Artificial Sequence
  derived and/or modified sequence
atggaggaccagaacgaggacgagagccccaagaagaacaccctgtggcagatcagcaacgggacgtcgtcggtcatcgtgtctagaaagcgcccatctgaggggaattaccagaaagagaaagacctctgcatcaaatactttgatcagtggtccgaatctgatcaagttgaatttgtcgaacatctcatttctagaatgtgccattaccagcatggtcatattaactcatacctgaagccaatgctgcagagagactttatcaccgctctaccagaacaaggcctcgaccacatcgctgagaacattctatcctatctggacgctcggtccctgtgtgcggcagagcttgtgtgcaaggagtggcaacgggtgatttccgaagggatgttatggaaaaaacttatcgaaagaatggttaggacagacccactgtggaagggcttaagcgagcgtcgaggatgggaccagtacctttttaagaatcgtcctacagacggcccccctaacagcttttataggagcctgtaccctaaaatcatccaggatattgagaccatcgaatccaactggaggtgtggaagacacaatctgcagagaattcagtgccggagtgaaaactccaaaggcgtgtactgtctgcagtacgacgacgagaaaatcataagtggcctgagggacaattcaatcaagatctgggacaagacatctctggaatgtttgaaggtgctaacagggcacaccggatctgttctgtgcttgcagtacgacgagcgagtcatcgtgacaggaagctcagattccacggtgagggtctgggacgtcaatactggggaggtgttaaacactctgattcaccataatgaggcggtactacacctccgtttctcaaatgggctgatggttacgtgctcgaaagatcggtcgatcgcagtgtgggatatggcttccgctaccgatatcactctgaggagagtactggtgggccacagagcagcagtgaacgtcgtggacttcgacgacaagtacattgtctctgcatctggcgataggaccatcaaggtttggtccacgtccacatgcgagttcgttcggacattgaatggccacaagcgcggcattgcctgcctgcaatatcgcgataggcttgtggtgagtggatcttcagacaatacaatccgtttatgggatattgagtgtggggcctgtcttcgcgtgttagagggccacgaagaactcgtacggtgcattagatttgacaacaagaggatcgttagcggtgcctatgacggaaagatcaaggtttgggatctccaggccgctctggatcccagggcgccggcctccactctgtgcttgcgaactctcgtggaacacagcgggagagtattcaggctgcagttcgacgaatttcaaatcatctcttctagtcacgacgacactatcttaatatgggatttcctgaacgtgccaccctctgcacagaacgaaacacggtcacctagtcggacctatacctacatttccagatag

SEQ ID NO: 228958 - DNA, 1590 bp, Artificial Sequence
  derived and/or modified sequence
atggagcctgattccgtaatcgaggacaagacaattgagctgatgaatacatctgtaatggaggaccagaatgaagatgaatcccccaagaaaaataccctgtggcaaatctctaatggcacgagcagtgtgatcgtgtccaggaagaggcccagcgaaggtaactaccagaaggagaaggacctgtgtatcaaatattttgaccagtggtccgaatcagatcaggtggagttcgtagagcacctgatttcaaggatgtgtcattaccagcatggccatatcaattcttacctgaagcccatgcttcagcgtgacttcattactgccctacctgagcagggcctggaccatatcgctgagaacatcctgagttacctggacgcccgatccctttgcgccgcagagctggtgtgtaaagagtggcaaagggtgatttcggaaggcatgctctggaagaaattaatagaacgcatggtaagaacagatccactgtggaagggactgtcagagcggaggggctgggatcagtatttgtttaagaatcgccctacggatggcccacccaactctttttatcgtagtctgtatcccaaaataatacaggacatcgagactatcgaaagtaactggcgatgcggaaggcataatttgcagcggattcagtgtcgctcagaaaactctaaaggtgtttactgtctgcaatacgacgacgaaaagataataagtggcctgcgggacaattcgattaaaatctgggacaaaaccagcctggaatgcctgaaagtcctaactggccacaccggcagcgtgctatgccttcagtatgacgagagggtcatcgtcacaggaagctccgatagcaccgtgcgcgtatgggatgtaaacaccggggaggttctcaacacactgatccaccacaatgaggcagtgctgcatctgcggttttccaatggtctgatggtaacatgctccaaggaccggtccatcgccgtatgggacatggcctctgctaccgatattaccctgcggagagtactagtcggccatcgagccgctgttaatgtcgtcgactttgatgataagtatatagtgtctgcatccggagacagaacaattaaagtgtggagtacttctacgtgcgaattcgttcgaacattaaacggacataaacgaggcatagcatgcctgcagtacagagatcgcttggtggttagcggaagctctgataatacgatacgactgtgggacattgagtgtggcgcatgcctgagggtgctggaaggacacgaggaactggtcaggtgcattaggttcgacaataagaggatcgtgtccggggcatacgacggcaaaatcaaggtgtgggacttacaagcagctttggacccaagggcacctgcctctacactgtgccttagaactctggtagagcatagcgggagagtttttcgcctgcaatttgacgaattccagatcatcagcagttcccatgacgacacaatcttgatctgggacttcctcaacgtaccacctagtgcacagaacgagacacgcagtccttcccggacatacacgtacatctctcgctag

SEQ ID NO: 228959 - DNA, 1533 bp, Artificial Sequence
  derived and/or modified sequence
atggaagaccagaacgaagatgaaagtcctaaaaaaaacacactctggcagatctccaacggaacctcttcggtcatcgtgtcccgcaaaaggccctcagagggcaattaccagaaggagaaagacttgtgtattaagtactttgaccaatggtcagaatccgaccaggtcgaatttgtggaacacctgatcagtaggatgtgccactatcagcatggtcacatcaattcctacttaaagcctatgctgcagagagattttattacggcgctgcccgaacagggactagatcacatagctgagaatatcctttcctacctggatgcccgaagcttatgcgcagccgaactcgtgtgtaaggaatggcagcgagtaataagcgagggcatgctgtggaaaaaattaatcgagcgcatggtgcgcacggaccctctgtggaagggattgtcagaacggagaggctgggaccagtacctctttaagaacaggcctaccgacggcccacctaactcattctataggagcctctacccaaaaatcattcaggacatcgagactatcgagagcaactggagatgcgggaggcataatttgcagaggatacagtgtcggagcgaaaactcgaagggagtctattgcctgcaatatgacgacgagaagattatctccggtctcagggataactcgatcaagatttgggataagacaagccttgagtgtttgaaggttttaaccggacatactgggtctgtcttgtgcctacagtacgacgaaagggttattgtgacagggtccagtgacagcacagtgcgagtctgggacgtgaacactggagaagtcctcaacacattaattcatcacaacgaggccgtcctgcaccttcggttttctaatgggctcatggtgacctgcagcaaggatagaagcatcgcggtttgggacatggcgtcagcaactgatatcactctcaggcgggtcttagtcggtcatcgggcagctgtgaatgtggtcgattttgatgacaagtatatcgtgtcagcctctggagaccgtacaattaaagtgtggagcacttcaacatgcgaatttgttcgcactctaaatgggcacaagagaggaatcgcctgccttcaatatcgggatcgtctcgtggtctctggcagctccgacaataccatcaggctgtgggatatagaatgcggagcctgcctcagagtgctggaggggcacgaggagctcgtccgctgcattagattcgataacaagaggatcgtgagtggggcatacgacggaaagattaaagtttgggacctacaagctgctctggatcccagggcccctgcctcgacactctgtttacggactctggtggagcactccgggagagttttcaggctccagtttgacgaatttcagataatttcatcttcccacgatgacaccatcctgatctgggattttctgaatgtcccaccctccgcacagaatgaaactagatcacctagtcgaacttatacatacataagtaggtag

SEQ ID NO: 228960 - DNA, 1590 bp, Artificial Sequence
  derived and/or modified sequence
atggagcccgacagcgtgatcgaggacaagaccatcgagctgatgaacaccagcgtgatggaggaccagaacgaggacgagagccccaagaagaacaccctgtggcagatcagcaacggcaccagcagcgtgatcgtgagcagaaagagacccagcgagggcaactaccagaaggagaaggacctgtgcatcaagtacttcgaccagtggagcgagagcgaccaggtggagttcgtggagcacctgatcagcagaatgtgccactaccagcacggccacatcaacagctacctgaagcccatgctgcagagagacttcatcaccgccctgcccgagcagggcctggaccacatcgccgagaacatcctgagctacctggacgccagaagcctgtgcgccgccgagctggtgtgcaaggagtggcagagagtgatcagcgagggcatgctgtggaagaagctgatcgagagaatggtgagaaccgaccccctgtggaagggcctgagcgagagaagaggctgggaccagtacctgttcaagaacagacccaccgacggcccccccaacagcttctacagaagcctgtaccccaagatcatccaggacatcgagaccatcgagagcaactggagatgcggcagacacaacctgcagagaatccagtgcagaagcgagaacagcaagggcgtgtactgcctgcagtacgacgacgagaagatcatcagcggcctgagagacaacagcatcaagatctgggacaagaccagcctggagtgcctgaaggtgctgaccggccacaccggcagcgtgctgtgcctgcagtacgacgagagagtgatcgtgaccggcagcagcgacagcaccgtgagagtgtgggacgtgaacaccggcgaggtgctgaacaccctgatccaccacaacgaggccgtgctgcacctgagattcagcaacggcctgatggtgacctgcagcaaggacagaagcatcgccgtgtgggacatggccagcgccaccgacatcaccctgagaagagtgctggtgggccacagagccgccgtgaacgtggtggacttcgacgacaagtacatcgtgagcgccagcggcgacagaaccatcaaggtgtggagcaccagcacctgcgagttcgtgagaaccctgaacggccacaagagaggcatcgcctgcctgcagtacagagacagactggtggtgagcggcagcagcgacaacaccatcagactgtgggacatcgagtgcggcgcctgcctgagagtgctggagggccacgaggagctggtgagatgcatcagattcgacaacaagagaatcgtgagcggcgcctacgacggcaagatcaaggtgtgggacctgcaggccgccctggaccccagagcccccgccagcaccctgtgcctgagaaccctggtggagcacagcggcagagtgttcagactgcagttcgacgagttccagatcatcagcagcagccacgacgacaccatcctgatctgggacttcctgaacgtgccccccagcgcccagaacgagaccagaagccccagcagaacctacacctacatcagcagatag

SEQ ID NO: 228961 - DNA, 1533 bp, Artificial Sequence
  derived and/or modified sequence
atggaggaccagaacgaggacgagagccccaagaagaacaccctgtggcagatcagcaacggcaccagcagcgtgatcgtgagcagaaagagacccagcgagggcaactaccagaaggagaaggacctgtgcatcaagtacttcgaccagtggagcgagagcgaccaggtggagttcgtggagcacctgatcagcagaatgtgccactaccagcacggccacatcaacagctacctgaagcccatgctgcagagagacttcatcaccgccctgcccgagcagggcctggaccacatcgccgagaacatcctgagctacctggacgccagaagcctgtgcgccgccgagctggtgtgcaaggagtggcagagagtgatcagcgagggcatgctgtggaagaagctgatcgagagaatggtgagaaccgaccccctgtggaagggcctgagcgagagaagaggctgggaccagtacctgttcaagaacagacccaccgacggcccccccaacagcttctacagaagcctgtaccccaagatcatccaggacatcgagaccatcgagagcaactggagatgcggcagacacaacctgcagagaatccagtgcagaagcgagaacagcaagggcgtgtactgcctgcagtacgacgacgagaagatcatcagcggcctgagagacaacagcatcaagatctgggacaagaccagcctggagtgcctgaaggtgctgaccggccacaccggcagcgtgctgtgcctgcagtacgacgagagagtgatcgtgaccggcagcagcgacagcaccgtgagagtgtgggacgtgaacaccggcgaggtgctgaacaccctgatccaccacaacgaggccgtgctgcacctgagattcagcaacggcctgatggtgacctgcagcaaggacagaagcatcgccgtgtgggacatggccagcgccaccgacatcaccctgagaagagtgctggtgggccacagagccgccgtgaacgtggtggacttcgacgacaagtacatcgtgagcgccagcggcgacagaaccatcaaggtgtggagcaccagcacctgcgagttcgtgagaaccctgaacggccacaagagaggcatcgcctgcctgcagtacagagacagactggtggtgagcggcagcagcgacaacaccatcagactgtgggacatcgagtgcggcgcctgcctgagagtgctggagggccacgaggagctggtgagatgcatcagattcgacaacaagagaatcgtgagcggcgcctacgacggcaagatcaaggtgtgggacctgcaggccgccctggaccccagagcccccgccagcaccctgtgcctgagaaccctggtggagcacagcggcagagtgttcagactgcagttcgacgagttccagatcatcagcagcagccacgacgacaccatcctgatctgggacttcctgaacgtgccccccagcgcccagaacgagaccagaagccccagcagaacctacacctacatcagcagatag

SEQ ID NO: 228962 - protein, 508 aa, Artificial Sequence
  derived and/or modified sequence
MEPDSVIEDKTIELMISNGTSSVIVSRKRPSEGNYQKEKDLCIKYFDQWSESDQVEFVEHLISRMCHYQHGHINSYLKPMLQRDFITALPEQGLDHIAENILSYLDARSLCAAELVCKEWQRVISEGMLWKKLIERMVRTDPLWKGLSERRGWDQYLFKNRPTDGPPNSFYRSLYPKIIQDIETIESNWRCGRHNLQRIQCRSENSKGVYCLQYDDEKIISGLRDNSIKIWDKTSLECLKVLTGHTGSVLCLQYDERVIVTGSSDSTVRVWDVNTGEVLNTLIHHNEAVLHLRFSNGLMVTCSKDRSIAVWDMASATDITLRRVLVGHRAAVNVVDFDDKYIVSASGDRTIKVWSTSTCEFVRTLNGHKRGIACLQYRDRLVVSGSSDNTIRLWDIECGACLRVLEGHEELVRCIRFDNKRIVSGAYDGKIKVWDLQAALDPRAPASTLCLRTLVEHSGRVFRLQFDEFQIISSSHDDTILIWDFLNVPPSAQNETRSPSRTYTYISR

SEQ ID NO: 228963 - DNA, 2181 bp, Artificial Sequence
  derived and/or modified sequence
gagggcggagctgccggcggcccgggcgggctggcagctagagtgggtgcgatagccgcctccgcctctgccgcctccgccgtcgcctcctccgcccgggccgttcgctgctgcgcggggagagcgaggcggggccgccggggccgccatggagcccgactcggtgattgaggacaagaccatcgagctcatgataagtaatggaacatcatctgtgatcgtctccagaaagaggccatcagaaggaaactatcaaaaagaaaaagacttgtgtattaaatattttgaccagtggtctgaatcagatcaagtggaatttgtggaacatcttatttcacgaatgtgtcattatcagcatggacatattaactcttacctgaagcccatgttgcagcgggactttattaccgctttaccagagcaaggcttagatcacatagcagaaaacattctttcgtacctggatgccaggtctctgtgtgcagcagagctggtatgtaaagaatggcagcgagtgatctcagaaggaatgctttggaagaagctgattgaacgaatggtacgcactgatcccctatggaaaggactttcagaaagaagagggtgggatcagtacctgtttaaaaacagacccacagatggccctccaaattcattttataggtcattatacccaaagattatccaggatatagagactatagaatctaactggcggtgtggacgacacaacttgcagaggattcagtgccgctctgaaaatagtaaaggtgtctactgtttacagtacgatgatgaaaaaattatcagtggcctacgagataattctattaagatatgggataaaaccagcctggaatgtttgaaagtgttaacaggacacacaggctctgtcctctgtctgcagtatgatgagcgtgtcattgtaactggctcttcagattctacggtgagagtgtgggatgtgaacacgggtgaagttcttaacacattgatccaccacaatgaggctgtattgcacttacgcttcagcaatggactgatggtgacctgttccaaggaccgctccattgctgtgtgggacatggcttctgcgaccgacatcactttacgccgtgtcctggttggccaccgggctgccgtcaatgtagtagactttgacgacaagtacatcgtgtctgcctctggtgacaggaccatcaaagtctggagcacgagcacctgtgaatttgttcgtactctcaatgggcacaagcggggcattgcctgtctccagtacagggatcgcctggttgttagtggatcatcagataataccattaggctctgggatattgaatgtggtgcctgtttaagagtcctagagggacatgaagaattggtccgatgcatccggtttgataacaagaggattgtcagtggggcctatgatgggaaaattaaagtttgggacttgcaagctgctcttgaccctcgagccccagcaagcacattgtgtttgcgcacattggtggaacattctggacgtgtgtttcggctccagtttgatgagtttcagatcatcagcagctcccatgatgacactattttgatttgggatttcttaaatgtgcctcccagtgcccagaatgagacccgttctccctccagaacatacacttacatctctagataacagtctgcactttcacccgtttcagggttttctagtcttgaactactggctacgtggctaccaaatgcctaagggagttcgttcacagctgagttatgaagctggaattggttctagacgctgggtagatgcaaagcagcctaactcttcaagtaccgacatttctcacctctgattccggctctcctttgagaaggagaccttagcttccccggcttcaagtagaacagaagcccgtttccttccctcatcagtgaaaaaatctaatgtttcaaatgtaaattgttcatagaaaaggaacatagaatctgttttacagaagtaaatcgaccgtcaagagaagacttggcctctaatttatattgctttgcactttggtttgatattaagaaacagcattcttcttcagtgaaattttgggtgccaaacacctacccagaatgtccagggctttcattttcaaaagttagcattctccttttgaccgtccaagtcattatgaattc

SEQ ID NO: 228964 - DNA, 1527 bp, Artificial Sequence
  derived and/or modified sequence
atggaacccgacagcgtgatagaggacaaaacgatagagttgatgattagcaacggaacatcctctgtgatcgtgtcacgcaaaagaccatcagaggggaactatcagaaagaaaaggacctttgtattaagtatttcgatcagtggagcgaaagcgaccaggttgagttcgtggagcaccttatctctaggatgtgtcattaccaacatggccacattaacagctatttgaagccaatgttgcagcgggactttatcacagccctgccagagcagggacttgaccatatagccgagaatatattgtcttacctggacgcccggtctctttgtgcagctgaactggtctgcaaagaatggcagcgggtgattagcgagggtatgctgtggaaaaagctgatcgagaggatggtgcggacagatcccttgtggaaggggcttagcgagaggcgaggctgggaccagtacctgtttaagaatcgaccgactgatggcccccccaattctttttaccgctctttgtaccctaagataattcaggatatcgaaacaatagaaagcaattggcgctgcggtaggcacaatctgcagaggatccaatgtaggtcagaaaatagtaagggggtgtattgtctccagtatgatgacgagaaaattataagcggcctgcgagataacagcattaagatctgggacaagaccagtctggaatgcctgaaggttttaaccggtcacacaggctctgtactatgtttacagtacgacgagcgtgtcatcgttaccggatcttcagatagcacggttagggtatgggatgtgaacaccggagaagttttgaacacactgatccatcataatgaagcggtacttcatcttaggttttcgaacggcctgatggtcacttgtagtaaggacagatcaattgccgtgtgggatatggcctccgctaccgacatcaccctccgaagggtgctcgtgggacatcgcgctgctgttaacgttgtggacttcgatgacaagtacattgtgtccgccagcggagaccgcacaattaaagtgtggtcgacatctacgtgtgaatttgtacggacgctaaacgggcataaaagaggcattgcatgtttacagtatcgggacagactggtggtttctggcagttccgataacactatacggctgtgggatattgagtgtggggcatgcctccgggttttggaggggcatgaagagctagtccggtgcatcagatttgacaacaagcgcatcgtctcaggcgcttacgatggaaaaatcaaggtgtgggaccttcaggcagctctggacccccgcgcccctgcttctacattgtgtctccggaccctcgtggaacattcaggcagagtatttagactgcagtttgacgagttccagatcatttcaagctcccatgacgataccattctgatttgggacttcctgaatgtgccaccctctgctcagaatgaaacgcggtccccttcacgcacctacacgtacatcagcaggtag

SEQ ID NO: 228965 - DNA, 1527 bp, Artificial Sequence
  derived and/or modified sequence
atggagccagattctgtgattgaggacaagaccatcgagctgatgatcagcaatggcaccagcagcgtcatcgtgtccaggaagaggccttctgagggcaactaccagaaggagaaggacctgtgcatcaagtactttgaccagtggagcgagagtgaccaggtggagtttgtggagcacctgatcagcaggatgtgccactaccagcacggccacatcaacagctacctgaagcccatgctgcagagggacttcatcacagccctgcctgagcagggcctggaccacatcgccgagaacatcctgagctacctggatgcccggagcctgtgtgccgctgagctggtgtgcaaggagtggcagagggtcatcagcgagggcatgctgtggaagaagctgattgaaagaatggtgaggacagaccccctgtggaagggcctgtctgagcggcggggctgggaccagtacctgttcaagaaccggcccacagatggcccccccaacagcttctaccgcagcctgtaccccaagatcatccaggacatcgagaccatcgagagcaactggaggtgtggccgccacaacctgcagaggatccagtgccgctctgagaacagcaaaggagtgtactgcctgcagtatgatgatgagaagatcatcagcggcctgcgggacaacagcatcaagatctgggacaagaccagcctggagtgcctgaaggtgctgaccggccacacaggctctgtgctgtgcctgcagtatgatgagcgggtgattgtgacaggcagcagtgacagcacagtgcgggtgtgggatgtgaacacaggagaggtgctgaacaccctcatccaccacaatgaggccgtgctgcacctgcgcttcagcaatggcctgatggtgacctgcagcaaggacaggagcattgctgtgtgggacatggccagcgccacagacatcaccctgcggcgggtgctggtgggccacagagctgctgtgaatgtggtggactttgatgacaagtacatcgtgtctgccagcggggacaggaccatcaaggtgtggagcaccagcacctgtgaatttgtgaggaccctgaatggccacaagaggggcatcgcctgcctgcagtacagagaccggctggtggtgtctggcagcagtgacaacaccatccggctgtgggacattgaatgtggggcctgcctgcgggtgctggagggccacgaggagctggtgcgctgcatccgctttgacaacaagagaattgtgtctggggcctatgatggcaagatcaaggtgtgggacctgcaggccgccctggacccccgggccccagccagcaccctgtgcctgcggaccctggtggagcacagcggccgggtcttccggctgcagtttgatgagttccagatcatcagcagcagccatgatgacaccatcctgatctgggacttcctgaatgtgcccccatctgcccagaatgagaccaggagccccagcaggacctacacctacatcagcaggtag

SEQ ID NO: 228966 - DNA, 1527 bp, Artificial Sequence
  derived and/or modified sequence
atggagcccgacagcgtgatcgaggacaagaccatcgagctgatgatctcgaatggtacctcctctgtaattgtatctcgaaaaagaccttcagagggtaactatcagaaagagaaggatctgtgtatcaagtatttcgaccaatggagtgaaagtgaccaggtggagtttgtcgagcacctcatttcaaggatgtgtcactaccagcacggtcatataaactcatatctcaaacccatgcttcaaagagacttcatcacagctctgccagagcaaggcttagaccatattgccgaaaatattctgtcataccttgatgctcggtcgctctgcgccgccgagcttgtgtgtaaagagtggcagagagtgatctcagagggaatgctgtggaagaagctcattgaaaggatggttaggacggatccactgtggaaagggctctctgagaggaggggttgggatcagtatcttttcaagaatagacctacagatggcccgcccaactcattttatagaagcctgtatcccaaaatcattcaggacatagaaactatcgagagcaattggcgatgcggaagacacaacctacaacgcatacagtgccgctcagaaaatagcaaaggagtctactgtctgcagtacgacgatgagaaaatcatcagcggcctgcgggacaactctattaagatctgggataaaacatccctcgaatgcctcaaagtgctgaccggacacaccgggtcagttctgtgcctgcagtacgatgagagagtaattgtgactggctccagtgactccactgtccgagtttgggacgtcaatacgggggaggtgctgaacacactcattcaccataacgaggccgtgttgcacctcaggttcagcaacggtctcatggtgacgtgtagtaaggacaggagtatagcagtctgggatatggcgtcagcaaccgacatcacgctccgccgggtactggtagggcacagggctgctgtgaatgtggtggattttgacgacaaatatattgtgtccgccagcggagaccgtaccatcaaagtgtggtccaccagcacttgcgaattcgttcggactcttaacggacacaagagagggatagcttgcttacagtatcgcgatcgcctggtagtgagcggaagttctgacaatacgatacgactgtgggacatcgagtgcggagcctgtctgcgagttctcgagggtcacgaagagttggttcggtgcatccgatttgataacaaaaggatcgtttcaggggcttacgacggcaagatcaaggtctgggacctccaggcagcactggaccccagagctcccgcttcaacactgtgcctccgcaccctcgtagaacatagcggccgggtgttcagactgcagttcgacgaatttcagataatctctagttcccacgacgacaccattctcatatgggattttttaaacgtccctccgtctgcccagaacgaaacccgctcaccctctcgcacctacacttacataagcaggtag

SEQ ID NO: 228967 - DNA, 1527 bp, Artificial Sequence
  derived and/or modified sequence
atggaaccggattcagttattgaggacaagactattgagctgatgataagtaacggtacctcatccgtgattgtctctaggaaaaggccgagcgaggggaactaccagaaggagaaggacctctgtattaaatacttcgaccagtggagcgaatcagaccaggtggagttcgttgagcatctgatatctcgaatgtgccattatcaacatggtcatatcaactcataccttaaaccaatgctgcagcgagatttcattacagcacttcctgagcagggtctggatcatattgccgagaacatcctgtcttacctggacgcacgctcactgtgtgctgcagaactagtttgcaaggaatggcaaagagttatatctgaagggatgctgtggaagaagctcattgagcgcatggtgcgtacagatcccctctggaagggcctgtccgaaagacgtggctgggatcagtacctgttcaagaacaggccaacagacggcccacccaactctttctaccggagtctgtatccaaagattattcaggatatagaaactatcgaatcgaactggcggtgtgggaggcacaatcttcagagaatccagtgtcgcagcgaaaattctaaaggagtctattgtctgcagtatgatgatgagaaaattatttccggtctgagagataacagcattaagatatgggataaaacctctctggagtgcctcaaagtcctgacaggccatacagggagtgtgctctgcctgcagtacgacgagcgcgtgattgtcaccggaagcagtgactctactgtgagggtgtgggacgtgaatactggcgaggtgttgaacacactgattcaccataacgaggcagtgctgcatttacgcttctcaaatgggctgatggttacttgctccaaggatcggtccatcgcagtctgggatatggcatccgccacagatattacgctgcgtcgggtactggtagggcacagggcagctgtgaacgtggttgatttcgacgacaagtacattgtgtcagcatctggggatagaacaatcaaggtttggtctaccagcacttgcgaattcgtgaggaccctgaatggtcacaagcggggaattgcctgcttacagtaccgggacaggttagttgtgtccggaagctccgacaacaccattagactgtgggacatagagtgtggcgcttgcctgagagtgctagagggacacgaagaacttgtccggtgtataaggttcgacaacaaaaggatagtgtccggcgcatacgatggcaagattaaagtgtgggatctgcaggctgccctagacccacgtgcgcctgcttccaccctctgcctaagaaccctggtagaacatagcggacgggttttccgcctgcagttcgacgagttccagatcatctcgtccagccacgatgacaccatcctgatttgggatttcctgaacgtccctccaagtgctcagaacgagacccggagcccaagcaggacctacacgtatattagccggtag

SEQ ID NO: 228968 - DNA, 1527 bp, Artificial Sequence
  derived and/or modified sequence
atggagcccgacagcgtgatcgaggacaagaccatcgagctgatgatcagcaacggcaccagcagcgtgatcgtgagcagaaagagacccagcgagggcaactaccagaaggagaaggacctgtgcatcaagtacttcgaccagtggagcgagagcgaccaggtggagttcgtggagcacctgatcagcagaatgtgccactaccagcacggccacatcaacagctacctgaagcccatgctgcagagagacttcatcaccgccctgcccgagcagggcctggaccacatcgccgagaacatcctgagctacctggacgccagaagcctgtgcgccgccgagctggtgtgcaaggagtggcagagagtgatcagcgagggcatgctgtggaagaagctgatcgagagaatggtgagaaccgaccccctgtggaagggcctgagcgagagaagaggctgggaccagtacctgttcaagaacagacccaccgacggcccccccaacagcttctacagaagcctgtaccccaagatcatccaggacatcgagaccatcgagagcaactggagatgcggcagacacaacctgcagagaatccagtgcagaagcgagaacagcaagggcgtgtactgcctgcagtacgacgacgagaagatcatcagcggcctgagagacaacagcatcaagatctgggacaagaccagcctggagtgcctgaaggtgctgaccggccacaccggcagcgtgctgtgcctgcagtacgacgagagagtgatcgtgaccggcagcagcgacagcaccgtgagagtgtgggacgtgaacaccggcgaggtgctgaacaccctgatccaccacaacgaggccgtgctgcacctgagattcagcaacggcctgatggtgacctgcagcaaggacagaagcatcgccgtgtgggacatggccagcgccaccgacatcaccctgagaagagtgctggtgggccacagagccgccgtgaacgtggtggacttcgacgacaagtacatcgtgagcgccagcggcgacagaaccatcaaggtgtggagcaccagcacctgcgagttcgtgagaaccctgaacggccacaagagaggcatcgcctgcctgcagtacagagacagactggtggtgagcggcagcagcgacaacaccatcagactgtgggacatcgagtgcggcgcctgcctgagagtgctggagggccacgaggagctggtgagatgcatcagattcgacaacaagagaatcgtgagcggcgcctacgacggcaagatcaaggtgtgggacctgcaggccgccctggaccccagagcccccgccagcaccctgtgcctgagaaccctggtggagcacagcggcagagtgttcagactgcagttcgacgagttccagatcatcagcagcagccacgacgacaccatcctgatctgggacttcctgaacgtgccccccagcgcccagaacgagaccagaagccccagcagaacctacacctacatcagcagatag

SEQ ID NO: 228969 - protein, 785 aa, Artificial Sequence
  derived and/or modified sequence
MKLGKVEFCHFLQLIALFLCFSGMSQAELSRSRSKPYFQSGRSRTKRSWVWNQFFVLEEYMGSDPLYVGKLHSDVDKGDGSIKYILSGEGASSIFIIDENTGDIHATKRLDREEQAYYTLRAQALDRLTNKPVEPESEFVIKIQDINDNEPKFLDGPYTAGVPEMSPVGTSVVQVTATDADDPTYGNSARVVYSILQGQPYFSVEPKTGVIKTALPNMDREAKDQYLLVIQAKDMVGQNGGLSGTTSVTVTLTDVNDNPPRFPRRSYQYNVPESLPVASVVARIKAADADIGANAEMEYKIVDGDGLGIFKISVDKETQEGIITIQKELDFEAKTSYTLRIEAANKDADPRFLSLGPFSDTTTVKIIVEDVDEPPVFSSPLYPMEVSEATQVGNIIGTVAAHDPDSSNSPVRYSIDRNTDLERYFNIDANSGVITTAKSLDRETNAIHNITVLAMESQNPSQVGRGYVAITILDINDNAPEFAMDYETTVCENAQPGQVIQKISAVDKDEPSNGHQFYFSLTTDATNNHNFSLKDNKDNTASILTRRNGFRRQEQSVYYLPIFIVDSGSPSLSSTNTLTIRVCDCDADGVAQTCNAEAYVLPAGLSTGALIAILACVLTLLVLILLIVTMRRRKKEPLIFDEERDIRENIVRYDDEGGGEEDTEAFDMAALRNLNVIRDTKTRRDVTPEIQFLSRPAFKSIPDNVIFREFIWERLKEADVDPGAPPYDSLQTYAFEGNGSVAESLSSLDSISSNSDQNYDYLSDWGPRFKRLADMYGTGQESLYS

SEQ ID NO: 228970 - DNA, 2358 bp, Artificial Sequence
  derived and/or modified sequence
atgaaactgggcaaggtggagttctgccactttcttcagcttatcgctctctttctgtgtttttccggaatgtcccaggccgagctgagtcgcagtcgtagcaagccttatttccagagcggcaggtctcgtactaaaagatcttgggtgtggaatcagttttttgtgctcgaggaatatatgggcagtgacccactatatgtgggaaaactgcatagcgacgtggacaaaggggatggtagtattaaatacatactcagcggcgagggggcgtcatctatcttcatcattgatgagaacacaggcgatattcatgctactaaacggctagaccgcgaggagcaggcatactatacactcagggcccaggctcttgacagattaactaataaacccgtcgagcctgagtccgagttcgtcataaaaatacaggatataaacgacaacgaacccaagtttctggatggcccttacactgccggggtgcctgaaatgtctccggttggcacctcagtcgtccaggtgacagctaccgatgccgatgaccccacctatggaaattctgcgcgggtagtttactccattttgcaaggtcagccttattttagcgtggagcctaagaccggcgtaatcaaaaccgctctgcccaatatggaccgcgaagcgaaagaccagtacttacttgtgatccaggctaaggacatggtgggacagaacggcgggctgagcggcacaaccagcgtgaccgtcaccctcaccgacgtgaatgacaatccccctagattcccacggcggagttaccaatataatgtgcctgagagtcttcccgtggcctcagtggtagctcgcatcaaagccgcagatgctgatattggcgccaacgcagagatggagtacaaaatcgtcgacggcgatggcctgggcatctttaagatctctgtggataaagagacccaagagggcatcatcactattcagaaggaactggattttgaggcaaagactagttatacgctgagaatcgaagcagccaacaaagatgcagatccaaggttcctgagcctaggcccattcagcgacactaccacagtcaaaattatcgtggaggacgttgatgagccccctgttttcagcagtcctctgtaccctatggaggtttctgaggctactcaggttggtaatatcataggaacggtggccgcccacgaccctgactcctcgaactctcccgtgcgttattccattgatcgcaataccgacctggagcggtatttcaatatcgacgcgaactccggcgtcatcactactgctaaatcactggatagagaaacgaatgcaatacacaatatcaccgtgcttgccatggaatcccagaaccctagtcaggtaggacggggatacgtagccattactatcctggacattaacgacaacgctccggagttcgcgatggattatgagaccacagtttgcgaaaatgcacaaccgggtcaggtgatacagaaaatttccgcagtggataaggatgagccttccaatggtcatcagttctacttctctctgaccaccgacgccactaataaccacaacttctcactgaaggacaacaaagataacaccgcctcaatactcacacggcgaaacggattcaggagacaggagcaaagcgtctattacctcccgatctttatcgtagatagcggcagtccttctctttcatccacaaacactttgacaatccgtgtctgcgattgtgatgctgatggagtggctcagacatgtaatgcagaagcctatgtgttgcccgccggcctgtctacaggtgcattgatagcaatactggcctgtgtgctcacgcttctggtgttgatactgctcatcgtgactatgaggcggagaaaaaaggagcccctgatttttgacgaggaacgggacatccgggagaatatagtcagatatgacgacgaaggaggcggggaggaagacacggaggcattcgatatggcagccctgaggaatttaaatgtaatacgtgacaccaagaccagaagagacgtcactccagaaatccaatttctgtctcgcccagcatttaagagtattccagataatgtgatcttccgagaatttatctgggagcgtctgaaagaggctgatgtcgacccgggcgctcctccatacgactcactccaaacctatgcatttgagggaaatggcagcgtcgcagagtccctgtcaagtctggattccatcagtagtaacagtgaccagaactatgactacctctccgattggggtccccggttcaagcgtctcgcagacatgtatggcacaggtcaggaatcattgtattcttag

SEQ ID NO: 228971 - DNA, 2358 bp, Artificial Sequence
  derived and/or modified sequence
atgaagctcggaaaagtcgagttctgccacttcttgcagctgatcgccttatttctctgtttcagcggtatgtctcaggctgagctttctagaagccgatcaaaaccttatttccaatctggcaggtctaggaccaagagaagttgggtgtggaaccagttcttcgtgttagaggaatacatgggaagcgaccctctttacgttgggaagttgcactccgacgtcgataagggggacggctcgattaagtatatactcagcggcgagggcgcctcttccattttcatcattgacgagaataccggcgacatacacgccaccaagagacttgatcgcgaggaacaggcctactacaccttaagggcccaggccctggatcggttgacaaataagcccgtcgaaccagaaagtgagttcgtgattaagatccaggatattaatgacaacgaacctaaattcctcgacggaccctacacggctggcgtgccagagatgtccccagtgggcaccagtgttgttcaggtcactgcaaccgacgccgacgatccaacttacggtaatagcgctcgggtggtttactcaattttacagggtcaaccctatttttcagtggagcccaagaccggagtgatcaaaactgccctgccaaacatggatagggaggcgaaagatcaataccttttagtcatccaggccaaagatatggtcggtcaaaacggcgggttatcagggacaaccagcgtgactgtgacactcacagacgtcaatgacaacccgcctcggtttccccggcgatcttaccagtataacgtcccagagtctctgccagttgcaagcgtggtggcgagaattaaggccgccgatgcagatatcggcgccaatgccgaaatggagtataaaattgtcgacggtgacggcttaggcatttttaagatcagtgtggacaaagagactcaggaaggcattatcacaatccaaaaggagctggattttgaggctaagacgagttacacactcaggatagaagcagctaataaggacgccgaccctaggtttctatctctggggccattctccgatactactacagtgaagattattgtggaagacgttgacgaacctccagtctttagcagccccttgtatcccatggaggtgagtgaggccactcaggttggtaacatcatcggcactgtagctgctcatgatccggattcctctaactcccccgtaagatactccatcgacaggaacacggatcttgagaggtattttaacatcgatgcaaattccggagtcatcacaacagctaagagcctcgaccgagaaactaacgctatccataacattaccgtactcgctatggagagccagaacccgtcgcaggtgggacgagggtatgtggctatcaccatcttggatattaacgataacgctcccgagttcgccatggattatgagacaacagtttgtgagaacgcgcaacctggccaggtgattcaaaagattagcgccgtcgataaggacgagcccagtaacggccaccagttttatttcagcctgactaccgatgcgactaataatcacaattttagcctgaaagataacaaagataatactgcctctattctcaccagacggaacgggtttcgcagacaagaacagtcggtatattacctgcccatcttcatcgtcgattccggatccccctcattgagctctacaaacaccctgaccatacgggtctgcgactgtgacgccgatggcgtcgcacagacctgtaatgccgaggcctacgtgctgccagctggcctgtcgaccggagctctcatcgcaatactcgcctgcgttttaaccttgctggtgttgatcctgttgattgtcaccatgcggcgaagaaaaaaggagcctcttatattcgacgaggaacgggatatcagggagaacatcgtgcgctacgatgacgaaggggggggagaggaggacacagaggctttcgacatggcggccctccgcaaccttaatgtcatccgagataccaagactcggcgagatgtcacccccgagattcagttcctgagtagacctgctttcaagtccattcccgataacgtgatatttagggagttcatctgggagaggcttaaggaagccgacgtcgacccaggcgctcccccatacgattcccttcagacatatgcctttgaaggaaacgggtccgtagctgaaagcttgagtagtcttgactcaatcagcagtaacagcgaccagaattatgactatctgtcggactggggccctcgttttaaacgactggccgatatgtacgggacagggcaggagagtctctattcctag

SEQ ID NO: 228972 - DNA, 2358 bp, Artificial Sequence
  derived and/or modified sequence
atgaaactcggcaaggtagagttctgtcattttttacaactgatagccctcttcctctgcttctcagggatgtcccaggcagagttgtcacgctccagatccaaaccctattttcagagtggtcgctcgaggactaagagaagctgggtctggaatcaattcttcgttcttgaggagtacatggggtcggacccattgtatgtcggaaagcttcattcggacgttgacaaaggcgacgggagcatcaaatacattctctctggggagggtgcttcttctattttcattatcgacgaaaacactggggacatccatgccactaaaaggctggacagggaagagcaggcatactatactttacgcgcacaagctctggatagactcacaaataagcccgtggaacctgaaagcgaattcgtaataaaaatccaagatattaatgacaacgagccaaagtttctcgatgggccctacaccgcaggggtgcctgagatgtcaccagtgggaacctctgtggtccaggtgaccgctaccgatgcggacgatcccacatacggaaacagtgcacgggtcgtctacagtatcctccaaggtcagccctatttctctgttgagcccaagacaggcgtgatcaagactgccctccccaacatggacagagaggctaaggaccagtatctgctggtgatccaggcaaaggatatggtggggcagaatggcggcctgtccggcacaacctctgtgaccgtgaccctgactgatgtgaatgataatccaccaaggtttccaaggcgaagttatcagtataacgtcccagagtcacttcccgtggcttctgtggttgcccggatcaaggctgccgacgcggatatcggggctaatgccgagatggagtacaagattgtagatggggacggactggggatcttcaaaatctccgtggacaaagagacccaagaaggcataattactatacagaaggagctggatttcgaggctaagacatcctatactctgagaattgaggctgcgaataaggatgcagacccccgcttcctgagcctgggacctttttccgacaccactactgtgaaaatcatcgttgaggatgtggacgagcctcctgtattcagttctcccctgtatccgatggaggtctccgaggccacacaggttggtaacattataggaacagttgccgcgcatgatccagatagcagtaatagcccagtcagatatagcattgacagaaataccgatctggaacggtattttaatattgatgccaattccggggttatcactacggcaaagagcctagatagagaaacaaatgccattcataacattacagtgctggctatggagtcccagaacccgagccaggtcgggagaggatatgtggcaattaccatacttgatattaacgataatgcgccagaatttgcgatggactacgagactacagtgtgcgaaaacgctcagcctggacaggtgattcagaaaattagtgcagtcgataaagatgagccaagcaatggtcaccagttctatttttcattaacaactgacgccacaaataaccataatttcagtctgaaagacaataaggacaatactgcctccatcctgacccggcgtaacgggttcagacgccaggaacaaagcgtgtactatctgcccatctttatcgtagactcaggctctcccagtctttcttcaactaacactctgaccatccgagtgtgcgactgtgacgcggacggtgttgcccagacctgtaacgccgaggcttatgttctgcccgctggactgagtaccggagccctgattgccattttagcctgcgtgcttactctgttggtgctcattctgttgatcgtgaccatgcgcagacggaagaaggaacccttgattttcgacgaggaacgggatattagggagaatattgtgagatatgacgacgaggggggaggggaggaggataccgaagcgtttgatatggccgcccttcgtaatcttaacgtgatccgagacacgaagactcggagggatgttactcctgagattcagttcctaagccgaccagcgtttaagtccattcccgataatgtcattttcagagagttcatctgggagagactgaaagaggccgacgtcgacccaggcgccccaccttatgatagtttgcagacatatgcctttgaaggaaatgggagcgtggccgagagcttgagcagtttggacagtatcagctctaacagcgaccagaattatgactatctttccgactgggggcctcgctttaagcggcttgccgatatgtatggcactggacaggaaagcctgtacagctag

SEQ ID NO: 228973 - DNA, 2358 bp, Artificial Sequence
  derived and/or modified sequence
atgaagctgggcaaggtggagttctgccacttcctgcagctgattgccctcttcctgtgcttcagcggcatgagccaggccgagctgagccgcagccgcagcaagccctacttccagagcggccgcagcaggaccaagaggtcctgggtgtggaaccagttctttgtgctggaggagtacatgggcagtgaccccctgtatgtgggcaagctgcacagtgatgtggacaagggagatggcagcatcaagtacatcctgtctggagagggcgccagcagcatcttcatcattgatgaaaatactggagacatccacgccaccaagaggctggaccgggaggagcaggcctactacaccctgcgggcccaggccctggaccggctgaccaacaagcctgtggagcctgagagcgagtttgtgatcaagatccaggacatcaatgacaatgagcccaagttcctggatggcccctacacagctggggtgcctgagatgagccctgtgggcacctctgtggtgcaggtgacagccacagatgctgatgaccccacctacggcaacagcgcccgggtggtgtacagcatcctgcagggccagccctacttctctgtggagcccaagacaggagtcatcaagacagccctgcccaacatggaccgggaggccaaggaccagtacctgctggtgatccaggccaaggacatggtgggccagaatggaggcctgagcggcaccacctctgtgacagtgaccctgacagatgtgaatgacaaccccccacgcttcccccggcgcagctaccagtacaacgtgcctgagagcctgcctgtggcctctgtggtggcccgcatcaaggctgctgatgctgacattggagccaatgctgagatggagtacaagatcgtggatggagatggcctgggcatcttcaagatctctgtggacaaggagacccaggagggcatcatcaccatccagaaggagctggactttgaggccaagaccagctacaccctgagaattgaagctgccaacaaggatgctgacccccgcttcctgagcctgggccccttcagtgacaccaccaccgtgaagatcatcgtggaggatgtggatgagccccctgtgttcagcagccccctgtaccccatggaggtgtctgaggccacccaggtgggcaacatcatcggcaccgtggccgcccatgaccctgacagcagcaacagccctgtgcgctacagcattgacaggaacacagacctggagcgctacttcaacattgatgccaacagcggggtcatcaccacagccaagagcctggaccgggagaccaatgccatccacaacatcaccgtgctggccatggagagccagaaccccagccaggtgggccggggctacgtggccatcaccatcctggacatcaatgacaatgcccctgagtttgccatggactatgagaccaccgtgtgtgaaaatgcccagcccggccaggtgatccagaagatctctgctgtggacaaggatgagcccagcaatggccaccagttctacttcagcctgaccacagatgccaccaacaaccacaacttcagcctgaaggacaacaaggacaacacagccagcatcctgaccaggagaaatggcttccggcggcaggagcagagcgtgtactacctgcccatcttcatcgtggacagcggcagccccagcctgagcagcaccaacaccctgaccatccgggtgtgtgactgtgatgctgatggagtggcccagacctgcaatgctgaggcctacgtgctgcctgctggcctgagcactggagccctgattgccatcctggcctgtgtgctgaccctgctggtgctgatcctgctgattgtgaccatgagaagaaggaagaaggagcccctcatctttgatgaggagcgggacatccgggagaacatcgtgcgctatgatgatgaaggaggaggagaggaggacacagaggcctttgacatggccgccctgaggaacctgaatgtcatccgggacaccaagaccaggagagatgtgaccccagagatccagttcctgagcaggcctgccttcaagagcatcccagacaacgtcatcttccgggagttcatctgggagcggctgaaggaggctgatgtggaccccggggccccaccctatgacagcctgcagacctacgcctttgagggcaatggatctgtggccgagagcctgagcagcctggacagcatcagcagcaacagcgaccagaactatgactacctgagtgactggggcccccgcttcaagaggctggccgacatgtatggcaccggccaggagagcctgtacagctag

SEQ ID NO: 228974 - DNA, 2358 bp, Artificial Sequence
  derived and/or modified sequence
atgaagctgggcaaggtggagttctgccacttcctgcagctgatcgcactttttttgtgcttctccggaatgagccaagccgaattaagtcgctccaggtccaaaccttacttccaatctggccgctcacgtacaaaaagaagttgggtgtggaatcagtttttcgtgcttgaggagtacatggggagcgaccctctttacgtgggaaagctccactctgacgtagataagggggatggcagcatcaagtatatcctgtctggggagggtgctagctcaatttttataattgacgaaaacaccggcgatatccacgcaacaaagcgattggatcgcgaagaacaagcctattacacgctgcgggctcaggccctggatcggctgacgaacaagcccgtggagccagagtccgagtttgttatcaagattcaggacatcaacgacaacgaaccaaagttcttggacgggccctatactgccggcgtgccggagatgtctcccgtgggaaccagtgtggtccaagtaacggctactgacgcagacgatcccacctacggcaacagcgcacgggtcgtgtactctatcctgcaaggccagccgtacttttccgtggaacccaaaactggggtgattaagaccgcgttgcccaacatggatcgcgaggccaaggatcaatacctcctcgtgatacaagccaaggatatggtaggtcagaatggtggcttatcaggcactaccagcgtcaccgttactctcaccgacgtgaacgacaacccaccccgatttccacgacgctcctaccagtacaacgtcccagaatctcttcccgtagcaagtgtggtagcccgcattaaagccgctgatgcagatatcggcgccaacgccgagatggagtacaaaatagttgacggggatgggttgggcatcttcaaaatctctgttgataaggagactcaagagggaattataaccatccaaaaggagctagactttgaagccaagacatcgtacacactccggatagaggcagctaataaggatgccgacccccggtttttatccctgggacctttcagtgacactactacggtgaaaattatcgtggaagacgtagacgaaccacccgttttttcctctcctctgtaccctatggaagttagtgaggccactcaggtgggcaacatcatcggaaccgtggcagctcacgatccagactcttcaaactctcccgtgcgctattctatcgaccgaaacactgacttggaacggtatttcaacatagacgctaacagtggggtgatcactaccgcaaagtctctggacagggaaactaatgcaatccataatatcaccgtgcttgccatggagtcccagaatccttcccaggtgggacgagggtatgtcgccatcactatcctagatattaatgacaacgcccccgaatttgccatggactacgagacgactgtgtgcgagaacgcccagccaggtcaggtgattcagaagattagcgccgtggataaggacgaacctagcaatggtcaccagttttatttctcccttactactgacgctactaataatcataacttcagcctgaaagacaataaggacaacacggcgtccatcctcactcgtcggaacggtttccgacgccaggagcaatctgtatactatctccccatcttcatagttgactctggcagtccaagtctcagcagcacaaacaccctgactattcgggtgtgtgattgcgatgccgacggagtggctcagacatgtaatgccgaggcttatgtactgcctgcaggattgtccacgggcgccctgattgccattttggcatgcgtgctgactctactcgtacttatcctactgattgtgacaatgcggaggcgtaagaaagagcccctgatttttgatgaggagagggatatcagagagaacattgtaaggtacgacgatgaaggcggaggagaagaggacaccgaggcctttgatatggcagccttgcgcaacttaaatgtaataagagacactaaaacccgccgagacgttacacccgagattcaattcctgtctcgccccgctttcaagtcaattcctgacaatgtgatttttcgagaattcatttgggaacgccttaaggaagccgacgttgatcctggcgccccgccatacgacagcctgcagacttacgcttttgaagggaatggtagcgtcgccgagagtctgtcatcactcgattccattagttccaactcagatcaaaactatgattatttgtcagattggggcccacgatttaaaagactcgcagatatgtacggtacaggacaagaaagtttgtactcttag

SEQ ID NO: 228975 - DNA, 2358 bp, Artificial Sequence
  derived and/or modified sequence
atgaagctgggcaaggtggagttctgccacttcctgcagctgatcgccctatttttgtgttttagcggtatgagccaggcagagctgtccagatctaggagcaaaccttacttccagtctggcagaagtcggactaaaagatcttgggtctggaatcagtttttcgtgttggaggaatatatgggcagcgatcctctgtatgtggggaaacttcacagcgacgtggataagggcgacggttccatcaagtacatcttgtccggagaaggtgcttcttctatctttattatcgacgagaatacaggcgacattcacgccacgaaaagacttgaccgcgaggaacaagcgtattacactctccgcgcccaggcactggatcgtctgacaaacaagccagttgagcctgagtcggagttcgtaatcaagatccaggatataaacgataacgaaccaaagtttctggacgggccctatactgcaggtgtccccgagatgagtccagtgggaacatctgtggtacaggtaacagccactgacgcggacgaccccacatacggaaattcggccagggtggtttactcaatcctccaggggcagccctactttagtgtggagcctaagactggtgtcataaaaacagccctcccaaacatggaccgcgaggcaaaggaccaatatttgcttgtaattcaagcaaaagatatggtgggtcagaacgggggcctgtccggtaccacctccgtgacagtcaccctgacagatgtgaacgataatccgcccagattccctcggaggtcctaccagtataatgtgccagagagcctcccagtggcctccgtcgtggcacggatcaaggccgctgatgcggacattggggctaatgccgaaatggagtacaagatagtggatggggatggactaggcatctttaagatcagcgtagataaggagacccaagaagggattattaccatccaaaaggagttagatttcgaagctaagacgagttacacccttaggatagaggccgctaataaggacgcagacccgaggttcctgtctcttgggcccttctctgacacaactacagtgaagatcatcgtggaggacgtcgatgagccacccgttttttcatcaccattataccccatggaagtgtcagaggcaacccaggtgggtaacatcatcggcacggtggccgcacacgatccagacagttccaactctcccgttaggtattccatagacagaaataccgacctcgaaaggtattttaatatcgacgctaacagtggtgttatcaccaccgcgaagtctctggatcgagagacaaatgccatacacaatatcacagtactggccatggagtctcagaacccaagccaggtgggccgggggtacgtggctataaccatcctggatattaatgacaacgcacctgagtttgccatggattacgaaacgacagtgtgcgagaacgcacagcctggtcaggtgattcaaaagataagtgccgtggataaggacgagccgtccaacggccatcaattttatttttcccttacaacggatgcgactaacaatcacaatttcagtctcaaagataacaaggacaacactgcatcaatattaacacgtagaaatggctttcggcggcaagagcagagcgtgtattacttgcccatcttcatagtcgactctggaagccccagcctcagctccaccaacaccctgaccataagggtatgtgactgtgacgcggacggtgtagcccaaacctgcaacgccgaggcgtatgtcctgccagctgggttgagtacaggggccttaattgccatcttggcctgtgtcctcacgctgctggtcctcatcctcttaatcgtgactatgcgccgacgaaagaaggaacctctgatctttgatgaggaaagggacatcagagagaacattgtgaggtacgatgacgaaggcggtggtgaagaggatacagaagcgttcgacatggccgcccttcggaatctgaacgtgattcgagataccaagacccgccgggacgtaacccccgagatacagttcctctctagaccagcgtttaaaagtatcccagataacgtcatcttccgcgagtttatctgggaacgcctgaaagaggcagacgttgatccgggagctccaccctacgattctttacagacctacgctttcgaagggaacgggtcggtcgccgagtcgctgagctccttggacagtatatcaagcaattccgaccagaattatgattatctgtccgattggggtcctcgctttaaacgcctggcagacatgtatggtacggggcaagagtcgctgtactcctag

SEQ ID NO: 228976 - DNA, 2358 bp, Artificial Sequence
  derived and/or modified sequence
atgaagctgggcaaggtggagttctgccacttcctgcagctgatcgcccttttcctctgcttttctggtatgtcgcaggccgagttgtcacggtccaggtccaaaccatactttcaaagcggtcggtccagaaccaagcggagttgggtgtggaaccagttttttgtcctggaagagtacatgggaagcgatccgctgtatgtgggtaagctacatagtgacgttgacaagggtgatggatccatcaagtacatcctgtcaggggagggcgcaagtagcatcttcataattgacgaaaacaccggggacatccacgctactaaaaggctcgatagagaggagcaggcctattacaccttgcgcgcccaagcactagatagattgacgaacaaacccgtcgaacccgaatcagagttcgtgattaaaatccaggacatcaacgataacgagcccaagtttcttgacggcccatacaccgcaggtgtccctgaaatgagccccgtgggcacatcagtggtgcaggtcaccgccacagacgcggatgatcccacgtacggtaacagtgctcgcgtggtttactcgatccttcagggccagccatacttctccgtggaacccaagacaggcgtgatcaagacagctcttcctaatatggacagagaagccaaggatcagtatctcctggtgattcaggcaaaagatatggttggccagaatgggggattatccggcactacatctgtgacagtgacgctgacagacgttaacgacaaccctccgaggttccctcgccgtagctatcagtataatgtgcctgagtctctccctgtggcttccgtcgtcgctcgaataaaggcagccgacgcagatatcggggctaacgccgaaatggagtacaagatcgttgacggcgatggactaggcatattcaagatttccgttgacaaggagactcaggagggcattattaccatccaaaaagagctggatttcgaggcgaagacttcctacacccttcgaattgaggcagctaataaagacgccgacccccgctttcttagcctcggccccttcagcgatacaactactgttaagataatagtggaggacgtggatgaaccgccagtcttcagctcaccgctatacccaatggaggtgagtgaagcaactcaagtggggaatatcataggcacagtggcagcacatgatccagactcctccaacagccccgtaagatactccattgatcggaatacagatctagagaggtactttaacatcgatgccaatagtggagtgatcacgacggctaagtctttggacagagagaccaatgccatccacaatattaccgtgttagccatggaatcccagaacccctcccaggttgggagaggatacgtagctattactattctggatattaatgataacgcccctgagtttgctatggattatgaaactacagtctgcgaaaacgctcaacccggtcaggttatccagaagatttcagccgtggataaggacgagccctccaatgggcatcagttctatttttctcttactaccgatgccacgaacaaccacaacttctccttgaaagacaacaaagacaacacagcttctatcctcacgcggagaaacggctttcgcagacaggaacaatccgtgtattatttacccattttcatagtcgactctgggtccccctcactgtcgagtacgaatacacttaccatacgggtgtgtgattgcgacgccgacggagtagcccaaacctgcaacgccgaggcgtatgtgttaccagctggcctaagcacaggagcactcatcgctattttggcctgtgtcctaacgctgctcgtcctgattttactgatagtgacaatgcgacgccggaagaaggaacctctcatctttgacgaggaacgtgacattcgcgagaatattgtgcggtacgatgacgaaggggggggggaggaggatacggaggccttcgatatggcggcacttcgcaatttgaacgtgatacgagacacaaaaacgcgcagggacgtcactcctgagatccagttcctgtcaaggcccgcatttaaaagtatccccgataatgtcatcttcagagagtttatttgggaacgactcaaagaggccgacgtggaccccggcgcaccaccatatgactcgctgcagacctacgctttcgaaggcaacggaagtgtggcagagtctctgagtagcctggatagtattagcagtaactctgaccaaaattacgactatctctcggattggggcccaagattcaagaggttagccgatatgtacgggacaggccaggaatctttgtatagctag

SEQ ID NO: 228977 - DNA, 2358 bp, Artificial Sequence
  derived and/or modified sequence
atgaaactcggtaaagtggagttttgccactttctgcaactgatcgcgctatttctctgcttctctggtatgtcacaggctgagttgtcccgctctcgcagcaagccgtacttccagtctggtcgcagccgtactaagcgttcttgggtctggaaccaattctttgtgctggaggagtatatgggctctgaccctctctacgtcggaaaactgcactctgatgtggataaaggcgacgggagcattaagtatatcttgtctggcgagggagcttcctccatattcatcattgacgaaaacactggggatattcatgcaacgaagcgcctcgacagagaagaacaggcctactacactctgcgtgcgcaggccttggatcggctgactaacaaaccggtggagccggagtcggaattcgtaatcaaaatccaggatatcaacgacaacgagcccaaattccttgatggaccctataccgcgggtgtcccagagatgagtcctgtggggacctcggtagtccaggttaccgcaacggacgcagacgacccaacgtacgggaattcagcaagagtagtctactcaatcctgcagggtcagccgtatttctcagtggagcctaaaaccggtgtgattaagacagcgctgcccaatatggacagagaggccaaggaccagtacttactggtgattcaggctaaagacatggtggggcagaacggcggattgtcaggcacaaccagtgtgactgtgaccttaaccgatgtcaacgacaaccctccgcgattccccaggagatcctatcaatacaacgtgcctgagagtttgcctgttgcttccgtggttgctcgcataaaggccgcagatgctgacatcggcgcaaacgcggaaatggagtacaagattgtggacggcgatggcctgggtatttttaaaataagcgtggacaaagagacccaggaagggattatcaccatccagaaagagctcgacttcgaagcaaaaacctcctacacccttaggattgaagctgcgaataaagatgccgacccccgatttctgagtttgggtcccttctccgacactaccaccgtgaaaatcatagtggaagacgtagacgaacctccggttttttcctcacccctgtaccctatggaagtgagtgaggcgacgcaggtaggcaatatcatcggcaccgtagccgcacatgaccctgatagctctaactctccagtgcggtatagcatcgatcgcaacaccgatctggaacgctatttcaacattgatgccaattccggagtcataactaccgccaaaagcttggatcgcgagacaaatgcaatacacaatataaccgtgctggcaatggagtctcagaacccatcacaggtgggaaggggatacgtggccatcactatactcgatatcaatgacaatgcacccgaattcgccatggattacgagacgaccgtctgtgagaacgcccaacccggtcaggtgattcagaagatctccgctgtcgacaaagatgaaccctccaacggtcaccagttctacttctccctcactacagacgccaccaataatcacaatttctctctgaaggacaataaggataacactgcttcaatccttacaaggagaaacggcttcagaagacaggagcagagcgtctactacctcccaatcttcattgtggattcaggctcaccttcattatctagcactaacaccctcacaatcagggtgtgcgactgtgacgccgacggtgtggcccagacctgcaatgccgaggcatatgtgctacccgcaggtttatccacaggcgcactgatagctatcttagcgtgcgtactgacccttctggtccttatactcctgatagtgacgatgagacgacggaagaaggagcccctaatctttgatgaggagagagacatacgggaaaatatcgtgaggtacgacgacgaggggggaggtgaggaagacacagaggcctttgatatggcagcgctgcgaaacctgaacgtgatcagggatactaagactaggagggatgtgacgcccgaaatacagttcctcagcaggcccgctttcaagtctataccagataacgttattttccgtgagttcatatgggagaggctgaaagaagccgatgtggaccctggtgccccaccctatgacagcttgcagacctatgccttcgagggcaatggttctgtcgctgagagcctgtcttcactggacagcatttcctccaacagcgaccaaaactatgattatctgtctgactggggcccacgattcaaaaggctggctgatatgtatggcaccgggcaggaatccctttattcctag

SEQ ID NO: 228978 - DNA, 2358 bp, Artificial Sequence
  derived and/or modified sequence
atgaagctgggcaaggttgaattttgccatttcctccaactgattgcactgttcctgtgtttctccggcatgagccaggccgagctgtctaggagccgcagcaagccctatttccaatcaggccgttcgaggaccaaaaggagctgggtatggaaccagtttttcgttctcgaagagtatatggggagtgatcccctctacgtggggaagttacactcagacgtggataagggggacggttccattaagtacatcctctctggcgagggagcatcgtccatttttattatcgatgaaaataccggggatatccatgctacaaaacggcttgaccgagaggaacaagcctactacaccttgagggcccaagcactggaccgactaactaacaagccagtagaacccgagtccgaattcgttataaagatccaggacattaacgacaacgagccaaagttcctagatgggccatacaccgccggtgtcccagaaatgagtcccgtgggaacatccgtagtgcaagtcacagcaaccgacgcagacgacccaacatatggcaatagtgcgcgagtggtgtactctattctgcagggccagccctatttctccgttgaaccaaaaacaggcgttatcaagactgcactgcccaatatggatcgagaagctaaggaccaatacttactcgtcatacaggcaaaagacatggtgggccagaacggaggattatcaggaaccacgtcggtcaccgtcaccttgacggacgtgaacgacaatccaccccgattcccaagacgttcctaccagtataacgtgccagagtccctgccggtcgcctcagtagtcgctcggattaaggccgctgacgcagatattggagcgaatgccgagatggagtacaagatagtggacggtgatggtttaggaatttttaagatttccgtagacaaggaaacccaggaaggcataataactatacagaaggagttggacttcgaagccaagacatcatatacactgaggatcgaggccgctaacaaggatgctgatcccaggttcctttctctcggaccgttttccgacactaccactgtcaaaatcatcgtggaggacgtggatgagccacccgtctttagctcacccctgtatcccatggaagttagcgaggccacccaggtgggcaatatcatcggtaccgtggctgcccatgaccctgattctagcaactctcccgtgagatatagtatagataggaacaccgacctggagaggtacttcaatattgacgctaatagcggagtgattaccactgcaaagagcctagatcgcgaaacaaacgctatccacaatattacagtcctcgctatggagtctcaaaacccctcccaagttggcagaggctatgtggccatcactatcctagatataaatgacaatgcgccagaatttgccatggactatgagactaccgtgtgcgagaacgcccagcctggccaggttatccagaagatttcagctgtggacaaagacgagccatccaatgggcaccagttctatttctcactgaccactgatgcgactaataaccataatttctcgttaaaggataacaaggataacaccgcttcaatactgaccagacgaaatggatttagacgccaggagcagtcggtgtactaccttccgattttcatcgttgatagcggctctccctccctctccagtacaaacaccttaactatacgggtttgtgattgcgacgccgacggagtggcacagacgtgtaacgcagaagcctatgtgctgccggcaggtctgagcaccggcgcactgatcgcgatcctggcctgcgtgctcactcttctggtgctgatcttgttaatcgtgacaatgcgcagacggaagaaagagccgttaatcttcgacgaggagagagacatccgagaaaacatcgttagatacgatgacgagggcggtggcgaggaggacacagaagctttcgatatggcagccttgcgcaatctgaatgtgattcgggatacaaagactcgcagagatgttacaccagagattcagttcttatcacggcctgctttcaaaagtatcccagataatgttatcttcagagaatttatctgggagaggctgaaggaagcagatgtcgacccaggcgctcccccttatgacagcctacagacctacgccttcgagggaaacggctccgtcgctgagagtctctctagccttgattcaatatcgagcaacagcgatcagaactatgactacttatcagactggggcccacgttttaagcgtctggccgacatgtatggaacagggcaggaaagcctttactcatag

SEQ ID NO: 228979 - DNA, 2358 bp, Artificial Sequence
  derived and/or modified sequence
atgaagctcggcaaagtggagttctgccattttctgcaattgatagccctgtttttgtgttttagcggaatgtctcaagcagaactgtcacgctcaagaagtaaaccatatttccagtccggacggtctaggaccaagcggtcctgggtttggaaccaatttttcgtcctggaggaatatatgggatccgaccctctgtatgttggcaaacttcatagtgacgtagacaagggtgacggctctatcaaatacatcctgtctggggagggggcttcttcaatttttatcattgacgagaacacaggagacatccacgctacgaagcgattggaccgcgaggaacaggcttactacaccctgcgagcacaggccctggacaggcttacaaataagcccgtggaacctgaatccgagtttgtgattaagatccaggacatcaatgacaatgaaccaaagtttctggatggcccatatacggctggagtaccagaaatgagtccggtgggcacatccgtggtacaggttacagctactgatgccgacgatcctacttacggcaacagcgccagggtagtctacagcatactccaggggcagccttacttcagcgtggagcctaagacaggagttatcaagacagccctgcctaacatggacagggaagccaaagatcagtacttgcttgtgatccaggccaaggatatggtaggtcagaacgggggactctcaggaactactagcgtaacagtgaccctgacggatgttaatgataatccaccaagatttcctaggcgaagctatcagtacaatgtgcccgagtctctgcccgtggcgtctgtggttgccagaattaaggcagctgacgccgatattggcgcaaatgccgaaatggaatacaagatcgtggacggcgatggtctgggcatattcaagatatcagtggacaaggagactcaggaagggattattacaattcagaaggagctcgacttcgaggccaagacctcttacaccctgcggatcgaggccgctaataaagatgcagaccccaggttcctgtctttaggtccattcagtgacaccaccaccgttaaaataatcgtggaggatgtagacgagcctccagtgttcagttctccactgtacccaatggaagtgtctgaagctacccaggtgggcaatattattgggaccgtggctgctcacgatccggacagctccaatagtcccgtgaggtactccattgaccggaacaccgacttagagagatatttcaacattgatgccaactccggcgtcattacaaccgctaaatcgttagacagagaaactaacgctatccataacatcacagtgctggctatggagtcacaaaaccccagtcaagtaggtagaggttacgtagcgattactattcttgacattaacgacaacgcaccagaattcgcaatggattatgagacaactgtgtgtgaaaatgcccagccaggacaagtaatccaaaagatttctgccgttgataaggatgagccttcaaatgggcaccaattttatttcagcctgaccactgatgccaccaacaatcacaacttctcactcaaggataacaaggataacactgcctctatcctgacacgccgaaatggcttccggagacaagagcaaagtgtgtactatctccccatctttatcgttgattccggttctcctagcctcagtagtactaatacattaacgattcgagtctgcgattgcgacgctgacggggtggcgcagacatgtaacgctgaagcttacgtgctgcccgctggcctgtccactggagctctgattgcaatcctggcgtgtgtgctgactttgctggttctaatccttttgatagtgactatgcgtaggcgtaaaaaagaacccctgatctttgacgaagagcgggatatcagggagaacatcgtcaggtatgatgatgaggggggaggggaagaggacactgaggcgtttgacatggccgcactgcgcaatctgaatgttattcgcgatacaaaaactcgcagagacgtcacacctgagattcagtttctgagtcgcccagcgttcaagtccattccagacaatgtgatcttccgcgagttcatttgggagcggctgaaagaggcagatgtcgatccaggggcacccccttatgatagccttcagacctacgctttcgaaggtaacggctctgtcgcagagtccctttcgtccttggattctattagctccaactccgaccagaactatgactacttaagtgattgggggcctcgcttcaagcgcctggctgacatgtatggtacggggcaagaaagcttgtatagttag

SEQ ID NO: 228980 - DNA, 2728 bp, Artificial Sequence
  derived and/or modified sequence
ctagggcagtccgaggagattgaaagggcaaaactatcaagcaagaaaactgtaagttctgattagttttatgactttgccttcatgcctcaggagctcaactgatcacggctttcacgacaggctaaggtacttactacaccattctttggcgaaggctattcagcagtggtgacctcttccaatccaacactctacagattattatctctggactcccagctgacaccctgccggaggcaagagctactaagccaactggaactgtgccttttctcttgtcaaggtttttttcttacacaggaaaaagaaagaaaaaaaaaagatgaagttgggcaaagtggagttctgccattttctgcagctaatagctcttttcctgtgtttttctgggatgagtcaagcagaactctcaaggtccagatcaaagccctatttccaatcagggaggtcccggaccaagcgcagctgggtgtggaatcagttctttgtgctggaggaatacatgggttcagaccccctctatgtaggaaagcttcactctgatgttgataaaggagatggttccatcaaatacatcttgtcaggcgaaggggcaagttccattttcattattgatgagaacactggggatattcatgccaccaagagactggatcgtgaggagcaggcctactacacgctccgagctcaagcgctggataggctcaccaacaaacccgtggagcccgagtcggagtttgtcatcaaaattcaggatatcaacgacaatgaacccaaatttttggatggcccatacacggcaggagttcccgaaatgtctcccgtggggacctcagtggtacaagtgacagcgacggatgctgatgatcctacatatggcaacagtgccagagtggtctacagtattctgcaaggacagccgtacttctcagtggagccaaagacaggagtcatcaagactgcccttccaaacatggatagagaggctaaagaccagtatttgcttgtcattcaggcaaaggatatggttggtcaaaatggaggactgtcaggaactacatcagtcactgtgaccctaactgatgtcaacgataatccacctcgctttcctcgaaggtcttatcaatataacgtcccagagtcattacctgtagcctcagttgtggccagaattaaagctgctgatgcagatattggagctaatgctgaaatggagtacaagattgtggatggtgatggtttgggcatttttaagatttctgttgacaaagaaacccaggaaggaatcattactatacagaaggagctggattttgaagccaaaacaagttacacgctacggatagaagctgcaaataaagatgccgaccctcgctttctgagcttgggtccgttcagtgacacgacaactgtgaagataattgtggaagatgtagatgagccccctgtgttctcttcacccttgtaccctatggaggtgtcggaagctacccaggttgggaatatcattggcactgtagcagctcatgacccagattcttccaatagccctgtgaggtactcaattgacagaaacacagacttggagagatacttcaatattgatgccaacagtggggtcatcacaactgccaagtctttggatcgagagacaaatgctattcacaatatcacagtccttgcaatggagagccagaatccatctcaagtaggaagaggctatgtggccatcactatacttgacatcaatgataacgcccctgaatttgccatggactatgagaccaccgtctgtgaaaatgcccagccggggcaggttatccagaaaatcagtgctgtggataaagatgagccatccaatggacaccagttttacttcagcttaacaacggatgcaacaaataaccacaacttttcattgaaagataacaaagacaacacagcctcaatactgaccaggagaaacggcttccggagacaggaacaatcagtttactatctgccaattttcattgtggacagtggatctccctcacttagcagcaccaacaccctcaccatccgcgtgtgtgactgtgatgctgacggcgtagcccagacctgcaatgcagaggcctatgtcctacctgctggcctcagtacaggagccctgatagccatactcgcctgtgtcttgacattattggtgttgatcctccttatcgtcactatgagaagacggaaaaaagagccccttatttttgacgaagaaagagacatcagagaaaatattgtgagatacgatgacgagggcgggggagaggaggacacggaagcgtttgacatggctgcactgagaaacctcaacgtcatccgagacaccaagacccggagggatgtgactccagaaattcaattcctgagtcgaccagcttttaaaagcatcccagataatgtcatctttagggaatttatttgggaaagattaaaagaagccgatgttgatcctggtgctcctccttatgactccctgcagacatatgcttttgaaggaaatggctcagttgctgaatcactcagctctttagattccatcagctcaaactctgatcagaactatgactacctaagtgactggggacctcgctttaaacgactcgcggacatgtatgggactggccaagagagtttgtactcatagccttggaaccttaattcgaaatgtactgaagaaaaagtaacagca

SEQ ID NO: 228981 - DNA, 6834 bp, Artificial Sequence
  derived and/or modified sequence
gggcagggtccccgcgcaccgcggagtgggctgtgattggaggaggagcccgtgccgggcgggcccgagcgggtgtcgagccggttcctccagtctgccccgcgcgcggagctgcgcgcactgggtccccaagagcccgcgggcgtccggcagccgagcgcacgttctttcggatgcacacgcccgggtccctggcgtctgacgccgtggggagggcagcgaggccccagatgaagttgggcaaagtggagttctgccattttctgcagctaatagctcttttcctgtgtttttctgggatgagtcaagcagaactctcaaggtccagatcaaagccctatttccaatcagggaggtcccggaccaagcgcagctgggtgtggaatcagttctttgtgctggaggaatacatgggttcagaccccctctatgtaggaaagcttcactctgatgttgataaaggagatggttccatcaaatacatcttgtcaggcgaaggggcaagttccattttcattattgatgagaacactggggatattcatgccaccaagagactggatcgtgaggagcaggcctactacacgctccgagctcaagcgctggataggctcaccaacaaacccgtggagcccgagtcggagtttgtcatcaaaattcaggatatcaacgacaatgaacccaaatttttggatggcccatacacggcaggagttcccgaaatgtctcccgtggggacctcagtggtacaagtgacagcgacggatgctgatgatcctacatatggcaacagtgccagagtggtctacagtattctgcaaggacagccgtacttctcagtggagccaaagacaggagtcatcaagactgcccttccaaacatggatagagaggctaaagaccagtatttgcttgtcattcaggcaaaggatatggttggtcaaaatggaggactgtcaggaactacatcagtcactgtgaccctaactgatgtcaacgataatccacctcgctttcctcgaaggtcttatcaatataacgtcccagagtcattacctgtagcctcagttgtggccagaattaaagctgctgatgcagatattggagctaatgctgaaatggagtacaagattgtggatggtgatggtttgggcatttttaagatttctgttgacaaagaaacccaggaaggaatcattactatacagaaggagctggattttgaagccaaaacaagttacacgctacggatagaagctgcaaataaagatgccgaccctcgctttctgagcttgggtccgttcagtgacacgacaactgtgaagataattgtggaagatgtagatgagccccctgtgttctcttcacccttgtaccctatggaggtgtcggaagctacccaggttgggaatatcattggcactgtagcagctcatgacccagattcttccaatagccctgtgaggtactcaattgacagaaacacagacttggagagatacttcaatattgatgccaacagtggggtcatcacaactgccaagtctttggatcgagagacaaatgctattcacaatatcacagtccttgcaatggagagccagaatccatctcaagtaggaagaggctatgtggccatcactatacttgacatcaatgataacgcccctgaatttgccatggactatgagaccaccgtctgtgaaaatgcccagccggggcaggttatccagaaaatcagtgctgtggataaagatgagccatccaatggacaccagttttacttcagcttaacaacggatgcaacaaataaccacaacttttcattgaaagataacaaagacaacacagcctcaatactgaccaggagaaacggcttccggagacaggaacaatcagtttactatctgccaattttcattgtggacagtggatctccctcacttagcagcaccaacaccctcaccatccgcgtgtgtgactgtgatgctgacggcgtagcccagacctgcaatgcagaggcctatgtcctacctgctggcctcagtacaggagccctgatagccatactcgcctgtgtcttgacattattggtgttgatcctccttatcgtcactatgagaagacggaaaaaagagccccttatttttgacgaagaaagagacatcagagaaaatattgtgagatacgatgacgagggcgggggagaggaggacacggaagcgtttgacatggctgcactgagaaacctcaacgtcatccgagacaccaagacccggagggatgtgactccagaaattcaattcctgagtcgaccagcttttaaaagcatcccagataatgtcatctttagggaatttatttgggaaagattaaaagaagccgatgttgatcctggtgctcctccttatgactccctgcagacatatgcttttgaaggaaatggctcagttgctgaatcactcagctctttagattccatcagctcaaactctgatcagaactatgactacctaagtgactggggacctcgctttaaacgactcgcggacatgtatgggactggccaagagagtttgtactcatagccttggaaccttaattcgaaatgtactgaagaaaaagtaacagcaaaaaataaaataaaatgaaataaaataataaaccactacatacagaaaacaagaactccccttgctggagacagatggttgtaaatatttctccatttttaattgtttagatttctgccttggtgaggcatatcttcattagacttatctaaaggactgcactgaccacagactctgagcatttgaaggttttttgataaaaataaatgctcagtggtttgtgaatagatagcaactctcatatacctgcaaaggcaccaaacctctatgagaaagtagtgccctgtgttgtcagtgagtcaaagatgccctgtacataccttcatggtactgtcattgagaggaatagaacatgatgagctattgaaaaaccctggaacttgttgcatatcaaaacttgggacaaatttaatttacagagatgcttatagcttactatattatagaatccaacagaattatgttgctcttgattaacagaaatattttatttaggaatatataaattcccagaaattccttcctaactgaaaaccctaccacaaaagccagtaaaatttagtttaaggcaatataaaccattgtttatccaataaattatgaagtgttccaaataagaaaaaggtaaataatttgatagttttgagatgcttgtgtaggtatgataaaaaaaaaagttgctgtctgttcattgatttttattatctcttctgatttgtacaggagaatatcttttcttttttatttgacacatggtgttgtatttattttggagctccaatctccactaaattcaggtccatcatactgcctcatagtattaaactcatcagaacatgctgatttttctccagcccgagctacatgaaggaaatgaagcatggaaatggagaactaatagtaaagcaattgagccctgttgcaggtcacatctcaaagaggagcacagctacaaggacatataaattgttcttctgagccattagaatgtcaaaacattggaataaaatatttgtattttagaaagacttcagagagaattgagattttctttgatgcaagaattatttttcaagatcatgagttctacatgctccaaagacgatttcaagaacacaacctttcttgctgcaaacctattgagtaaaatattgagtttttaaaagtcttaatataatgttataaaaattaaaatccatctttaaattctgatgcaaatatgtccctcaagaattaaccaagcaatgtatgatttctgtgtggtttagatgtgccaaaggaaggaaggcaattgcaagtcatcatgtgtttaagtttgagttgagcttgttagagtatgactttcatgaccaaaatgatgtttctacctattatttttcctagattaatactagtttaatgtgcatatacattcaagtaagaatggatttattttttccttcctttctccttttaaaaataattcattgttgggttcctaatacatttacagatagtaaacactgtgtagagaatcatgttctaaaagtgctttttgaaaggtagacagtggaattagaatattaatatgttgattacacaaagaagaactatgtaggattctgtaaacttgcagcccaactttagaaatgaagtatgtaaaagtggccttcaacttcataagtataaataatccaataaatttcattacctgcaaacagttctttaatttgaatagagttttgtagacattgttttatgactatatagatatgcttcttgctgtattaatatgcatatatattttaaaaaattataacagtgaaagatactgttcataacttttaatcacacatgcaagtttttcaaactaaaaaataacaaacaaacaaaaaaacacgcgtatttacccagttcaataaaatcagagtgtggtgcaggaattacagagttgttaagtcagcaaggtgctgagaaaacagtttgtaataatccccttgttgtctgcaagaagatgaaatagtttagtacatttggatgatgtcaaaactgctgattgttgcacataccactaaacggaggtgtggatgtattttagaaaaggaacacacatcattcaccctgctttttctgcttttaaaatgtgtgttttttctcattaattttttcaaatggttaccaatgatagattggaaaaagaaaggttcatgtttaaataataatttaaaattattgcatatacccaattgctatttatgtgtggatgattatatgaatacagtattacatttcattcagtggtattttttaattaaaaaaattaatttaaaaaattaatttttgagatggctggaagaatgttcctaatataggtagtatttatatgaagtattctaagcttaattgtaatagtagtaaattttttgccgttgcttattttagttttcttttttcttctgaaatctaatgctatatatgatgactgtcaatacttgagatataggctttgttttaaaaacagtgattgaagagctgattgataaaattaatattaagtctagttggaaaattctccaaatatgatttaaataaatatatattatcaagttgcttaaattcagtattatactgaaaccaactagaatgagctcacaggaactaattcttcatatctcttcccaactccaggtacagtgatatcattttggtaggttgatgtcagccttggtgggattatttagaccacaacagtaatcagcaaacactacccttttctctggagaacaagttgttaaacatttaccagcactctactgcttaaattattttataaaatgaaatgtcataattgtaaatatagtatgaatttatatgatttaaaataatgacatgaaaggaatttatgctatattttactactaaataacaatgtatgtggtagtgatttcctgaagtgaaatccttggagctacttgtagacagggagaggagtcacttctttatggaaaacaatggctaaatttcaagtagagataatagttcaggaagtcaatatatttaattattttccacttgtccatacaggagcatcaatagaaactcagggtttgccaaattatgcccattttgaacagtttaatttattgaaaaatcagatgcattttacttcttactgtctatgtcaaggaaatacacccaagcccttaatctgaattgtcaccattgcattattaaaaatcaacataaaaatataaaaatcaaatcttaaggaaatggatttctggagatcaagcctaaattatcaatctcaattcacaaattagtctctgaaagaaatattccaagatcagccagctaaggaacaaaatcaggaaagagacatcaataaaaaattaggtagtaatttgcaggcaataagtagatttttgatttttctacaagcaatcaccagatctgggatctggtaaatgtctttatttgccaggaagctctgctgatgactacaattgaggttagttgtctacaagatacatgcaggaggtagtagtggttaagtaatggtagctgccttttcactctgccctctgaggaagttttaaattattttatcttcatgcacaattacatttactacattggatggtagacataggcaattattttcatgtcaacggcatagttacacaatgtaggaatgatatttgtgaagtgatccacatgcccaagaaatgcaaatgcaaatagtgttgttagcatttatattgaaatataaaatctaaagcagcttaaaataagctaagctaaacaaactgcaagaagctaaatgatttaaacatgttaaagttttaaagcactagctgtaaatattaatcttcagattttcaatttaacatgtattcacttacaaactgttctaataataacactaattattttccaagtcaccatttaaagttttatttacagttgacctaatccaattgaagttgatgaaagcttcaacttattttttaactctttctggtccacgatgcctggaggcaagtgaaatatatatgacaaataatagataaaccaatttattttctgttagtgtatgtttattttttaattattaataatgtatattgtgtgtatatatgacggtgtatgaaagttggcaatgaaagctaatacaatcatgttagtcggctggatataataaagaacaagaaaggaataa

SEQ ID NO: 228982 - DNA, 2812 bp, Artificial Sequence
  derived and/or modified sequence
gggcagggtccccgcgcaccgcggagtgggctgtgattggaggaggagcccgtgccgggcgggcccgagcgggtgtcgagccggttcctccagtctgccccgcgcgcggagctgcgcgcactgggtccccaagagcccgcgggcgtccggcagccgagcgcacgttctttcggatgcacacgcccgggtccctggcgtctgacgccgtggggagggcagcgaggccccaggtacttactacaccattctttggcgaaggctattcagcagtggtgacctcttccaatccaacactctacagattattatctctggactcccagctgacaccctgccggaggcaagagctactaagccaactggaactgtgccttttctcttgtcaaggtttttttcttacacaggaaaaagaaagaaaaaaaaaagatgaagttgggcaaagtggagttctgccattttctgcagctaatagctcttttcctgtgtttttctgggatgagtcaagcagaactctcaaggtccagatcaaagccctatttccaatcagggaggtcccggaccaagcgcagctgggtgtggaatcagttctttgtgctggaggaatacatgggttcagaccccctctatgtaggaaagcttcactctgatgttgataaaggagatggttccatcaaatacatcttgtcaggcgaaggggcaagttccattttcattattgatgagaacactggggatattcatgccaccaagagactggatcgtgaggagcaggcctactacacgctccgagctcaagcgctggataggctcaccaacaaacccgtggagcccgagtcggagtttgtcatcaaaattcaggatatcaacgacaatgaacccaaatttttggatggcccatacacggcaggagttcccgaaatgtctcccgtggggacctcagtggtacaagtgacagcgacggatgctgatgatcctacatatggcaacagtgccagagtggtctacagtattctgcaaggacagccgtacttctcagtggagccaaagacaggagtcatcaagactgcccttccaaacatggatagagaggctaaagaccagtatttgcttgtcattcaggcaaaggatatggttggtcaaaatggaggactgtcaggaactacatcagtcactgtgaccctaactgatgtcaacgataatccacctcgctttcctcgaaggtcttatcaatataacgtcccagagtcattacctgtagcctcagttgtggccagaattaaagctgctgatgcagatattggagctaatgctgaaatggagtacaagattgtggatggtgatggtttgggcatttttaagatttctgttgacaaagaaacccaggaaggaatcattactatacagaaggagctggattttgaagccaaaacaagttacacgctacggatagaagctgcaaataaagatgccgaccctcgctttctgagcttgggtccgttcagtgacacgacaactgtgaagataattgtggaagatgtagatgagccccctgtgttctcttcacccttgtaccctatggaggtgtcggaagctacccaggttgggaatatcattggcactgtagcagctcatgacccagattcttccaatagccctgtgaggtactcaattgacagaaacacagacttggagagatacttcaatattgatgccaacagtggggtcatcacaactgccaagtctttggatcgagagacaaatgctattcacaatatcacagtccttgcaatggagagccagaatccatctcaagtaggaagaggctatgtggccatcactatacttgacatcaatgataacgcccctgaatttgccatggactatgagaccaccgtctgtgaaaatgcccagccggggcaggttatccagaaaatcagtgctgtggataaagatgagccatccaatggacaccagttttacttcagcttaacaacggatgcaacaaataaccacaacttttcattgaaagataacaaagacaacacagcctcaatactgaccaggagaaacggcttccggagacaggaacaatcagtttactatctgccaattttcattgtggacagtggatctccctcacttagcagcaccaacaccctcaccatccgcgtgtgtgactgtgatgctgacggcgtagcccagacctgcaatgcagaggcctatgtcctacctgctggcctcagtacaggagccctgatagccatactcgcctgtgtcttgacattattggtgttgatcctccttatcgtcactatgagaagacggaaaaaagagccccttatttttgacgaagaaagagacatcagagaaaatattgtgagatacgatgacgagggcgggggagaggaggacacggaagcgtttgacatggctgcactgagaaacctcaacgtcatccgagacaccaagacccggagggatgtgactccagaaattcaattcctgagtcgaccagcttttaaaagcatcccagataatgtcatctttagggaatttatttgggaaagattaaaagaagccgatgttgatcctggtgctcctccttatgactccctgcagacatatgcttttgaaggaaatggctcagttgctgaatcactcagctctttagattccatcagctcaaactctgatcagaactatgactacctaagtgactggggacctcgctttaaacgactcgcggacatgtatgggactggccaagagagtttgtactcatagccttggaaccttaattcgaaatgtactg

SEQ ID NO: 228983 - DNA, 2358 bp, Artificial Sequence
  derived and/or modified sequence
atgaagctgggcaaggtggagttctgccacttcctgcagctgatcgccctgttcctgtgcttcagcggcatgagccaggccgagctgagcagaagcagaagcaagccctacttccagagcggcagaagcagaaccaagagaagctgggtgtggaaccagttcttcgtgctggaggagtacatgggcagcgaccccctgtacgtgggcaagctgcacagcgacgtggacaagggcgacggcagcatcaagtacatcctgagcggcgagggcgccagcagcatcttcatcatcgacgagaacaccggcgacatccacgccaccaagagactggacagagaggagcaggcctactacaccctgagagcccaggccctggacagactgaccaacaagcccgtggagcccgagagcgagttcgtgatcaagatccaggacatcaacgacaacgagcccaagttcctggacggcccctacaccgccggcgtgcccgagatgagccccgtgggcaccagcgtggtgcaggtgaccgccaccgacgccgacgaccccacctacggcaacagcgccagagtggtgtacagcatcctgcagggccagccctacttcagcgtggagcccaagaccggcgtgatcaagaccgccctgcccaacatggacagagaggccaaggaccagtacctgctggtgatccaggccaaggacatggtgggccagaacggcggcctgagcggcaccaccagcgtgaccgtgaccctgaccgacgtgaacgacaacccccccagattccccagaagaagctaccagtacaacgtgcccgagagcctgcccgtggccagcgtggtggccagaatcaaggccgccgacgccgacatcggcgccaacgccgagatggagtacaagatcgtggacggcgacggcctgggcatcttcaagatcagcgtggacaaggagacccaggagggcatcatcaccatccagaaggagctggacttcgaggccaagaccagctacaccctgagaatcgaggccgccaacaaggacgccgaccccagattcctgagcctgggccccttcagcgacaccaccaccgtgaagatcatcgtggaggacgtggacgagccccccgtgttcagcagccccctgtaccccatggaggtgagcgaggccacccaggtgggcaacatcatcggcaccgtggccgcccacgaccccgacagcagcaacagccccgtgagatacagcatcgacagaaacaccgacctggagagatacttcaacatcgacgccaacagcggcgtgatcaccaccgccaagagcctggacagagagaccaacgccatccacaacatcaccgtgctggccatggagagccagaaccccagccaggtgggcagaggctacgtggccatcaccatcctggacatcaacgacaacgcccccgagttcgccatggactacgagaccaccgtgtgcgagaacgcccagcccggccaggtgatccagaagatcagcgccgtggacaaggacgagcccagcaacggccaccagttctacttcagcctgaccaccgacgccaccaacaaccacaacttcagcctgaaggacaacaaggacaacaccgccagcatcctgaccagaagaaacggcttcagaagacaggagcagagcgtgtactacctgcccatcttcatcgtggacagcggcagccccagcctgagcagcaccaacaccctgaccatcagagtgtgcgactgcgacgccgacggcgtggcccagacctgcaacgccgaggcctacgtgctgcccgccggcctgagcaccggcgccctgatcgccatcctggcctgcgtgctgaccctgctggtgctgatcctgctgatcgtgaccatgagaagaagaaagaaggagcccctgatcttcgacgaggagagagacatcagagagaacatcgtgagatacgacgacgagggcggcggcgaggaggacaccgaggccttcgacatggccgccctgagaaacctgaacgtgatcagagacaccaagaccagaagagacgtgacccccgagatccagttcctgagcagacccgccttcaagagcatccccgacaacgtgatcttcagagagttcatctgggagagactgaaggaggccgacgtggaccccggcgcccccccctacgacagcctgcagacctacgccttcgagggcaacggcagcgtggccgagagcctgagcagcctggacagcatcagcagcaacagcgaccagaactacgactacctgagcgactggggccccagattcaagagactggccgacatgtacggcaccggccaggagagcctgtacagctag

SEQ ID NO: 228984 - protein, 1288 aa, Artificial Sequence
  derived and/or modified sequence
MASVAWAVLKVLLLLPTQTWSPVGAGNPPDCDAPLASALPRSSFSSSSELSSSHGPGFSRLNRRDGAGGWTPLVSNKYQWLQIDLGERMEVTAVATQGGYGSSDWVTSYLLMFSDGGRNWKQYRREESIWGFPGNTNADSVVHYRLQPPFEARFLRFLPLAWNPRGRIGMRIEVYGCAYKSEVVYFDGQSALLYRLDKKPLKPIRDVISLKFKAMQSNGILLHREGQHGNHITLELIKGKLVFFLNSGNAKLPSTIAPVTLTLGSLLDDQHWHSVLIELLDTQVNFTVDKHTHHFQAKGDSSYLDLNFEISFGGIPTPGRSRAFRRKSFHGCLENLYYNGVDVTELAKKHKPQILMMGNVSFSCPQPQTVPVTFLSSRSYLALPGNSGEDKVSVTFQFRTWNRAGHLLFGELRRGSGSFVLFLKDGKLKLSLFQPGQSPRNVTAGAGLNDGQWHSVSFSAKWSHMNVVVDDDTAVQPLVAVLIDSGDTYYFGGCLDNSSGSGCKSPLGGFQGCLRLITIGDKAVDPILVQQGALGSFRDLQIDSCGITDRCLPSYCEHGGECSQSWDTFSCDCLGTGYTGETCHSSLYEQSCEAHKHRGNPSGLYYIDADGSGPLGPFLVYCNMTADAAWTVVQHGGPDAVTLRGAPSGHPRSAVSFAYAAGAGQLRSAVNLAERCEQRLALRCGTARRPDSRDGTPLSWWVGRTNETHTSWGGSLPDAQKCTCGLEGNCIDSQYYCNCDAGRNEWTSDTIVLSQKEHLPVTQIVMTDAGRPHSEAAYTLGPLLCRGDQSFWNSASFNTETSYLHFPAFHGELTADVCFFFKTTVSSGVFMENLGITDFIRIELRAPTEVTFSFDVGNGPCEVTVQSPTPFNDNQWHHVRAERNVKGASLQVDQLPQKMQPAPADGHVRLQLNSQLFIGGTATRQRGFLGCIRSLQLNGVALDLEERATVTPGVEPGCAGHCSTYGHLCRNGGRCREKRRGVTCDCAFSAYDGPFCSNEISAYFATGSSMTYHFQEHYTLSENSSSLVSSLHRDVTLTREMITLSFRTTRTPSLLLYVSSFYEEYLSVILANNGSLQIRYKLDRHQNPDAFTFDFKNMADGQLHQVKINREEAVVMVEVNQSTKKQVILSSGTEFNAVKSLILGKVLEAAGADPDTRRAATSGFTGCLSAVRFGRAAPLKAALRPSGPSRVTVRGHVAPMARCAAGAASGSPARELAPRLAGGAGRSGPADEGEPLVNADRRDSAVIGGVIAVVIFILLCITAIAIRIYQQRKLRKENESKVSKKEEC

SEQ ID NO: 228985 - protein, 1039 aa, Artificial Sequence
  derived and/or modified sequence
MEVTAVATQGGYGSSDWVTSYLLMFSDGGRNWKQYRREESIWGFPGNTNADSVVHYRLQPPFEARFLRFLPLAWNPRGRIGMRIEVYGCAYKSEVVYFDGQSALLYRLDKKPLKPIRDVISLKFKAMQSNGILLHREGQHGNHITLELIKGKLVFFLNSGNAKLPSTIAPVTLTLGSLLDDQHWHSVLIELLDTQVNFTVDKHTHHFQAKGDSSYLDLNFEISFGGIPTPGRSRAFRRKSFHGCLENLYYNGVDVTELAKKHKPQILMMGNVSFSCPQPQTVPVTFLSSRSYLALPGNSGEDKVSVTFQFRTWNRAGHLLFGELRRGSGSFVLFLKDGKLKLSLFQPGQSPRNVTAGAGLNDGQWHSVSFSAKWSHMNVVVDDDTAVQPLVAVLIDSGDTYYFGGCLDNSSGSGCKSPLGGFQGCLRLITIGDKAVDPILVQQGALGSFRDLQIDSCGITDRCLPSYCEHGGECSQSWDTFSCDCLGTGYTGETCHSSLYEQSCEAHKHRGNPSGLYYIDADGSGPLGPFLVYCNMTADAAWTVVQHGGPDAVTLRGAPSGHPRSAVSFAYAAGAGQLRSAVNLAERCEQRLALRCGTARRPDSRDGTPLSWWVGRTNETHTSWGGSLPDAQKCTCGLEGNCIDSQYYCNCDAGRNEWTSDTIVLSQKEHLPVTQIVMTDAGRPHSEAAYTLGPLLCRGDQSFWNSASFNTETSYLHFPAFHGELTADVCFFFKTTVSSGVFMENLGITDFIRIELRAPTEVTFSFDVGNGPCEVTVQSPTPFNDNQWHHVRAERNVKGASLQVDQLPQKMQPAPADGHVRLQLNSQLFIGGTATRQRGFLGCIRSLQLNGVALDLEERATVTPGVEPGCAGHCSTYGHLCRNGGRCREKRRGVTCDCAFSAYDGPFCSNEISAYFATGSSMTYHFQEHYTLSENSSSLVSSLHRDVTLTREMITLSFRTTRTPSLLLYVSSFYEEYLSVILANNGSLQIRYKLDRHQNPDAFTFDFKNMADGQLHQVKINREEAVVMVEVIPQMQKSN

SEQ ID NO: 228986 - DNA, 3867 bp, Artificial Sequence
  derived and/or modified sequence
atggcctctgtggcatgggcggtgttgaaagttctgctgcttctccccacccagacctggagccctgtaggcgcaggcaacccacctgactgcgatgctccactcgcctccgctttgcctagatccagcttcagttcttcctccgagctatctagctcccacgggcctggcttctcgagattaaaccgcagagatggtgcaggtggttggacgcccttagtctccaataaatatcagtggctccagatagacctgggggaacgaatggaagtcactgcagtggctacgcagggagggtatggatctagcgactgggtcacttcttatctgttgatgtttagcgacggtgggcgaaattggaaacagtacaggcgcgaagaatcaatctgggggtttcctggaaacaccaacgccgattcagtggttcactacaggctacagcctcctttcgaggcccgattcctgcgtttcctgccccttgcctggaatcccagaggtcgaatcggaatgagaatcgaagtttacggatgcgcttataagtctgaggtcgtctatttcgatggtcagtcagcactgctgtaccgcctcgataaaaagcccctgaagccgatccgggatgtcattagcctcaagttcaaggccatgcaaagtaacggaatcctgctgcatagagaaggccagcacgggaaccacattacgctggagctgataaagggcaaactggtgttcttcctcaactctggaaacgccaaattgccttccacgatcgctcccgtgacactgacccttgggagcctgctagacgatcaacattggcacagcgtgctgattgaactgctcgatacacaggtgaactttacagtcgacaagcatacacaccacttccaagccaagggagattctagctatcttgatctgaatttcgagatcagtttcgggggaattccaactcccggaaggtctcgtgcttttaggagaaaaagtttccacggttgtctagaaaatttatactataacggggtggacgtgacggagcttgcgaagaagcacaagccccagatcctgatgatggggaatgtgtccttctcctgtcctcagccacagacagtgccagtgactttcctgagctctcggtcctatctggccctgcccggtaattccggtgaagataaggtatcagtaacctttcagttcagaacatggaatcgcgcagggcatctgctctttggtgagctcagacggggtagtgggagcttcgtcctatttctaaaggatggcaagctgaagcttagcctattccagccgggacaaagccctaggaacgtcaccgccggagcgggacttaacgacggacagtggcatagcgtgtcattctccgctaaatggtctcatatgaacgtggtcgtggatgatgataccgccgtacagcccctggtggccgtgctgatcgactcgggcgacacatactattttgggggatgcttggacaacagctctggaagcgggtgcaaatccccactaggaggatttcaggggtgcttgcgtcttatcacgattggcgataaggctgtagatccgattctagttcagcagggggcactgggctcattcagagacctccagatagattcttgtggcataacagacagatgccttccatcatactgcgagcatggaggcgagtgttctcagagctgggacaccttcagctgcgattgccttgggaccgggtacacgggcgaaacctgccactcttctctgtacgaacagtcctgcgaagcacacaagcaccgtggcaacccttccggtctctattatatcgacgcagacggttccggaccacttgggccattcctggtgtattgtaacatgactgctgatgccgcatggacagtggtgcagcacggagggcctgatgcagtgactctgcggggtgccccttctgggcaccccagaagcgctgtgagctttgcctatgcagcgggtgcaggccagctccggtcagcagtcaacctagcagagagatgcgagcagcggctggcgctgagatgtggaaccgctcgccgacctgacagccgtgatggtactcccctctcttggtgggtggggcgaacaaatgagactcacacgagctggggtgggtctttacccgatgctcagaaatgcacatgtgggctcgagggcaattgtatcgactcccagtactattgcaactgcgatgccggacggaatgaatggacgtctgacactatcgtgttaagccagaaagaacacttacccgtgactcagatcgttatgacagatgcgggacgcccacactccgaagctgcttacacccttgggcctcttctctgtagaggagatcagagtttttggaactcagcctcgtttaatacggaaacaagctatctccactttccggctttccacggagaattaaccgcggatgtgtgcttttttttcaaaacaacagtgtcttccggcgttttcatggaaaacctcggcattaccgatttcattaggattgagctacgggctcccaccgaggtcacgttttccttcgacgtgggcaatggtccctgtgaagttaccgtgcaatctccaactccatttaatgataatcaatggcaccacgtccgcgctgaacgaaacgtgaagggcgcatctctgcaggttgatcagctgccccagaagatgcagcctgcccctgcggacggacacgttcgccttcagctgaactcccaattattcatcggaggaaccgccaccagacagcggggattcctgggttgcattcggtcactgcaattgaacggtgtggctcttgacctcgaagaaagagcgaccgtgaccccaggagtggaaccgggatgtgctgggcactgctccacttatggccatttatgccggaacggaggtagatgcagagaaaagcgcagaggcgtcacctgtgactgtgcattttcggcctacgacgggccattctgctccaacgagatttcagcctactttgccaccggttcttccatgacttaccatttccaggaacactatacactttccgaaaactcctccagcctggtcagttcccttcaccgcgatgtcacactcactagggagatgatcaccctgtccttcaggaccactcgcacaccaagtctcctgctgtatgtgagcagtttctacgaagaatatctgtctgtgatcctggccaataacgggagcctgcagatccgctataagctggacagacaccagaacccagacgcattcaccttcgattttaaaaatatggccgatggacaactgcaccaagtgaaaattaatagggaagaggctgtcgttatggtagaggtgaatcagtcaactaaaaaacaggtaatcttgtcctcggggacagaattcaacgcagttaagagcctgatcttaggcaaggtgcttgaggccgcaggcgctgacccagatacgcggcgagctgctacatccggatttacgggttgtctgagcgcggtaagattcggtagagcagccccattgaaggccgcattgcgccctagtgggccttctcgcgtcaccgttagagggcacgtggcccctatggcgcgatgcgcggcaggtgctgccagcggatcaccagctcgagagctggcgccacggctcgccggtggtgcaggaagaagcggacccgcagatgagggagaacccctcgttaacgccgataggcgagactccgcggtaatcgggggtgtcatcgcagtggtcatctttattctgttgtgtatcaccgcaatcgccatccggatttaccagcagcgcaagcttaggaaagagaacgaaagtaaggtttccaagaaggaagaatgttag

SEQ ID NO: 228987 - DNA, 3120 bp, Artificial Sequence
  derived and/or modified sequence
atggaggtgactgccgtggcgacacagggtggatatggtagcagcgattgggttacgagttacctgttgatgttctctgatggagggaggaattggaagcagtacagacgcgaagagagtatttgggggttccccggaaataccaacgcggactccgtggtgcattaccggctccagccccctttcgaagcccgatttctgagattcctccctctggcctggaatcctcggggacgaatcggcatgcgaattgaagtgtacggttgtgcctacaagagtgaagtagtgtacttcgacggccaatccgcgcttttataccggctcgacaagaagcccctcaagccgattagagatgtgatcagccttaagttcaaggccatgcaaagcaacggcatcctgttgcacagggaagggcagcatggcaatcatatcaccctcgagctcatcaaaggtaaattggtcttctttctgaactccggcaatgcaaaactaccgagtactatcgctcctgttactctcaccctgggttctctgctggacgatcaacattggcacagcgtactgattgagctactggatacacaagtcaacttcacagtagacaagcacactcaccactttcaggcgaaaggggattccagttatcttgatctgaattttgaaatctctttcgggggtatcccgactcctggtaggagtcgggcattccgcagaaagtcattccacggctgcctggagaacctgtattataacggtgtggatgtcacggagctcgccaagaagcataagcctcagattttaatgatgggcaatgtttcgttttcgtgtccgcagcctcagacagtccctgtgacatttctttccagcaggtcttacttggctcttcccggaaattcaggagaggacaaggtcagcgtgactttccagttccgcacttggaacagggcgggacacctgctctttggtgagctgcgaaggggcagcggctcatttgtgctgtttctgaaagatggaaagcttaaactgagcctgttccagcctgggcaaagcccgcgaaacgttaccgccggtgccggactgaatgacggccaatggcactctgtaagtttttcagccaaatggagccatatgaatgtcgtggtggacgacgatactgctgtgcagcccctggttgctgtgcttatcgacagcggcgacacttactacttcgggggatgtcttgacaactccagcggctctggctgcaagtcacccctgggaggctttcaagggtgccttagactgattaccatcggggacaaggcagtggatccaatactggtgcaacagggcgcattagggtcctttcgggatcttcagatagactcttgtggtataaccgaccgatgcctcccttcctattgtgaacatggcggagagtgcagccagtcctgggacactttttcatgcgattgtctgggcacaggctataccggagagacatgccacagctccctttacgagcagtcttgcgaggcacacaaacacagggggaatccctccggcctttactatatcgatgcggatggcagtggaccactgggcccattcctagtgtattgcaatatgacagcagatgccgcatggaccgtcgtgcagcacggagggccagatgctgtgacactccgaggcgctccttccggccatccaagaagcgcggtgtcctttgcctacgccgctggggcaggccagttaaggtcagcggttaatctcgctgagcgctgcgaacaaagactggcgctgcgctgtgggacggcccgacggccagacagccgagacggcacgcctctatcttggtgggtggggcgtaccaatgaaacccacacttcctggggaggatctctgcctgatgctcaaaagtgcacctgtggcctggaaggaaattgcatcgactcccaatattattgcaactgcgatgccggtcggaacgagtggactagcgacactattgtccttagccagaaagaacacctccccgtcacacagatcgttatgactgatgccggaaggccacacagcgaagctgcttacactttaggaccactgctgtgccgaggcgatcaatcattctggaacagcgccagctttaataccgagacaagctatctccatttccctgcatttcacggagagctgactgcagatgtgtgcttcttttttaagaccacggtgtctagtggagtctttatggaaaacttggggataactgacttcattcggatagagctgagggcccctaccgaggtgacctttagcttcgatgtcgggaatggaccttgtgaggtcactgtccagtctcctacccctttcaacgacaatcagtggcaccacgtgcgggcagagcggaatgtcaaaggcgcatccctgcaagtggaccagttgcctcagaaaatgcagcctgcacccgctgacgggcacgttcggttacagttgaacagccagctgttcatcggtggtacagctactagacaaagaggttttcttggctgtattagatccctgcaacttaacggggtcgctctagatctagaggaacgggcaaccgtgacccccggagtggagcctgggtgtgcaggacactgttccacctacgggcacctgtgcaggaacgggggacgctgcagagagaaacggagaggggtaacctgcgactgcgcattctccgcctacgacggacccttctgctccaatgagatcagtgcatattttgccactggcagttccatgacttaccatttccaagaacactatacgctgtccgagaacagctcctctctggtgtcttctcttcatcgcgacgttacgctgactcgtgaaatgatcaccttgtcctttcggacaactcgcacaccctcactcttgctgtacgttagctctttctatgaggagtatctcagcgtgatcttggcgaacaatgggagtctgcagatacgatacaagcttgaccggcatcagaaccccgacgccttcacattcgactttaagaacatggccgacggccaactgcaccaggtgaagatcaacagggaggaagcggtggttatggtcgaagtgatccctcagatgcaaaagtcaaattag

SEQ ID NO: 228988 - DNA, 3867 bp, Artificial Sequence
  derived and/or modified sequence
atggcctcagtggcctgggctgtgttgaaagtactgctgttgctacctacccagacatggtctcccgtcggcgcgggcaacccaccagactgtgacgcccccctagcatctgccttgccccgctcctccttctcctcctcaagtgagctgtctagcagtcatggacctggattctcacggctgaataggcgggatggcgccggtggctggactcccttggtgagcaacaaatatcagtggcttcagattgacctgggcgaacgcatggaggtgaccgcagttgctacccagggaggatacggttctagcgactgggtaacttcatacttgctaatgttcagcgacggaggaagaaactggaagcagtataggagagaagagtccatttggggcttcccaggcaacactaacgctgactccgtggtccactaccgactgcagccaccttttgaagctcgatttctcagatttctcccgctggcttggaatcctcgaggcagaatagggatgaggatagaagtatacggatgtgcctacaagtcggaagtggtctactttgacggccagtccgcgctgctgtatcgactagacaaaaaaccactcaaacccatccgagacgtcatttcactgaaattcaaagccatgcagagtaacgggattttgctacatagagaggggcagcatggcaaccacatcactctggaattaataaaggggaaattggtgtttttcctgaacagtgggaatgctaagctgcccagtacaattgcccctgtaacgctgactttgggatctttgctggacgatcagcactggcacagcgtactcattgagttactcgacactcaggtgaactttactgtggataaacacactcaccactttcaagctaagggcgattccagctacctcgatctgaattttgaaatttcttttggaggcatccctacaccaggccgctcgcgcgctttcaggcgaaagtccttccacggttgtctcgagaacctgtattacaacggagttgacgtgaccgagctcgcaaaaaagcataaaccccagattttaatgatggggaatgtgagtttctcgtgcccgcagcctcagaccgtgcctgtcacatttctgagctcccggtcatacctggccttgcctggaaatagtggggaagacaaggtgagcgtcacatttcagttccgaacctggaaccgcgcaggacatttacttttcggtgaactcagaagaggcagcggttcattcgttctgttcctgaaggacggcaaactcaaacttagtctgtttcaacccggccagtctccaagaaacgtcaccgccggagctgggctaaatgacggccagtggcacagcgtgagcttctcagctaaatggtctcatatgaacgtcgtcgtggacgatgatacggcggtgcagcctcttgtggctgtgctgattgattcaggggacacatactatttcggtggttgcctcgataacagctcaggaagtggctgcaagtcccccctcggaggttttcagggttgtttaaggctaataactataggcgataaagcagtggaccctatcctggtacagcaaggcgcactggggtcgtttagggacctgcaaatagacagttgtggaatcactgaccgctgtctgccttcttactgtgagcatgggggagagtgctctcagagctgggatactttcagttgcgactgtctcggaacagggtacacaggggagacctgccatagtagcctgtacgagcagagttgcgaagcacataaacaccgtggaaaccccagcgggttatattacattgatgccgatgggagtggacctcttggaccctttctggtatactgcaatatgactgccgacgctgcttggaccgtcgtgcagcatggaggaccagatgctgtgacacttcggggcgcgccatcagggcatccacggtctgccgtgagtttcgcttatgctgctggcgctggacagctgcgatccgccgtgaatctggcagaaagatgcgaacaacgactcgccctcagatgcggcaccgcacgacggccagacagtcgcgacggaacaccattgtcctggtgggtaggcaggacaaacgaaactcacacctcttggggcggtagcctgccggatgctcagaaatgtacttgcggactggagggtaattgtatagacagccaatattactgcaattgtgacgccggtagaaacgaatggacctcggacacaatcgtattgagccagaaagaacatcttccagtgacacaaatagttatgactgacgcagggcgtcctcattcggaagccgcctacacattagggccactgctctgcagaggcgaccaaagtttctggaactcagcttctttcaacacggagacttcctatctgcactttcccgcattccatggggagctgaccgcagatgtgtgctttttttttaagacaacagtttcgtccggtgtgttcatggagaacctaggaattactgatttcattcgcatcgaactgcgcgcacctaccgaggtcacattctccttcgacgtagggaatggaccttgtgaggtgactgtgcagagccccactcctttcaatgacaaccagtggcaccatgtaagggctgaaagaaacgttaaaggtgcatctctccaggtggaccaattgcctcaaaaaatgcaacctgccccagcggatggacacgtcaggctgcagctgaactcccagctgtttattggtggaaccgccacgcgtcagcgcggctttttaggatgtattcgatcattgcagctgaacggagtcgcccttgacctcgaagagcgcgccacagtgacacctggcgttgaacccggttgtgccggtcactgttccacatacgggcatttgtgtagaaatggaggacggtgccgggaaaagcgacggggagtgacatgtgattgtgctttctctgcatatgatggtcccttctgttcaaacgagatttcggcgtactttgcaacgggctcaagtatgacttaccactttcaggagcactataccctgtctgagaatagcagtagtttagtgagctcccttcaccgcgacgtcacactcaccagggagatgatcacgcttagtttcagaaccacgcgtaccccgagccttctgctttacgtgtcttcattttacgaggagtacctgtctgtgatcttggcgaataatggtagccttcagatcaggtataaacttgatcgccaccagaatcctgacgcttttacattcgacttcaagaatatggccgatgggcagttgcatcaagtgaaaatcaatcgtgaagaggctgttgttatggtggaagtcaaccaatcgacaaaaaagcaggtgattctatcaagcggtactgaattcaacgcggtgaagagcctcatccttgggaaggtacttgaggcagccggcgctgacccagatacgaggcgggcggcgacatcaggtttcactgggtgtctcagcgcagttcggtttggacgcgcagctcccttaaaagccgcacttcgtccttcgggaccttctcgtgtgaccgtgcggggacatgttgcacctatggcccgctgtgctgctggtgccgcctcaggctcccctgcacgggaactggcacctcggctggccggtggggcagggcgaagcgggccagccgatgagggcgaaccattagtcaatgctgacaggcgagattctgcagtgattggcggcgtaatcgcagtggtgatcttcatcctgctgtgcatcaccgccatcgctatcagaatctatcagcagcgaaagttgcgtaaagagaacgagtcaaaggtttctaagaaggaggaatgctag

SEQ ID NO: 228989 - DNA, 3120 bp, Artificial Sequence
  derived and/or modified sequence
atggaagtgactgcagtggctacacaaggcggctatggatctagtgactgggtcacttcgtatctgctcatgttctcagacggtggtagaaattggaagcagtataggcgtgaagagtcaatttggggcttcccaggcaatacaaacgccgactcagtggtgcactatcgcctgcagccgccgttcgaagcccgatttctgaggttcctgccactggcctggaatcccagggggcgtatcggcatgcgtatcgaggtttacgggtgtgcatacaagtccgaagtcgtctatttcgatgggcagtcagcactgctgtatagactggataagaaaccgttaaagcccattcgcgacgttatatctctgaaattcaaggcaatgcagagcaacgggatccttctgcatcgcgaggggcagcatggaaatcacatcacactcgaacttataaaaggcaagctcgtattctttctcaattccggaaatgccaagctgccatccacgattgcacccgtcacacttacactggggtctttgctcgacgaccaacactggcattctgtccttatcgaacttctggatacacaggtgaacttcacagtggacaagcatactcatcactttcaggctaagggtgattcctcttaccttgacttgaacttcgaaatttcgtttggcggtataccaaccccagggaggtctcgggcgttcagaaggaaaagctttcatggctgcctcgaaaatttatactacaatggagttgacgtcaccgagctggcaaaaaagcataaaccacagatcctcatgatgggaaatgtttctttttcttgcccgcagcctcagacagttcccgtgacctttctctccagccgcagctatcttgctctccccgggaatagtggagaggacaaggtttctgttacattccaatttagaacctggaatcgagcaggacatcttctcttcggcgagctgaggagaggctccggatcattcgtcttgtttttgaaagatggaaaactcaaattgagcttgttccagccaggccagagtcctcgcaacgtcaccgccggcgcggggctcaatgacgggcagtggcattcagtctccttttccgctaagtggtcgcacatgaacgtagttgttgacgacgacacagctgtacagccactggtagcagtcctgatcgacagtggagatacttattacttcggcggctgcctcgacaattccagcggatctggctgtaaaagtcctctcggagggttccagggatgtcttcgactgattacaatcggggataaagctgtagatcccattctggtgcaacaaggggcactgggaagctttcgcgaccttcaaatcgatagctgcggcattactgacaggtgtttacctagctactgtgagcacggaggtgagtgtagtcagagctgggacaccttctcctgtgactgtctcggcacgggatataccggggagacttgccactcttccctttacgaacagtcctgtgaggcccacaaacatagaggcaaccctagtggactctattatattgacgcagatggcagcggccccctaggaccattcctcgtttattgcaatatgactgcagacgcagcctggacagtggttcaacatgggggacccgatgcggtgacactgagaggggcacccagtggacaccctcggagtgccgtaagtttcgcatacgcggccggcgctggtcaactccgctcggcagttaatttggctgaaaggtgcgagcagaggcttgccttacgttgtggcacggcgcgtcgaccagatagcagggacggcacccctctgtcgtggtgggttgggagaacaaacgaaacacacacctcatgggggggttctctcccagacgctcagaagtgcacatgtgggcttgaggggaattgcattgatagccagtattattgtaattgtgacgccggaaggaatgagtggacttccgatactattgtcctctcccagaaggagcatctgccggtcacacagatcgttatgacggatgctggccggccacactccgaagcagcctacaccctaggtccactactgtgtcgaggagaccagtcattttggaactcagcctcattcaacacagaaacctcctacctgcactttcctgcgttccacggcgaattaacagctgacgtgtgttttttctttaaaactacagtctccagcggggtattcatggaaaacttgggaatcaccgactttatccggatcgaactgcgtgcaccaactgaagtaaccttcagctttgacgtggggaatggtccatgtgaggtgaccgtgcagtccccaacaccctttaacgataaccagtggcatcatgtgcgtgcagaacggaacgtgaaaggagcctcactccaggttgaccagcttccacagaagatgcagcctgcaccagcagatggacacgttagattgcagctgaactctcagctcttcatcggcggtactgccacacgacagaggggctttctgggctgcatccgctctctgcagctcaacggagtggccctggacctggaggagcgggcaacagtgaccccgggcgtggaacccggctgcgcaggacactgttccacctatgggcatctgtgtagaaacggaggtcgatgtagagaaaaacgcagaggcgtgacttgtgactgtgccttctccgcttatgacgggccattttgttccaacgagatctctgcatatttcgctactggaagttcgatgacttaccatttccaggagcactacaccttgagtgaaaattcaagcagcctggtctcttccctccaccgcgacgtgacactgactcgagaaatgattactctttcttttcggaccacccgaaccccgtccctactgctgtatgttagttcgttttatgaggaatatctcagcgtcattctggcaaataacggatctctgcagattcgttacaagttggacaggcaccagaaccccgatgcatttacgtttgacttcaaaaatatggccgacggccagctgcatcaggtgaaaattaatcgggaggaagctgtagtcatggtggaggtaatcccccagatgcaaaaatctaattag

SEQ ID NO: 228990 - DNA, 3867 bp, Artificial Sequence
  derived and/or modified sequence
atggcgtcagtggcttgggccgttctaaaagtcttactgcttcttcctacccaaacatggtcgcctgtgggagcagggaatccccccgactgtgacgcaccgttggctagtgcattaccacgctcttctttctcctcaagcagcgaattatcgtctagtcacggacctggattcagccggctcaaccgccgagatggggccggaggatggacacccctagtgagtaataagtatcagtggctacagattgatctcggcgagcggatggaggtcacagccgttgcaactcagggtggctacggatcatctgactgggtcacgagctacctacttatgttcagtgacgggggcaggaattggaagcaatatagaagagaagaatccatatggggtttcccagggaataccaacgccgacagcgttgtgcattacaggctgcaacccccatttgaagccaggttcttgcgattcttgccactagcctggaacccacggggccgtatcggcatgcgaattgaggtatatggatgtgcatataagagcgaagtggtgtactttgacgggcagtcagctctgctgtaccgactagacaagaagcctttaaagccaatccgagacgttatcagtctaaagtttaaagcaatgcagagcaacggcatcttacttcacagggagggccaacacggaaaccacatcaccttagagttgattaaaggcaaactggtgtttttcctaaactctggtaatgcaaaactgccatctaccatcgccccagtgactctaaccctgggctccctcctcgacgatcagcattggcatagcgtgctcattgagcttctggatacccaagtgaacttcacagttgacaagcacactcatcattttcaggccaagggggactcctcttacctggacctcaacttcgaaatcagttttgggggcattccaacacctggcagatcgagagctttccgccgcaagagtttccacgggtgcttagagaatctttactacaatggggtagatgtgaccgaactagcgaaaaaacataagcctcagatcttgatgatgggaaacgtcagtttctcctgccctcagcctcagacagttcctgtaaccttcctttcttcccgctcctatctcgcactaccaggtaattcaggcgaagataaggtctcggtgactttccagttccgcacttggaatcgggctggtcatctcctatttggtgaactcagacgtggtagcggttctttcgttttatttttaaaggatggcaaacttaagctaagcctgtttcaacctggccagtcacctagaaatgtaacagcgggggcgggcctgaacgacggacagtggcactccgttagcttcagcgccaaatggtcacatatgaacgtggtcgtcgacgacgacacagccgtacagcctctggttgctgtcctgattgactcgggtgatacctattacttcggagggtgcctagacaactcgagcgggtcaggctgcaaatctccactgggaggatttcagggctgcctcagattaatcacaataggcgataaagcagtcgaccccatcctggttcaacagggggccctgggctctttccgggacttacagatagatagctgcggcatcacagatagatgtcttccaagctattgcgagcacggcggcgaatgtagtcaatcatgggacaccttctcctgcgactgtctgggcacagggtacaccggagaaacatgccatagctctctgtacgagcaatcatgcgaggctcacaagcacagaggaaatccctccggtctgtattacatcgacgcagatggctccggtcctctcggcccattcctggtttactgcaatatgacagctgacgctgcctggactgtggtgcaacatggaggtcccgacgctgtcacactccgaggagcaccttcaggtcatccccggagtgcggtctctttcgcttacgccgcgggcgcagggcagcttagaagcgccgtgaacctggccgagcggtgtgaacagcgactagccctgagatgtggaaccgctagaaggcccgattcgagagatggaacaccactgagctggtgggtaggcaggacaaacgaaactcacacctcttggggcggtagcctgccggatgctcagaaatgtacttgcggactggagggtaattgtatagacagccaatattactgcaattgtgacgccggtagaaacgaatggacctcggacacaatcgtattgagccagaaagaacatcttccagtgacacaaatagttatgactgacgcagggcgtcctcattcggaagccgcctacacattagggccactgctctgcagaggcgaccaaagtttctggaactcagcttctttcaacacggagacaagttatcttcacttccctgcctttcacggagagctgaccgccgacgtttgcttctttttcaagaccacagtttcatctggagtgttcatggagaacctgggaattacagactttattaggatcgagttacgggccccaactgaggtaaccttttcctttgacgtgggaaacggaccctgcgaagtgaccgtacagtccccgacacccttcaacgacaaccagtggcatcatgtacgggccgaacgcaatgttaagggagcttcattacaggtggaccagctgccacaaaagatgcagcctgccccagccgacggtcatgttcgccttcagcttaattcccagttgttcatcgggggtactgcaacaaggcagcgaggctttctgggttgtatcaggtccctgcagttaaacggtgtcgctctggatctggaggaacgcgccaccgtcacacctggcgttgagccaggttgcgctggtcactgctcaacctacggacacttgtgcaggaatggagggaggtgtcgcgaaaagagaaggggtgtaacttgcgactgtgcatttagtgcgtacgacggcccattttgcagcaatgaaatttccgcctactttgccaccggcagcagcatgacataccatttccaggagcactacacactatccgagaactcctcgtccctggtctccagcctgcaccgtgatgtcacccttacaagagaaatgatcactttgagcttcagaacaacccgtacaccatccctccttctttacgtgtcctctttttacgaggaatacctgtcagtgattttggccaataacggctcgttacagattcgatataagctggatcgccaccaaaacccagacgcctttacattcgacttcaagaacatggcagatggtcagctccatcaagtgaaaatcaatagggaagaggccgttgttatggtggaggttaatcagagtactaaaaaacaagtgattttatcatctgggactgaattcaacgcggtgaaatccctgatactcggcaaagtgctagaggccgccggcgccgatcctgacactaggcgtgcagctactagcggattcacgggttgcctcagtgccgtccggttcgggagagccgcgccactgaaagctgcccttagaccctccggcccttctagagtcacagtacgcggacatgttgcacctatggcacggtgtgcggccggggctgcctccgggtcaccagctagagaactggcacccagacttgccggcggtgcagggcggtcaggccccgcggatgaaggcgagccattagtgaatgctgatagaagagacagtgccgtcatagggggagtaatcgcggtggtcatctttatcctgctgtgcatcactgcaatcgccatacgaatttaccagcagcggaaactgaggaaagagaacgagtccaaggtgtcaaagaaggaagagtgttag

SEQ ID NO: 228991 - DNA, 3120 bp, Artificial Sequence
  derived and/or modified sequence
atggaagtgactgcagtggctactcaagggggttacggttcttctgattgggtgacctcttatcttttgatgttttctgatggcggcagaaattggaagcagtatcgtagagaggagtcaatttggggcttcccaggcaacactaacgcggactccgttgtgcattacaggctgcaacctccgttcgaagcccggtttctgaggttcctcccactagcatggaatccaagagggaggattggcatgcggattgaggtatacggatgcgcatataaatcagaagtggtgtattttgacgggcagtcagcactgctgtatagactggataagaaaccgttaaagcccattcgcgacgttatatctctgaaattcaaggcaatgcagagcaacgggatccttctgcatcgcgaggggcagcatggaaatcacatcacactcgaacttataaaaggcaagctcgtattctttctcaattccggaaatgccaagctgccatccacgattgcacccgtcacacttacactggggtctttgctcgacgaccaacactggcattctgtccttatcgaacttctggatacacaggtgaacttcacagtggacaaacacactcaccattttcaagctaaaggcgactcctcctacctggatctaaattttgaaattagttttggcggtataccaaccccagggaggtcacgggcattccggagaaaatcattccatggctgcctcgaaaacctgtactacaatggagtcgacgtgaccgagctggcgaagaaacataagcctcagattttaatgatgggcaacgtgagcttttcgtgccctcagccacagacagtccccgtcacattcctatcctccagaagctatctcgcactcccaggaaattccggtgaagataaagtctcagtcactttccaattccgcacgtggaatcgcgccggccacctacttttcggcgaattgagaaggggatccggttcgtttgtgttattcctgaaggatgggaagctcaagctgtcactattccaaccaggccaatctcctcgcaatgtgaccgcaggagcaggactcaatgacggtcagtggcattccgttagtttcagtgccaagtggtcccacatgaatgttgtggttgacgacgatacagccgtgcagcctctcgtggccgtgttaattgactctggagacacctattatttcggaggttgtctggacaattcctccggctcaggttgcaaaagccctttgggtggctttcagggatgtttgcggttaattaccattggcgataaggccgtcgaccccattttggtgcaacagggtgctctcgggagcttccgggacctgcaaattgacagctgcggcatcacagataggtgccttccgtcttactgcgaacatggcggagagtgctcacagagctgggataccttctcatgcgattgccttggcacaggttatacaggggaaacttgccactcctcactctatgaacaatcctgtgaagctcacaaacatcgcggaaatccttccggtttatattacatcgatgcagacggtagcggtccactggggccgttcctggtctattgcaatatgaccgccgacgcagcttggaccgtagttcagcatggaggacctgacgcagtcaccctgagaggtgcgccttcaggacacccacgatcagcagtctctttcgcgtatgctgctggagcaggacaactgcgcagcgcagtcaacttggcagaacgctgcgagcagcggctggccctacgttgtggcaccgctcggcgtcccgatagccgagacggtacccctctgtcctggtgggtgggtcgaacaaacgaaacccacacaagttggggagggtctctgcctgacgcccagaaatgcacatgtggcctagaaggaaattgtatagactctcagtactattgtaactgtgacgccggacgcaatgaatggacttccgacacgattgtcctttcccagaaagaacacctgcccgtcacccaaatcgtcatgaccgatgctggtcgaccgcattccgaggcggcctatactcttggacccctcctgtgccggggagatcagtcattttggaactcagcctcattcaacacagaaacctcctacctgcactttcctgcgttccacggcgaattaacagctgacgtgtgttttttctttaaaactacagtctccagcggggtattcatggaaaacttgggaatcaccgactttatccggatcgaactgcgtgcaccaactgaagtaaccttcagctttgacgtggggaatggtccatgtgaggtgaccgtgcagtccccaacaccctttaacgataaccagtggcatcatgtgcgtgcagaacggaacgtgaaaggagcctctctccaggtagaccaattgccgcagaaaatgcaaccagctccagctgacggccatgtgagactgcagctgaattcacaacttttcattggcggaaccgcaactcgacaacgcggttttctagggtgtatacgatcgctgcaactcaacggagtggccctggacttggaagagagggctacggtgacaccaggagtagagccaggatgcgcaggtcactgttccacatacggacatctctgccgcaacgggggcagatgcagagagaagaggcggggagtaacctgtgattgcgcttttagcgcttatgatggcccattttgcagcaacgaaatctctgcctactttgcaactggctcctccatgacctaccacttccaggagcattataccctgtccgagaactcatcctccctcgtatcctctttacaccgagacgtcacactgacgcgcgaaatgatcacgttgtctttccgaaccaccagaacaccttcattgctcctctacgtcagttctttctacgaagagtatttgagtgttattctggctaacaatgggtctcttcagatcagatacaaattggaccgacatcaaaatcctgacgcattcactttcgactttaaaaacatggctgacgggcagttacatcaggtcaaaataaatcgagaagaagctgtggtaatggtggaggtaattcctcagatgcagaaatctaattag

SEQ ID NO: 228992 - DNA, 5064 bp, Artificial Sequence
  derived and/or modified sequence
cgggagtgagagcaggagcgacgcagagcggccgtcgccgtgcccgggtctcagggcgcctggctgaagtgagcatggcttcagtggcctgggccgtcctcaaggtgctgctgcttctccccactcagacttggagccccgtgggagcaggaaatccacctgactgtgatgccccactggcctctgccttgcctaggtcatccttcagcagctcctcagagctgtccagcagccacggcccggggttttcaaggcttaatcgaagagatggagctggtggctggactccacttgtgtcaaataaataccaatggctgcaaattgaccttggagagagaatggaggtcactgctgtcgccacccaaggaggatatgggagctctgactgggtgaccagctacctcctgatgttcagtgatggtgggagaaactggaagcagtatcgccgagaagaaagcatctggggttttccaggaaacacaaacgcagacagtgtggtgcactacagactccagcctccctttgaagccaggttcctgcgctttctccctttagcctggaaccctaggggcaggattgggatgcggatcgaagtgtacggatgtgcatataaatctgaggtggtttattttgatggacaaagtgctctgctgtatagacttgataaaaaacctttaaaaccaataagagacgttatttctttgaaatttaaagccatgcagagcaatggaattctacttcacagagaaggacaacatggaaatcacattactctggaattaattaaaggaaagcttgtcttttttcttaattcaggcaatgctaagctgccttccactattgctcctgtgaccctcaccctgggcagcctgctggacgaccagcactggcattccgtcctcatcgagctcctcgacacgcaggtcaacttcaccgtggacaaacacactcatcatttccaagcaaagggagattccagttacttggatcttaattttgagatcagctttgggggaattccgacacccggaagatcgcgggcattcagacgtaaaagctttcatgggtgtttagaaaatctttattataatggagtggatgttaccgaattagccaagaaacacaaaccacagatcctcatgatgggaaatgtgtccttctcatgtccacagccacagactgtccctgtgacttttctgagctccaggagttatctggctctgccaggcaactctggggaggacaaagtgtctgtcacttttcaatttcgaacgtggaacagagcaggacatttgcttttcggcgaacttcgacgtggttcagggagtttcgtcctctttcttaaggatggcaagctcaaactgagtctcttccagccgggacagtcaccaaggaatgtcacagcaggtgctggattaaacgatgggcagtggcactctgtgtccttctctgccaagtggagccatatgaatgtggtggtggacgatgacacagctgttcagcccctggtggctgtgctcattgattcaggtgacacctattattttggaggctgcctggacaacagctctggctctggatgtaaaagccccctgggagggtttcagggctgcctaaggctcatcaccattggtgacaaagcggtggatcccatcttagtacagcagggggcgctggggagtttcagggacctccagatagactcctgcggcatcacagacaggtgcttgcccagctactgtgagcatgggggcgagtgttcccagtcgtgggacaccttctcctgtgactgtctaggcacaggctatacgggcgagacctgccattcctctctctacgagcagtcttgtgaagcccacaagcaccgagggaacccgtctgggctttactatattgatgcagatggaagtggccccctgggaccatttcttgtgtactgcaatatgacagcagacgccgcgtggacggtggtgcagcacggtggccccgacgcggtgaccctccgaggtgcccccagcgggcacccgcgctcggctgtgtccttcgcgtacgcagcgggcgcggggcagctgcggtccgcggtgaacctggcggagcgctgcgagcagcggctggctctgcgctgcgggacggcgcggcgcccggactcacgagatggaaccccactgagctggtgggttggaagaaccaatgaaacacacacttcctggggaggttctctgcctgatgctcaaaagtgtacttgtggattagaggggaactgcattgattctcagtattactgcaactgtgatgctggccggaatgaatggactagtgacacaatagtcctttcccaaaaggagcacctgccagtcactcagattgtgatgacagacgcaggccgaccacattccgaagcagcttatacactggggccactgctctgccgcggagatcagtcattctggaattcagcttccttcaacactgagacttcataccttcatttccctgctttccacggagaactcactgctgacgtgtgcttcttttttaagaccacagtttcctccggggtgtttatggagaacctggggatcacagatttcatcaggattgagctgcgtgctcccacagaagtgaccttttccttcgatgtggggaatggaccttgtgaggtcacggtgcagtcacccactccctttaatgacaatcagtggcaccacgtgagggcagagagaaatgttaaaggagcgtctcttcaagttgatcagcttcctcagaagatgcagcctgcccctgctgatgggcacgttcgtttacagctcaacagccagctcttcattggtggaacggccaccagacagagaggctttctaggatgcattcggtctctgcagttgaacggggtggccctggatctggaagaaagagccacagtgacgccaggagtggagccagggtgtgcaggacactgcagcacctatggacacttgtgtcgcaatggagggagatgcagagagaaacgcaggggggtcacctgtgactgtgccttctcagcctatgatgggccgttctgctccaatgagatttccgcatattttgcaactggctcctcaatgacataccattttcaagaacattacactttaagtgaaaactccagctctctcgtttcttcattacacagagatgtaacattgaccagagaaatgatcacactgagcttccgaaccacacgaactccgagcttattgctgtatgtgagctctttctatgaggaatacctttcagttatcctcgccaacaatggaagtttgcagattaggtacaagctagatagacatcaaaatcctgatgcatttacctttgattttaaaaacatggctgatgggcaacttcaccaagtgaagattaacagagaagaagctgtggtcatggtagaggttaaccagagcacaaagaaacaagtcatcttgtcctcagggacagaattcaacgccgtcaaatctctcatattgggaaaggttttagaggctgccggcgcggacccggacacaaggcgggcggcgactagtggcttcactggctgcctctcggcggtgcgcttcggccgcgctgctcccctgaaggcggcgctgcgccccagcggcccctcccgggtcaccgtccgcggccacgtggcccctatggcccgctgcgcagcgggggcggcgtccggctccccggcgcgggaactggctccccgactcgcggggggcgcaggtcgttctggaccagcggatgagggagagcccttggttaatgcagacagaagagactctgctgtcatcggaggtgtgatagcagtggtgatatttattttgctttgcatcactgccatagccatacgcatctatcaacagagaaagttacgcaaagaaaatgagtcaaaagtctcaaaaaaagaagagtgctaggacagctctaaacagtgagctcgatgtgcaaaacgcagtccatgaaaaccagaaagagcgagtcttctgattggcagctgtggctgtctctatcatcgtgactgtggacttccctgctgttgccatcagggtgcacacaagcaggtgcagtgctgtcacctggctgaagacctgcagcctcggagcctctgggaggtccctttctccctcggtgaaacacagtcctccacatcaatttccaaacaatgaattaggtatggccattcatcactgttcagtagtttccccgtccaaaggctctcttccaaaactgcagtttgatctgtgttaataattgtggggttttagatgagaaaatggctataaagctgtggccctactttattttttaaaaatgacagaacttttgttcagatgtaaaagacaaaattgcactttaatgttttttgttacttgaaaacatatctgggatccctttttttggtcctctgctgatatttataaaacaagaaatgcttcttggactaccttcactggcatttccatagtcctggaatccagagccaagtggcctatctaaaattcacagcccttttattctcctgtgtgatggttaatacaacacagttgaagcctggaaacactaccattatttttggtgtattgctttttctaattgactgtttttaatgattttgatacattttaatgttgaaattaatattgaatgttagctatgaaattttagtattgaattttataatggaacagaacattggtaggtaacaagatgcaagaggatgtcaatacaagattgtctgcctgtttttctttgtaatttgtaattacagtttttgtaacttgtgattatgtttttaactaaatttaccaccagatacaaacaatacttcttacacagagttatcctttatttatatcattaagacgtgaatgaaacatcatcctaacttacttccccaagatattgagaggtcatatctgtttttctttatcattcatttctttttctaaaagttgttactgatatgcttttgatttcctatgactctattatgttgtacagaacatcttttcaatttattaaaaaaatagcttaactgaa

SEQ ID NO: 228993 - DNA, 3867 bp, Artificial Sequence
  derived and/or modified sequence
atggccagcgtggcctgggccgtgctgaaggtgctgctgctgctgcccacccagacctggagccccgtgggcgccggcaacccccccgactgcgacgcccccctggccagcgccctgcccagaagcagcttcagcagcagcagcgagctgagcagcagccacggccccggcttcagcagactgaacagaagagacggcgccggcggctggacccccctggtgagcaacaagtaccagtggctgcagatcgacctgggcgagagaatggaggtgaccgccgtggccacccagggcggctacggcagcagcgactgggtgaccagctacctgctgatgttcagcgacggcggcagaaactggaagcagtacagaagagaggagagcatctggggcttccccggcaacaccaacgccgacagcgtggtgcactacagactgcagccccccttcgaggccagattcctgagattcctgcccctggcctggaaccccagaggcagaatcggcatgagaatcgaggtgtacggctgcgcctacaagagcgaggtggtgtacttcgacggccagagcgccctgctgtacagactggacaagaagcccctgaagcccatcagagacgtgatcagcctgaagttcaaggccatgcagagcaacggcatcctgctgcacagagagggccagcacggcaaccacatcaccctggagctgatcaagggcaagctggtgttcttcctgaacagcggcaacgccaagctgcccagcaccatcgcccccgtgaccctgaccctgggcagcctgctggacgaccagcactggcacagcgtgctgatcgagctgctggacacccaggtgaacttcaccgtggacaagcacacccaccacttccaggccaagggcgacagcagctacctggacctgaacttcgagatcagcttcggcggcatccccacccccggcagaagcagagccttcagaagaaagagcttccacggctgcctggagaacctgtactacaacggcgtggacgtgaccgagctggccaagaagcacaagccccagatcctgatgatgggcaacgtgagcttcagctgcccccagccccagaccgtgcccgtgaccttcctgagcagcagaagctacctggccctgcccggcaacagcggcgaggacaaggtgagcgtgaccttccagttcagaacctggaacagagccggccacctgctgttcggcgagctgagaagaggcagcggcagcttcgtgctgttcctgaaggacggcaagctgaagctgagcctgttccagcccggccagagccccagaaacgtgaccgccggcgccggcctgaacgacggccagtggcacagcgtgagcttcagcgccaagtggagccacatgaacgtggtggtggacgacgacaccgccgtgcagcccctggtggccgtgctgatcgacagcggcgacacctactacttcggcggctgcctggacaacagcagcggcagcggctgcaagagccccctgggcggcttccagggctgcctgagactgatcaccatcggcgacaaggccgtggaccccatcctggtgcagcagggcgccctgggcagcttcagagacctgcagatcgacagctgcggcatcaccgacagatgcctgcccagctactgcgagcacggcggcgagtgcagccagagctgggacaccttcagctgcgactgcctgggcaccggctacaccggcgagacctgccacagcagcctgtacgagcagagctgcgaggcccacaagcacagaggcaaccccagcggcctgtactacatcgacgccgacggcagcggccccctgggccccttcctggtgtactgcaacatgaccgccgacgccgcctggaccgtggtgcagcacggcggccccgacgccgtgaccctgagaggcgcccccagcggccaccccagaagcgccgtgagcttcgcctacgccgccggcgccggccagctgagaagcgccgtgaacctggccgagagatgcgagcagagactggccctgagatgcggcaccgccagaagacccgacagcagagacggcacccccctgagctggtgggtgggcagaaccaacgagacccacaccagctggggcggcagcctgcccgacgcccagaagtgcacctgcggcctggagggcaactgcatcgacagccagtactactgcaactgcgacgccggcagaaacgagtggaccagcgacaccatcgtgctgagccagaaggagcacctgcccgtgacccagatcgtgatgaccgacgccggcagaccccacagcgaggccgcctacaccctgggccccctgctgtgcagaggcgaccagagcttctggaacagcgccagcttcaacaccgagaccagctacctgcacttccccgccttccacggcgagctgaccgccgacgtgtgcttcttcttcaagaccaccgtgagcagcggcgtgttcatggagaacctgggcatcaccgacttcatcagaatcgagctgagagcccccaccgaggtgaccttcagcttcgacgtgggcaacggcccctgcgaggtgaccgtgcagagccccacccccttcaacgacaaccagtggcaccacgtgagagccgagagaaacgtgaagggcgccagcctgcaggtggaccagctgccccagaagatgcagcccgcccccgccgacggccacgtgagactgcagctgaacagccagctgttcatcggcggcaccgccaccagacagagaggcttcctgggctgcatcagaagcctgcagctgaacggcgtggccctggacctggaggagagagccaccgtgacccccggcgtggagcccggctgcgccggccactgcagcacctacggccacctgtgcagaaacggcggcagatgcagagagaagagaagaggcgtgacctgcgactgcgccttcagcgcctacgacggccccttctgcagcaacgagatcagcgcctacttcgccaccggcagcagcatgacctaccacttccaggagcactacaccctgagcgagaacagcagcagcctggtgagcagcctgcacagagacgtgaccctgaccagagagatgatcaccctgagcttcagaaccaccagaacccccagcctgctgctgtacgtgagcagcttctacgaggagtacctgagcgtgatcctggccaacaacggcagcctgcagatcagatacaagctggacagacaccagaaccccgacgccttcaccttcgacttcaagaacatggccgacggccagctgcaccaggtgaagatcaacagagaggaggccgtggtgatggtggaggtgaaccagagcaccaagaagcaggtgatcctgagcagcggcaccgagttcaacgccgtgaagagcctgatcctgggcaaggtgctggaggccgccggcgccgaccccgacaccagaagagccgccaccagcggcttcaccggctgcctgagcgccgtgagattcggcagagccgcccccctgaaggccgccctgagacccagcggccccagcagagtgaccgtgagaggccacgtggcccccatggccagatgcgccgccggcgccgccagcggcagccccgccagagagctggcccccagactggccggcggcgccggcagaagcggccccgccgacgagggcgagcccctggtgaacgccgacagaagagacagcgccgtgatcggcggcgtgatcgccgtggtgatcttcatcctgctgtgcatcaccgccatcgccatcagaatctaccagcagagaaagctgagaaaggagaacgagagcaaggtgagcaagaaggaggagtgctag

SEQ ID NO: 228994 - DNA, 3120 bp, Artificial Sequence
  derived and/or modified sequence
atggaggtgaccgccgtggccacccagggcggctacggcagcagcgactgggtgaccagctacctgctgatgttcagcgacggcggcagaaactggaagcagtacagaagagaggagagcatctggggcttccccggcaacaccaacgccgacagcgtggtgcactacagactgcagccccccttcgaggccagattcctgagattcctgcccctggcctggaaccccagaggcagaatcggcatgagaatcgaggtgtacggctgcgcctacaagagcgaggtggtgtacttcgacggccagagcgccctgctgtacagactggacaagaagcccctgaagcccatcagagacgtgatcagcctgaagttcaaggccatgcagagcaacggcatcctgctgcacagagagggccagcacggcaaccacatcaccctggagctgatcaagggcaagctggtgttcttcctgaacagcggcaacgccaagctgcccagcaccatcgcccccgtgaccctgaccctgggcagcctgctggacgaccagcactggcacagcgtgctgatcgagctgctggacacccaggtgaacttcaccgtggacaagcacacccaccacttccaggccaagggcgacagcagctacctggacctgaacttcgagatcagcttcggcggcatccccacccccggcagaagcagagccttcagaagaaagagcttccacggctgcctggagaacctgtactacaacggcgtggacgtgaccgagctggccaagaagcacaagccccagatcctgatgatgggcaacgtgagcttcagctgcccccagccccagaccgtgcccgtgaccttcctgagcagcagaagctacctggccctgcccggcaacagcggcgaggacaaggtgagcgtgaccttccagttcagaacctggaacagagccggccacctgctgttcggcgagctgagaagaggcagcggcagcttcgtgctgttcctgaaggacggcaagctgaagctgagcctgttccagcccggccagagccccagaaacgtgaccgccggcgccggcctgaacgacggccagtggcacagcgtgagcttcagcgccaagtggagccacatgaacgtggtggtggacgacgacaccgccgtgcagcccctggtggccgtgctgatcgacagcggcgacacctactacttcggcggctgcctggacaacagcagcggcagcggctgcaagagccccctgggcggcttccagggctgcctgagactgatcaccatcggcgacaaggccgtggaccccatcctggtgcagcagggcgccctgggcagcttcagagacctgcagatcgacagctgcggcatcaccgacagatgcctgcccagctactgcgagcacggcggcgagtgcagccagagctgggacaccttcagctgcgactgcctgggcaccggctacaccggcgagacctgccacagcagcctgtacgagcagagctgcgaggcccacaagcacagaggcaaccccagcggcctgtactacatcgacgccgacggcagcggccccctgggccccttcctggtgtactgcaacatgaccgccgacgccgcctggaccgtggtgcagcacggcggccccgacgccgtgaccctgagaggcgcccccagcggccaccccagaagcgccgtgagcttcgcctacgccgccggcgccggccagctgagaagcgccgtgaacctggccgagagatgcgagcagagactggccctgagatgcggcaccgccagaagacccgacagcagagacggcacccccctgagctggtgggtgggcagaaccaacgagacccacaccagctggggcggcagcctgcccgacgcccagaagtgcacctgcggcctggagggcaactgcatcgacagccagtactactgcaactgcgacgccggcagaaacgagtggaccagcgacaccatcgtgctgagccagaaggagcacctgcccgtgacccagatcgtgatgaccgacgccggcagaccccacagcgaggccgcctacaccctgggccccctgctgtgcagaggcgaccagagcttctggaacagcgccagcttcaacaccgagaccagctacctgcacttccccgccttccacggcgagctgaccgccgacgtgtgcttcttcttcaagaccaccgtgagcagcggcgtgttcatggagaacctgggcatcaccgacttcatcagaatcgagctgagagcccccaccgaggtgaccttcagcttcgacgtgggcaacggcccctgcgaggtgaccgtgcagagccccacccccttcaacgacaaccagtggcaccacgtgagagccgagagaaacgtgaagggcgccagcctgcaggtggaccagctgccccagaagatgcagcccgcccccgccgacggccacgtgagactgcagctgaacagccagctgttcatcggcggcaccgccaccagacagagaggcttcctgggctgcatcagaagcctgcagctgaacggcgtggccctggacctggaggagagagccaccgtgacccccggcgtggagcccggctgcgccggccactgcagcacctacggccacctgtgcagaaacggcggcagatgcagagagaagagaagaggcgtgacctgcgactgcgccttcagcgcctacgacggccccttctgcagcaacgagatcagcgcctacttcgccaccggcagcagcatgacctaccacttccaggagcactacaccctgagcgagaacagcagcagcctggtgagcagcctgcacagagacgtgaccctgaccagagagatgatcaccctgagcttcagaaccaccagaacccccagcctgctgctgtacgtgagcagcttctacgaggagtacctgagcgtgatcctggccaacaacggcagcctgcagatcagatacaagctggacagacaccagaaccccgacgccttcaccttcgacttcaagaacatggccgacggccagctgcaccaggtgaagatcaacagagaggaggccgtggtgatggtggaggtgatcccccagatgcagaagagcaactag

SEQ ID NO: 228995 - DNA, 3867 bp, Artificial Sequence
  derived and/or modified sequence
atggcgtccgtcgcatgggccgttctgaaggtgcttctgttattgcccacccagacttggagcccagtcggagctggcaacccacctgattgcgatgcccctctcgcatctgctcttcctagaagttcgttctcaagctcctctgaactgtctagctcccacggacctggatttagccgtctgaacaggagagatggagcgggtgggtggaccccactggtatcaaacaaataccaatggctccaaattgatttaggagagcgaatggaggtgacagctgtagctacccaaggtggttatgggagttccgattgggtgaccagctacttgttaatgttcagcgatggggggcggaactggaaacagtatagaagggaagagagtatttggggtttccctggcaacaccaacgctgactccgtcgttcattacagacttcagcctcccttcgaggcccgtttcctacggttcctgccactcgcatggaacccgcggggtagaattgggatgcgaatcgaggtgtacgggtgcgcgtataagtcggaggtcgtctattttgacggacagtcagcgctgctctatagactcgataaaaaaccattgaagcccataagagatgtgatttcactaaaatttaaagccatgcagtctaatgggatattacttcatagggagggccagcatggaaaccatatcaccttagaactgatcaaaggcaaactcgtcttctttttaaatagcgggaacgccaaacttccaagtaccattgcccccgttacacttaccctcggttcattactagatgaccagcattggcacagcgtgttgattgaactgctggacactcaggtgaatttcacagtagacaagcacacccaccatttccaggctaagggggatagttcctacctggaccttaactttgaaattagctttggcggcattcccacacctggcagatcccgtgccttccgccgaaagtcattccatggttgtctggaaaacttatactacaacggcgtcgatgtgacagaactggccaagaaacacaagccacagatcctgatgatgggtaacgtgagctttagttgcccgcagcctcagaccgttcccgtgacgtttttgtccagccgatcatatctagctctgcctggcaatagcggggaggacaaagtgtctgtgacatttcagttcaggacttggaatagagcggggcacctcctgttcggtgaactgcgcagaggtagtgggagttttgtgctcttcctgaaagacggtaaactcaagctttcactgtttcagccagggcagagcccaaggaacgtgacagccggcgctggtctgaacgatggtcagtggcacagcgtgtcgttctctgctaagtggagccatatgaacgtggtggtagatgacgatactgcagtgcaacccctggtcgccgtgctgatcgattctggggacacttactacttcgggggctgtctggataactcttcaggcagtgggtgcaagagtcccctgggagggtttcagggttgcctcaggctcattacgatcggggacaaagctgtcgatccgattctggtgcagcagggggccctcggcagtttccgtgatctgcaaatcgacagttgcggtattacggacaggtgcttgccgtcctactgcgaacatggtggtgaatgcagccagtcatgggatacattcagttgcgattgtctgggaacgggctatacaggtgagacttgccattcatcactgtacgagcaatcatgcgaagctcataaacaccgagggaaccctagcggattgtattacattgacgccgacggctctggccctctaggcccgtttttagtatactgtaatatgactgctgatgccgcatggaccgtggtccagcacggaggtcccgacgccgtcacattacgaggagcaccttctgggcacccacggtctgctgtgtcatttgcctatgctgctggagcaggacagcttcgtagtgccgtcaacctggccgaacggtgtgagcagagactggctctgcgttgcggcactgccaggcggcccgattccagagatggaaccccgctttcctggtgggtggggcgaactaatgagactcacacatcatggggtggaagtttacctgacgctcagaaatgcacgtgtggactcgaaggaaattgcatcgatagccagtactactgcaactgcgatgccggccgcaacgagtggacttctgacactattgttctgtcacaaaaggaacacctgcccgttacccagatcgtgatgacggacgcgggtagaccacactctgaggctgcttataccctcggtcccttgctgtgtagaggcgaccagagcttctggaactcagcctcctttaacaccgaaactagctacctccacttccctgcttttcacggggaacttactgcggatgtgtgtttcttttttaaaaccaccgtgtcgtccggtgtgtttatggagaatctgggcatcaccgatttcataagaatcgaactgagagccccaacagaggtgaccttctcattcgacgtgggaaatggcccctgtgaggtgacagtgcagagtccgactcccttcaacgacaatcagtggcatcatgtccgggccgaacggaatgtgaagggcgcaagcctccaggtagatcaactgcctcagaaaatgcagcccgcccctgcggacgggcatgtgaggttacagctcaacagccagctgttcataggcggaacagccacacgccagcggggtttcctagggtgcataaggagcctgcagttgaacggagtggcgctggacttagaggaaagagccacagtcacacccggcgtcgagcccgggtgcgcaggccattgtagtacctacggacacttatgccgcaatggaggtcggtgtcgcgagaagcggcgcggagtgacttgtgactgcgcattcagcgcatatgatggacctttctgctcaaatgaaattagcgcgtactttgcgactgggtcttccatgacttaccacttccaggagcattatactctctccgaaaactccagcagccttgtaagcagtttgcacagggacgtcacgctgaccagagagatgattactctgtcattccgaactacgcggacacctagcctcctactttacgtgtcttctttctacgaggagtatctgtccgttattctcgctaacaacggctcgctgcagattcgctataagctggaccgtcatcaaaaccccgatgcttttacgttcgatttcaagaatatggctgacggacagctgcaccaggtaaaaatcaacagagaggaggccgtggtcatggtagaggttaatcaaagcacaaagaagcaggtcattctctcctccggaacagaatttaacgctgtcaaatccctcattctggggaaggttcttgaagctgctggggccgaccccgacactagacgggctgccacatccggtttcactgggtgtcttagcgccgtcagatttggaagggccgcacctctcaaggccgccctgcgtcccagcggcccctcaagagtaacagttagaggccatgtggcacctatggctagatgcgcagcgggcgccgccagcggaagccccgcaagggagttagcccctcggctggcaggcggggccgggcggagcggccccgctgacgagggcgagcctctcgtgaatgccgacagacgtgactcagcggtgattggcggggtgatcgccgtggttatttttattcttctatgtattacggcgattgctattagaatctatcagcaacgcaaactgagaaaagagaacgagtctaaagtgagcaagaaagaagagtgctag

SEQ ID NO: 228996 - DNA, 3120 bp, Artificial Sequence
  derived and/or modified sequence
atggaggtgactgcagtagcgacccagggtgggtacggctcctctgactgggtgacatcatacctgcttatgtttagcgacggggggcggaattggaaacaatataggcgcgaagaaagtatctggggattcccaggtaacaccaatgctgactccgtggtgcactatcgcctgcaaccgccgttcgaagcacgcttcttgcggtttctaccgctggcctggaaccctagaggccgcattgggatgcgcattgaagtttacggctgcgcttacaaatccgaagttgtttatttcgacggtcagagtgctctcctgtacaggttggataagaaacctctgaagcctatcagagatgttatcagtctcaagtttaaggccatgcaatctaacggtatcctcctacaccgagagggacagcacggaaaccatatcacactggagctgatcaaaggaaagctggtattctttttgaacagcgggaatgccaagctgccatctactattgcacctgttaccttgaccctaggctccctactggacgaccaacactggcattctgtgctgatcgaattactcgacacacaggtgaactttacagtagacaagcacacacatcactttcaggctaagggcgattcaagctacctcgacctgaacttcgaaatcagtttcggcggaatcccaacacctggtagatcaagagcattccgccggaagtcttttcacggctgcttggaaaacctgtattacaacggggtggacgtaacagaactcgctaagaaacataagccgcagattctaatgatgggcaatgtaagtttctcttgccctcagccgcagacagtcccagtcaccttcctgagttcccggagttaccttgccttgcctggcaacagcggagaggataaggtgagcgtaacgtttcagttccgcacttggaatagggcaggccacctgcttttcggtgagctcagaagaggctccgggtcctttgtgcttttcctcaaggatggaaagctaaagctcagccttttccaacctgggcagagccctcgaaacgtgacggctggggcgggcctgaacgatggccagtggcatagcgtaagcttttccgctaagtggagtcacatgaacgtggtggttgatgatgacactgcagttcagcccttagtcgcagtgctgatcgatagcggagacacatattattttggcgggtgcctggataacagttctgggtctggctgcaagtcaccactcggtggattccaggggtgtctcagactaatcaccatcggggacaaggccgtcgaccccatcctagtgcaacaaggggcattaggaagtttccgagaccttcaaattgattcatgcggtataacggatcgctgcctgcctagttattgcgaacacggcggagagtgtagccaaagttgggacacctttagctgtgattgtctgggaaccgggtatacaggagaaacatgtcactcaagcttgtacgagcagagctgcgaggcacacaagcaccggggaaaccccagcggtttgtattatatagatgcggatggctctggcccgcttggaccttttctggtttattgtaacatgactgctgacgcagcttggactgttgttcaacacggaggtcctgacgctgtgactttaagaggcgctccaagcggacacccaagatcagcagtgagcttcgcatatgctgccggagcaggacagctacgttccgcagtgaacctggccgaacggtgcgagcagcgcctggccctgcggtgcggaactgcacggcgtcccgattctcgggacgggactcctctgtcctggtgggtgggccggaccaacgagacccacacgtcttggggcggcagcctcccagacgcccagaagtgcacttgcgggctcgaggggaactgcatagactcccagtattattgtaattgtgatgccggacggaacgagtggacgagtgataccatcgtgctctcccagaaagaacatttgcccgtgactcagatcgtgatgaccgatgctggtcggcctcattccgaagccgcatacacattgggaccactgctctgccggggggaccagtcattttggaactccgcaagcttcaacaccgaaactagctacctccacttcccagcctttcatggggagttaacagctgacgtgtgctttttttttaaaactaccgtgagttccggagtgttcatggagaacctcggcattaccgactttattcggatagagcttcgagcaccaaccgaagtgacgttcagttttgacgtcggaaatggaccttgcgaagtgacagtgcaatctcctaccccatttaacgacaatcagtggcaccacgtccgagcagaaaggaacgtcaagggcgcatcccttcaggtggaccagctgccacagaaaatgcagcccgcccccgcagatggccatgtcaggctgcaactgaatagtcagctgtttattggaggaaccgccacaagacagagaggttttctaggttgcatccgtagcctgcagttgaacggcgtggccctggacctggaagagcgagccactgtcactcccggcgtcgagcccggatgcgcaggccactgctctacctacggtcatctttgcagaaacggagggagatgcagggagaaacggcgaggggtgacctgcgactgcgcgtttagtgcgtatgacggccccttctgtagcaacgagatctccgcctattttgccaccggcagttctatgacataccactttcaggaacattatacacttagtgagaattcatcttctctggttagtagcttgcaccgggatgttacgctgactcgcgagatgataacattgtccttccggacgaccaggaccccaagcttgctcttatatgtgtctagtttctatgaggagtacctgtctgtgatactggcgaataacggcagtctgcagatccgctacaagttggataggcatcagaatcccgatgcctttacctttgacttcaagaacatggcggacggccagctacatcaggtgaagataaatagggaagaggccgtagttatggttgaggtgatcccgcagatgcagaagagcaattag

SEQ ID NO: 228997 - DNA, 4885 bp, Artificial Sequence
  derived and/or modified sequence
ggactccacttgtgtcaaataaataccaatggctgcaaattgaccttggagagagaatggaggtcactgctgtcgccacccaaggaggatatgggagctctgactgggtgaccagctacctcctgatgttcagtgatggtgggagaaactggaagcagtatcgccgagaagaaagcatctggggttttccaggaaacacaaacgcagacagtgtggtgcactacagactccagcctccctttgaagccaggttcctgcgctttctccctttagcctggaaccctaggggcaggattgggatgcggatcgaagtgtacggatgtgcatataaatctgaggtggtttattttgatggacaaagtgctctgctgtatagacttgataaaaaacctttaaaaccaataagagacgttatttctttgaaatttaaagccatgcagagcaatggaattctacttcacagagaaggacaacatggaaatcacattactctggaattaattaaaggaaagcttgtcttttttcttaattcaggcaatgctaagctgccttccactattgctcctgtgaccctcaccctgggcagcctgctggacgaccagcactggcattccgtcctcatcgagctcctcgacacgcaggtcaacttcaccgtggacaaacacactcatcatttccaagcaaagggagattccagttacttggatcttaattttgagatcagctttgggggaattccgacacccggaagatcgcgggcattcagacgtaaaagctttcatgggtgtttagaaaatctttattataatggagtggatgttaccgaattagccaagaaacacaaaccacagatcctcatgatgggaaatgtgtccttctcatgtccacagccacagactgtccctgtgacttttctgagctccaggagttatctggctctgccaggcaactctggggaggacaaagtgtctgtcacttttcaatttcgaacgtggaacagagcaggacatttgcttttcggcgaacttcgacgtggttcagggagtttcgtcctctttcttaaggatggcaagctcaaactgagtctcttccagccgggacagtcaccaaggaatgtcacagcaggtgctggattaaacgatgggcagtggcactctgtgtccttctctgccaagtggagccatatgaatgtggtggtggacgatgacacagctgttcagcccctggtggctgtgctcattgattcaggtgacacctattattttggaggctgcctggacaacagctctggctctggatgtaaaagccccctgggagggtttcagggctgcctaaggctcatcaccattggtgacaaagcggtggatcccatcttagtacagcagggggcgctggggagtttcagggacctccagatagactcctgcggcatcacagacaggtgcttgcccagctactgtgagcatgggggcgagtgttcccagtcgtgggacaccttctcctgtgactgtctaggcacaggctatacgggcgagacctgccattcctctctctacgagcagtcttgtgaagcccacaagcaccgagggaacccgtctgggctttactatattgatgcagatggaagtggccccctgggaccatttcttgtgtactgcaatatgacagcagacgccgcgtggacggtggtgcagcacggtggccccgacgcggtgaccctccgaggtgcccccagcgggcacccgcgctcggctgtgtccttcgcgtacgcagcgggcgcggggcagctgcggtccgcggtgaacctggcggagcgctgcgagcagcggctggctctgcgctgcgggacggcgcggcgcccggactcacgagatggaaccccactgagctggtgggttggaagaaccaatgaaacacacacttcctggggaggttctctgcctgatgctcaaaagtgtacttgtggattagaggggaactgcattgattctcagtattactgcaactgtgatgctggccggaatgaatggactagtgacacaatagtcctttcccaaaaggagcacctgccagtcactcagattgtgatgacagacgcaggccgaccacattccgaagcagcttatacactggggccactgctctgccgcggagatcagtcattctggaattcagcttccttcaacactgagacttcataccttcatttccctgctttccacggagaactcactgctgacgtgtgcttcttttttaagaccacagtttcctccggggtgtttatggagaacctggggatcacagatttcatcaggattgagctgcgtgctcccacagaagtgaccttttccttcgatgtggggaatggaccttgtgaggtcacggtgcagtcacccactccctttaatgacaatcagtggcaccacgtgagggcagagagaaatgttaaaggagcgtctcttcaagttgatcagcttcctcagaagatgcagcctgcccctgctgatgggcacgttcgtttacagctcaacagccagctcttcattggtggaacggccaccagacagagaggctttctaggatgcattcggtctctgcagttgaacggggtggccctggatctggaagaaagagccacagtgacgccaggagtggagccagggtgtgcaggacactgcagcacctatggacacttgtgtcgcaatggagggagatgcagagagaaacgcaggggggtcacctgtgactgtgccttctcagcctatgatgggccgttctgctccaatgagatttccgcatattttgcaactggctcctcaatgacataccattttcaagaacattacactttaagtgaaaactccagctctctcgtttcttcattacacagagatgtaacattgaccagagaaatgatcacactgagcttccgaaccacacgaactccgagcttattgctgtatgtgagctctttctatgaggaatacctttcagttatcctcgccaacaatggaagtttgcagattaggtacaagctagatagacatcaaaatcctgatgcatttacctttgattttaaaaacatggctgatgggcaacttcaccaagtgaagattaacagagaagaagctgtggtcatggtagaggtaatcccacaaatgcaaaagtcaaactaactaatattattattttaagaacaaataatctaatgaaaaaatttgataatattaatagaagagcaacccattcagtgctgctcttccataagtcaagaagaagccaaatatggccaggatctgggagagaggaggtggttgtttattctgtattgctttgttttgtttgtttagcaatgcaattctgtcaaaggtattattaatattttactatttaaaatatcaaaatatctatttgttttactttactcaataggggaatgttctctagtttatcatagtgactgctggtggaatctattcattgatactgcagtgggaacttgtcttattctgattataaaagaacaaatactttagcaacttaaaaacacggtttaaaagcacacaacatagttattaaaatgggaataagtaagaaaatagacctgagtcaccacagaggaagtaaattacacattgtcatcggcattggaaggaaaatatactgtatagagaacaacaatgcttggttttatgtttcagattttctccacagaatgagtacatatttaagtttaaaacaaccaattccatctttttcatggattctgccaattatagatccttccattatgaagaagagtaaagccagcaagtgggtacatcgtggatagagtggtagctgatggcatcataggaattgcttataaaatagcttctctttctaaatgattaattatttgaaggtggcttcttgagcttttgtaatggtacttaaaagtgatttattttcatctttcctttcctcatcttcctttgcttccttatcattaaaattgtactttctgttgatgtttgcttctcatgggacatctaataggttaaccagagcacaaagaaacaagtcatcttgtcctcagggacagaattcaacgccgtcaaatctctcatattgggaaaggttttaggtaagtaggagaaagagctttttcccaaataagtgtcatgtcacaaactctggaagcattcatcatgctgaaagaagctccttgtcttacttgaataataatttcacagtgagtgacaatcaaggtgcaaactgtactcttgcctgagtgtacatataatcatgactaagtgctacctgtgagatgtgcaagggcgttcctggaaaaatacctccacacttaacctctcacttggcaatcatgcataatgaatcacggtatttttctaatccttcttgaaaagtgaaatgttgtcaaagctgacacgaagttcacagattatgtatgtattaatcaacatcaactccggagaccatcattcaatgataaaactacgtttgagttgaacacaagagaaaaaactggtaatcttattacagcagatgaatacagttttatttttctctcaagccctgctttgcctgttgtttccatcctttttgactttagtatctaacaggaatggggaggcatattcataaatatctgttacgcaaggtagaaagttacagtaattgtctatcatattgtctatcataatctgttgtaaaagcacagttagctttacatttaataaaggaactgaggaaagtaatctttttttaaaaaaacccatcttatgtaactcaattaagaaaatgaactatactttaatattaggatcaaaaagttgaataatatttattatatacatctttgtttccttccaaataaaggaga

SEQ ID NO: 228998 - DNA, 3867 bp, Artificial Sequence
  derived and/or modified sequence
atggcctctgtggcctgggccgtgctgaaggtgctgctgctgctgcccacccagacctggagccctgtgggcgccggcaaccccccagactgtgatgcccccctggccagcgccctgcccaggagcagcttcagcagcagcagcgagctgagcagcagccacggccctggcttcagccggctgaacagaagagatggagctgggggctggacccccctggtgagcaacaagtaccagtggctgcagattgacctgggggagaggatggaggtgacagctgtggccacccagggcggctacggcagcagtgactgggtgaccagctacctgctgatgttcagtgatggcggcaggaactggaagcagtaccgccgggaggagagcatctggggcttccctggcaacaccaatgctgacagcgtggtgcactaccgcctgcagcccccatttgaggcccgcttcctgcgcttcctgcccctggcctggaacccccggggccgcatcggcatgagaattgaggtgtatggctgtgcctacaagtctgaggtggtgtactttgatggccagagcgccctgctgtaccgcctggacaagaagcccctgaagcccatcagagatgtgatcagcctgaagttcaaggccatgcagagcaatggcatcctgctgcaccgggagggccagcacggcaaccacatcaccctggagctgatcaagggcaagctggtgttcttcctgaacagcggaaatgccaagctgcccagcaccatcgcccctgtgaccctgaccctgggcagcctgctggatgaccagcactggcacagcgtgctgattgagctgctggacacccaggtgaacttcaccgtggacaagcacacccaccacttccaggccaagggggacagcagctacctggacctgaactttgagatcagctttggaggcatccccaccccaggccgcagccgggccttccggaggaagagcttccacggctgcctggagaacctgtactacaatggagtggatgtgacagagctggccaagaagcacaagccccagatcctgatgatgggaaatgtgtccttcagctgcccccagccccagacagtgcctgtgaccttcctgagcagccgcagctacctggccctgcccggcaacagcggggaggacaaggtgtctgtgaccttccagttccgcacctggaacagagctggccacctgctgtttggagagctgcggcggggcagcggcagctttgtgctcttcctgaaggatggcaagctgaagctgagcctcttccagcccggccagagccccagaaatgtgacagctggggccggcctgaatgatggccagtggcacagcgtgtccttcagcgccaagtggagccacatgaatgtggtggtggatgatgacacagctgtgcagcccctggtggccgtgctgattgattctggggacacctactactttggaggctgcctggacaacagcagcggcagcggctgcaagagccccctgggcggcttccagggctgcctgcggctcatcaccatcggggacaaggctgtggaccccatcctggtgcagcagggcgccctgggcagcttccgggacctgcagattgacagctgtggcatcacagaccgctgcctgcccagctactgtgagcacggcggagaatgttcccagagctgggacaccttcagctgtgactgcctgggcaccggctacacaggagagacctgccacagcagcctgtatgagcagagctgtgaggcccacaagcaccggggcaaccccagcggcctgtactacattgatgctgatggcagcggccccctgggccccttcctggtgtactgcaacatgacagcagatgctgcctggacagtggtgcagcacggcggcccagatgctgtgaccctgcggggggcccccagcggccaccccaggtctgctgtgtcctttgcctatgctgctggagctggccagctgcggtctgctgtgaacctggccgagcgctgtgagcagaggctggccctgcgctgtggcacagcccggcggccagacagcagagatggcacccccctgtcctggtgggtgggccgcaccaatgagacccacacctcctggggcggcagcctgcctgatgcccagaagtgcacctgtggcctggagggcaactgcatcgacagccagtactactgcaactgtgatgctggaagaaatgagtggaccagtgacaccatcgtgctgagccagaaggagcacctgcctgtgacccagatcgtgatgacagatgctggccggccccacagcgaggccgcctacaccctgggccccctgctgtgccgcggggaccagagcttctggaacagcgccagcttcaacacagagaccagctacctgcacttccctgccttccacggggagctgacagcagatgtgtgcttcttcttcaagaccaccgtgtcctctggagtcttcatggagaacctgggcatcacagacttcatccgcatcgagctgcgggcccccacagaggtgaccttctcctttgatgtgggcaatggcccctgtgaggtgacagtgcagagccccacccccttcaatgacaaccagtggcaccacgtgcgggcagagagaaatgtgaagggggccagcctgcaggtggaccagctgccccagaagatgcagcctgccccagcagatggccacgtgcggctgcagctgaacagccagctgttcatcggcggcacagccacccggcagaggggcttcctgggctgcatccgcagcctgcagctgaatggagtggccctggacctggaggagcgggccaccgtgaccccaggagtggagcccggctgtgccggccactgcagcacctacggccacctgtgcagaaatggaggccgctgccgggagaagagaagaggagtgacctgtgactgtgccttcagcgcctatgatggccccttctgcagcaatgagatcagcgcctactttgccaccggcagctccatgacctaccacttccaggagcactacaccctgtctgagaacagcagcagcctggtgagcagcctgcacagagatgtgaccctgacccgggagatgatcaccctgtccttccgcaccaccaggacccccagcctgctgctgtatgtgagcagcttctatgaggagtacctgagcgtcatcctggccaacaacggcagcctgcagatccgctacaagctggacagacaccagaacccagatgccttcacctttgacttcaagaacatggctgatggccagctgcaccaggtgaagatcaaccgggaggaggccgtggtgatggtggaggtgaaccagagcaccaagaagcaggtgatcctgagcagcggcacagagttcaatgctgtgaagagcctcatcctgggcaaggtgctggaggccgccggggctgaccctgacaccaggagagctgccaccagcggcttcaccggctgcctgtctgctgtgcgcttcggccgggccgcccccctgaaggccgccctgcggcccagcggccccagccgggtgacagtgcggggccacgtggcccccatggcccgctgtgccgccggggccgccagcggcagccctgcccgggagctggccccccggctggccggcggggccggccgcagcggccctgcagatgaaggagagcccctggtgaatgctgacagaagagacagcgctgtgattggaggagtgattgctgtggtgatcttcatcctgctgtgcatcacagccatcgccatccgcatctaccagcagaggaagctgaggaaagaaaatgaaagcaaggtgtccaagaaggaggagtgctag

SEQ ID NO: 228999 - DNA, 3120 bp, Artificial Sequence
  derived and/or modified sequence
atggaggtgacagctgtggccacccagggcggctacggcagcagtgactgggtgaccagctacctgctgatgttcagtgatggcggcaggaactggaagcagtaccgccgggaggagagcatctggggcttccctggcaacaccaatgctgacagcgtggtgcactaccgcctgcagcccccatttgaggcccgcttcctgcgcttcctgcccctggcctggaacccccggggccgcatcggcatgagaattgaggtgtatggctgtgcctacaagtctgaggtggtgtactttgatggccagagcgccctgctgtaccgcctggacaagaagcccctgaagcccatcagagatgtgatcagcctgaagttcaaggccatgcagagcaatggcatcctgctgcaccgggagggccagcacggcaaccacatcaccctggagctgatcaagggcaagctggtgttcttcctgaacagcggaaatgccaagctgcccagcaccatcgcccctgtgaccctgaccctgggcagcctgctggatgaccagcactggcacagcgtgctgattgagctgctggacacccaggtgaacttcaccgtggacaagcacacccaccacttccaggccaagggggacagcagctacctggacctgaactttgagatcagctttggaggcatccccaccccaggccgcagccgggccttccggaggaagagcttccacggctgcctggagaacctgtactacaatggagtggatgtgacagagctggccaagaagcacaagccccagatcctgatgatgggaaatgtgtccttcagctgcccccagccccagacagtgcctgtgaccttcctgagcagccgcagctacctggccctgcccggcaacagcggggaggacaaggtgtctgtgaccttccagttccgcacctggaacagagctggccacctgctgtttggagagctgcggcggggcagcggcagctttgtgctcttcctgaaggatggcaagctgaagctgagcctcttccagcccggccagagccccagaaatgtgacagctggggccggcctgaatgatggccagtggcacagcgtgtccttcagcgccaagtggagccacatgaatgtggtggtggatgatgacacagctgtgcagcccctggtggccgtgctgattgattctggggacacctactactttggaggctgcctggacaacagcagcggcagcggctgcaagagccccctgggcggcttccagggctgcctgcggctcatcaccatcggggacaaggctgtggaccccatcctggtgcagcagggcgccctgggcagcttccgggacctgcagattgacagctgtggcatcacagaccgctgcctgcccagctactgtgagcacggcggagaatgttcccagagctgggacaccttcagctgtgactgcctgggcaccggctacacaggagagacctgccacagcagcctgtatgagcagagctgtgaggcccacaagcaccggggcaaccccagcggcctgtactacattgatgctgatggcagcggccccctgggccccttcctggtgtactgcaacatgacagcagatgctgcctggacagtggtgcagcacggcggcccagatgctgtgaccctgcggggggcccccagcggccaccccaggtctgctgtgtcctttgcctatgctgctggagctggccagctgcggtctgctgtgaacctggccgagcgctgtgagcagaggctggccctgcgctgtggcacagcccggcggccagacagcagagatggcacccccctgtcctggtgggtgggccgcaccaatgagacccacacctcctggggcggcagcctgcctgatgcccagaagtgcacctgtggcctggagggcaactgcatcgacagccagtactactgcaactgtgatgctggaagaaatgagtggaccagtgacaccatcgtgctgagccagaaggagcacctgcctgtgacccagatcgtgatgacagatgctggccggccccacagcgaggccgcctacaccctgggccccctgctgtgccgcggggaccagagcttctggaacagcgccagcttcaacacagagaccagctacctgcacttccctgccttccacggggagctgacagcagatgtgtgcttcttcttcaagaccaccgtgtcctctggagtcttcatggagaacctgggcatcacagacttcatccgcatcgagctgcgggcccccacagaggtgaccttctcctttgatgtgggcaatggcccctgtgaggtgacagtgcagagccccacccccttcaatgacaaccagtggcaccacgtgcgggcagagagaaatgtgaagggggccagcctgcaggtggaccagctgccccagaagatgcagcctgccccagcagatggccacgtgcggctgcagctgaacagccagctgttcatcggcggcacagccacccggcagaggggcttcctgggctgcatccgcagcctgcagctgaatggagtggccctggacctggaggagcgggccaccgtgaccccaggagtggagcccggctgtgccggccactgcagcacctacggccacctgtgcagaaatggaggccgctgccgggagaagagaagaggagtgacctgtgactgtgccttcagcgcctatgatggccccttctgcagcaatgagatcagcgcctactttgccaccggcagctccatgacctaccacttccaggagcactacaccctgtctgagaacagcagcagcctggtgagcagcctgcacagagatgtgaccctgacccgggagatgatcaccctgtccttccgcaccaccaggacccccagcctgctgctgtatgtgagcagcttctatgaggagtacctgagcgtcatcctggccaacaacggcagcctgcagatccgctacaagctggacagacaccagaacccagatgccttcacctttgacttcaagaacatggctgatggccagctgcaccaggtgaagatcaaccgggaggaggccgtggtgatggtggaggtgatcccccagatgcagaagagcaactag

SEQ ID NO: 229000 - DNA, 3867 bp, Artificial Sequence
  derived and/or modified sequence
atggccagcgtggcctgggccgtgctgaaggtgctgctgctgctgccaacgcagacctggagtcccgtaggtgctgggaaccctccagattgtgatgcacctctggcctcagcactaccaagaagttccttctcttcatcatcggagctgagtagttcgcatgggcctggcttctcgcggttgaatcgccgggacggcgctggggggtggacaccgcttgtttccaacaagtaccagtggctgcagatcgatctaggagagcggatggaagtgaccgcagtggccactcagggcggctatggcagcagtgactgggttacctcataccttctgatgttctcagacggtggccgaaattggaaacagtaccgcagagaagagagcatatggggcttccctggaaatacaaatgcagactccgtggtgcactatcgattacagcctccttttgaagcccggtttttgaggttcctcccattggcgtggaatcctaggggacgcatcggcatgagaattgaagtctatgggtgtgcttacaagagcgaagtggtgtacttcgacggtcagagcgctctgttgtatagactcgataaaaaacccctgaaacctatcagagacgtgatttctttgaaatttaaggctatgcagtccaacggcattctacttcatcgggaaggccagcacggaaaccatatcacacttgagctgatcaaagggaagctggtgttctttctgaatagcggcaacgctaaactgccatccacaatcgccccagtgacactgactctcggctcacttctcgatgatcagcactggcactccgttctcatcgaattgctcgacacacaggtgaatttcactgtggataagcacacacaccacttccaagctaagggcgatagctcttatttggaccttaatttcgaaattagtttcggaggaatacctactcccggaagatccagagccttccgtcgcaagagctttcacggttgtcttgagaacctgtattacaacggggtcgacgttactgagctcgcaaagaagcataagcctcagatccttatgatgggcaatgtttctttctcctgtcctcagccgcagactgttcccgtaacgttcttaagttcacgctcttatctcgcccttcccgggaattctggcgaggataaggtgagtgtgactttccagttccgaacctggaaccgcgccggtcacctgctgttcggtgagctccgccgaggttctggctccttcgtgctgttcctgaaagatggaaaactgaagctcagtcttttccagccgggacagagtcctagaaatgtgacagctggcgcgggtttgaacgatgggcagtggcactccgtgtcgttttccgctaagtggtctcatatgaacgttgtcgtcgacgacgataccgcagttcagcctttggtcgccgtgctaatagattctggagacacctattattttgggggctgcttggacaactcttccggaagcggttgtaagagtcctttgggtggatttcagggatgtttaaggctgattacaatcggtgataaggctgtggatcctatattggtgcaacagggagcactgggcagctttagggatttacaaatcgattcatgcgggatcacggacaggtgtctgcccagctattgtgaacacggcggcgaatgctcccagagctgggatactttttcctgtgactgcctgggcactggttacacaggagaaacatgccatagctcgctttatgagcagtcctgcgaagcacataagcatcggggtaatccatccggactgtactacatcgatgcagacggaagcggacccctcggccctttcctcgtatactgcaatatgacagccgacgctgcctggactgtcgtccagcacggtgggccggacgcagtgaccctgagaggtgcccccagcggacaccccagatccgcagtctcctttgcttacgcagctggcgccgggcagctgcgctccgcggtgaacttggctgaaaggtgcgaacaaaggctggccctgagatgtgggacagcaagacgaccagattctcgggacggaacccctcttagttggtgggtcgggcgcaccaatgaaacccacacttcatggggggggagtctgcctgatgcacaaaagtgcacctgcgggttagaggggaactgcatcgactcacagtactattgtaattgcgacgcgggtcggaatgagtggacgtccgatacaatagtgctgagtcaaaaggagcacttgcccgtgacccagattgtcatgaccgatgccggcagaccacattcagaagccgcgtatactctggggccccttctgtgcagaggagatcagtctttctggaattccgccagtttcaatacagaaacgagttacctccactttccagctttccacggagagctgacagccgacgtctgcttcttcttcaaaacaaccgtgagcagcggcgtgttcatggagaacctgggcattaccgatttcattcggattgagctgagggccccaactgaggtcactttttcgttcgacgttggtaacggcccttgtgaagtgaccgtacagtctcccaccccctttaatgacaatcagtggcaccatgtgcgggcagagcgaaatgtgaaaggcgcatccttgcaggtcgatcagcttccccagaaaatgcaacctgccccggcggacggacatgtgcggctgcagctgaacagccaactatttattggaggcacggccacccggcaacggggatttctgggatgtattaggtccctgcagctgaatggggtcgccctcgatcttgaagaaagggccaccgttacacccggcgtcgagcctgggtgcgcaggccattgctctacctacggacacctctgcagaaacgggggtaggtgtcgcgagaaacgccgcggcgtgacttgcgactgtgcattcagcgcatatgatgggccattctgttccaatgagatttcggcctacttcgctaccggttccagtatgacatatcattttcaagagcattatacgttaagcgaaaatagttcctcgctggtctcctcccttcatagggatgtgacactaacgagagaaatgatcacattaagttttagaactaccaggaccccctcactgcttctgtacgtgtccagcttctacgaagaatacctgtcagtgatcctggcgaataacggatctctacagatcagatacaagcttgacaggcatcagaaccctgatgccttcacttttgattttaagaacatggccgacggacagctgcaccaggtgaaaatcaacagagaagaggccgtggtaatggtggaagtaaaccaaagcaccaagaaacaggtcatattgtcttccgggactgaatttaatgcagtcaagtccctaatacttgggaaagtgttggaagcagcaggggccgatcccgacacccggagggccgctacttccggtttcactggatgcctgtccgccgtacggtttgggagagccgcccccctgaaggctgcactgaggccatcggggccctctagggttacagtccgtgggcacgtggctccgatggccaggtgtgccgccggggcagcaagcggttcaccagcgcgcgaactggctccccggctggctgggggagcagggagatctggacccgctgatgagggagaaccccttgtcaatgccgacagaagggacagtgcggtcattggaggagtaatcgcagtggttatctttattctgctgtgcattaccgcaatagctattcgtatatatcagcaaaggaagctcagaaaggaaaacgaatcaaaggtcagcaagaaagaggagtgctag

SEQ ID NO: 229001 - DNA, 3120 bp, Artificial Sequence
  derived and/or modified sequence
atggaggtgaccgccgtggccacccagggcggctacggcagcagcgactgggtgacttcatacctgctcatgtttagtgatggcgggcgtaattggaaacaatacagaagggaggaatcaatttggggatttcctggaaacacgaacgccgattcggtggttcattaccgactgcagccgcccttcgaggccagatttctgcggttcctccctttggcctggaaccccagaggccgcatcggtatgaggatcgaagtatacggatgtgcatacaagtcggaggtggtttacttcgatggccagtccgcactgctataccggcttgacaaaaagcccctcaagcccattcgcgacgtcatcagtcttaagtttaaggcgatgcagtccaatggtattttgttacatagagagggtcagcatggaaatcatattaccctggagctgataaagggtaagctggtgttttttttgaacagcggtaacgccaagttgccctccacaatcgcaccggtaacccttacccttgggtcccttctagacgaccagcactggcatagcgtgctaattgaactgttggatacacaagtgaatttcactgtcgataaacacacccatcacttccaggcaaagggtgactcttcttatctggacctgaattttgaaatatcttttggcggaattcctacgcccggccggagccgagctttcaggaggaagtctttccatggctgccttgagaatctctattacaatggcgtcgatgtgactgagctggcgaagaagcataagccccaaattttgatgatgggcaacgtgtccttttcctgtcctcaaccacagactgtgcctgtgacatttttgagctccagaagttatctggccctcccaggcaatagcggcgaagataaagtttccgtcacatttcagtttcggacgtggaaccgcgcgggccacctgctctttggcgaactgcggaggggctccggatcttttgtgctcttcttaaaagacggcaaattaaaactgagcctgttccagcctggacagtcacccaggaacgttaccgccggtgcagggcttaatgatggtcagtggcacagcgtgtctttttcagcgaagtggagtcatatgaacgtggttgtcgatgatgacacggctgtccagccgctggtggctgtgcttatagattccggagacacttattacttcggagggtgccttgacaactctagcggcagcggatgtaaatccccactggggggcttccagggatgtctgcgtctaatcacaatcggcgacaaagcagtcgaccccatactcgtccagcagggcgcattaggaagttttagggatctacaaatcgactcctgcggcattactgataggtgtctcccatcctattgtgaacatggaggagagtgcagccagtcctgggacacattctcctgcgactgtctgggtaccgggtatactggggagacctgccactcaagtctgtatgaacagtcttgtgaggcccacaagcataggggaaatccaagcggtctgtactacattgatgcggatgggtcaggaccacttggccccttcctcgtgtactgtaatatgacggctgatgctgcctggactgtcgtgcaacatggtggaccggacgccgtaactctgcgtggcgcacctagcggacatcctcgaagtgcagtgagtttcgcgtatgccgctggtgccgggcagctcagatctgctgtgaatctggccgagaggtgcgagcagcgactggctctccggtgcggtaccgcccggcgccccgactcgcgggacggaacccccttaagttggtgggtgggccgcacaaacgaaacccacactagctggggaggttctctgccagatgctcagaagtgtacctgtggactggagggtaattgtattgacagtcagtattactgcaactgtgacgccggtcgaaatgaatggacctctgacacaatcgtgctctctcaaaaggagcatctccctgtcacccagatcgttatgacagatgccggcagaccccattccgaagccgcttacacactcggccccttattatgccggggtgatcagagcttctggaatagtgcaagctttaatacggaaactagctacctgcatttccctgcgttccatggggagctcactgcagatgtttgtttcttcttcaagaccactgtgtcctcaggagtcttcatggaaaatctcggcatcacagattttattcgaattgagctcagggcacccactgaagtgactttcagcttcgatgtgggtaatgggccctgtgaggtcacagtgcagtctcccacaccatttaacgacaatcagtggcaccatgtgcgggccgagcgcaacgtaaagggcgcttccctgcaggtggaccaactccctcaaaagatgcagccggctcccgctgatggccatgtccgcctccagctgaattctcagcttttcataggtggtaccgcgacccgccaacgcgggtttctgggttgcatcagatctctgcagctcaatggggtagcgctagacttagaggaacgtgcaacggtcactcccggtgttgaaccaggctgcgccggacattgttccacatacggccatctatgccggaacggcgggcggtgccgtgaaaaacgaagaggggtcacctgcgactgcgcgttctccgcttacgatgggccattctgcagcaacgaaatcagcgcttacttcgcaacaggctcatcaatgacctaccacttccaggagcactacactctgtccgagaatagcagcagtctggtgagttccctccatcgcgatgtgacattgactagagagatgataactctgagctttcggactacccgcacgcctagcctcttactatacgtgagctccttttacgaagaatacttgtccgtgatactggccaacaatggctccctgcagatcaggtataaactggatcgccaccagaaccccgacgcgttcactttcgacttcaaaaatatggcagatggacaactgcaccaggtgaagatcaacagggaggaggctgtcgttatggtcgaggtgatcccacagatgcagaaatctaattag

SEQ ID NO: 229002 - RNA, 3867 nt, Artificial Sequence
  derived and/or modified sequence
auggccucaguggccugggcuguguugaaaguacugcuguugcuaccuacccagacauggucucccgucggcgcgggcaacccaccagacugugacgccccccuagcaucugccuugccccgcuccuccuucuccuccucaagugagcugucuagcagucauggaccuggauucucacggcugaauaggcgggauggcgccgguggcuggacucccuuggugagcaacaaauaucaguggcuucagauugaccugggcgaacgcauggaggugaccgcaguugcuacccagggaggauacgguucuagcgacuggguaacuucauacuugcuaauguucagcgacggaggaagaaacuggaagcaguauaggagagaagaguccauuuggggcuucccaggcaacacuaacgcugacuccgugguccacuaccgacugcagccaccuuuugaagcucgauuucucagauuucucccgcuggcuuggaauccucgaggcagaauagggaugaggauagaaguauacggaugugccuacaagucggaaguggucuacuuugacggccaguccgcgcugcuguaucgacuagacaaaaaaccacucaaacccauccgagacgucauuucacugaaauucaaagccaugcagaguaacgggauuuugcuacauagagaggggcagcauggcaaccacaucacucuggaauuaauaaaggggaaauugguguuuuuccugaacagugggaaugcuaagcugcccaguacaauugccccuguaacgcugacuuugggaucuuugcuggacgaucagcacuggcacagcguacucauugaguuacucgacacucaggugaacuuuacuguggauaaacacacucaccacuuucaagcuaagggcgauuccagcuaccucgaucugaauuuugaaauuucuuuuggaggcaucccuacaccaggccgcucgcgcgcuuucaggcgaaaguccuuccacgguugucucgagaaccuguauuacaacggaguugacgugaccgagcucgcaaaaaagcauaaaccccagauuuuaaugauggggaaugugaguuucucgugcccgcagccucagaccgugccugucacauuucugagcucccggucauaccuggccuugccuggaaauaguggggaagacaaggugagcgucacauuucaguuccgaaccuggaaccgcgcaggacauuuacuuuucggugaacucagaagaggcagcgguucauucguucuguuccugaaggacggcaaacucaaacuuagucuguuucaacccggccagucuccaagaaacgucaccgccggagcugggcuaaaugacggccaguggcacagcgugagcuucucagcuaaauggucucauaugaacgucgucguggacgaugauacggcggugcagccucuuguggcugugcugauugauucaggggacacauacuauuucggugguugccucgauaacagcucaggaaguggcugcaaguccccccucggagguuuucaggguuguuuaaggcuaauaacuauaggcgauaaagcaguggacccuauccugguacagcaaggcgcacuggggucguuuagggaccugcaaauagacaguuguggaaucacugaccgcugucugccuucuuacugugagcaugggggagagugcucucagagcugggauacuuucaguugcgacugucucggaacaggguacacaggggagaccugccauaguagccuguacgagcagaguugcgaagcacauaaacaccguggaaaccccagcggguuauauuacauugaugccgaugggaguggaccucuuggacccuuucugguauacugcaauaugacugccgacgcugcuuggaccgucgugcagcauggaggaccagaugcugugacacuucggggcgcgccaucagggcauccacggucugccgugaguuucgcuuaugcugcuggcgcuggacagcugcgauccgccgugaaucuggcagaaagaugcgaacaacgacucgcccucagaugcggcaccgcacgacggccagacagucgcgacggaacaccauuguccugguggguaggcaggacaaacgaaacucacaccucuuggggcgguagccugccggaugcucagaaauguacuugcggacuggaggguaauuguauagacagccaauauuacugcaauugugacgccgguagaaacgaauggaccucggacacaaucguauugagccagaaagaacaucuuccagugacacaaauaguuaugacugacgcagggcguccucauucggaagccgccuacacauuagggccacugcucugcagaggcgaccaaaguuucuggaacucagcuucuuucaacacggagacuuccuaucugcacuuucccgcauuccauggggagcugaccgcagaugugugcuuuuuuuuuaagacaacaguuucguccgguguguucauggagaaccuaggaauuacugauuucauucgcaucgaacugcgcgcaccuaccgaggucacauucuccuucgacguagggaauggaccuugugaggugacugugcagagccccacuccuuucaaugacaaccaguggcaccauguaagggcugaaagaaacguuaaaggugcaucucuccagguggaccaauugccucaaaaaaugcaaccugccccagcggauggacacgucaggcugcagcugaacucccagcuguuuauugguggaaccgccacgcgucagcgcggcuuuuuaggauguauucgaucauugcagcugaacggagucgcccuugaccucgaagagcgcgccacagugacaccuggcguugaacccgguugugccggucacuguuccacauacgggcauuuguguagaaauggaggacggugccgggaaaagcgacggggagugacaugugauugugcuuucucugcauaugauggucccuucuguucaaacgagauuucggcguacuuugcaacgggcucaaguaugacuuaccacuuucaggagcacuauacccugucugagaauagcaguaguuuagugagcucccuucaccgcgacgucacacucaccagggagaugaucacgcuuaguuucagaaccacgcguaccccgagccuucugcuuuacgugucuucauuuuacgaggaguaccugucugugaucuuggcgaauaaugguagccuucagaucagguauaaacuugaucgccaccagaauccugacgcuuuuacauucgacuucaagaauauggccgaugggcaguugcaucaagugaaaaucaaucgugaagaggcuguuguuaugguggaagucaaccaaucgacaaaaaagcaggugauucuaucaagcgguacugaauucaacgcggugaagagccucauccuugggaagguacuugaggcagccggcgcugacccagauacgaggcgggcggcgacaucagguuucacugggugucucagcgcaguucgguuuggacgcgcagcucccuuaaaagccgcacuucguccuucgggaccuucucgugugaccgugcggggacauguugcaccuauggcccgcugugcugcuggugccgccucaggcuccccugcacgggaacuggcaccucggcuggccgguggggcagggcgaagcgggccagccgaugagggcgaaccauuagucaaugcugacaggcgagauucugcagugauuggcggcguaaucgcaguggugaucuucauccugcugugcaucaccgccaucgcuaucagaaucuaucagcagcgaaaguugcguaaagagaacgagucaaagguuucuaagaaggaggaaugcuag

SEQ ID NO: 229003 - RNA, 3120 nt, Artificial Sequence
  derived and/or modified sequence
auggaagugacugcaguggcuacacaaggcggcuauggaucuagugacugggucacuucguaucugcucauguucucagacggugguagaaauuggaagcaguauaggcgugaagagucaauuuggggcuucccaggcaauacaaacgccgacucaguggugcacuaucgccugcagccgccguucgaagcccgauuucugagguuccugccacuggccuggaaucccagggggcguaucggcaugcguaucgagguuuacgggugugcauacaaguccgaagucgucuauuucgaugggcagucagcacugcuguauagacuggauaagaaaccguuaaagcccauucgcgacguuauaucucugaaauucaaggcaaugcagagcaacgggauccuucugcaucgcgaggggcagcauggaaaucacaucacacucgaacuuauaaaaggcaagcucguauucuuucucaauuccggaaaugccaagcugccauccacgauugcacccgucacacuuacacuggggucuuugcucgacgaccaacacuggcauucuguccuuaucgaacuucuggauacacaggugaacuucacaguggacaagcauacucaucacuuucaggcuaagggugauuccucuuaccuugacuugaacuucgaaauuucguuuggcgguauaccaaccccagggaggucucgggcguucagaaggaaaagcuuucauggcugccucgaaaauuuauacuacaauggaguugacgucaccgagcuggcaaaaaagcauaaaccacagauccucaugaugggaaauguuucuuuuucuugcccgcagccucagacaguucccgugaccuuucucuccagccgcagcuaucuugcucuccccgggaauaguggagaggacaagguuucuguuacauuccaauuuagaaccuggaaucgagcaggacaucuucucuucggcgagcugaggagaggcuccggaucauucgucuuguuuuugaaagauggaaaacucaaauugagcuuguuccagccaggccagaguccucgcaacgucaccgccggcgcggggcucaaugacgggcaguggcauucagucuccuuuuccgcuaaguggucgcacaugaacguaguuguugacgacgacacagcuguacagccacugguagcaguccugaucgacaguggagauacuuauuacuucggcggcugccucgacaauuccagcggaucuggcuguaaaaguccucucggaggguuccagggaugucuucgacugauuacaaucggggauaaagcuguagaucccauucuggugcaacaaggggcacugggaagcuuucgcgaccuucaaaucgauagcugcggcauuacugacagguguuuaccuagcuacugugagcacggaggugaguguagucagagcugggacaccuucuccugugacugucucggcacgggauauaccggggagacuugccacucuucccuuuacgaacaguccugugaggcccacaaacauagaggcaacccuaguggacucuauuauauugacgcagauggcagcggcccccuaggaccauuccucguuuauugcaauaugacugcagacgcagccuggacagugguucaacaugggggacccgaugcggugacacugagaggggcacccaguggacacccucggagugccguaaguuucgcauacgcggccggcgcuggucaacuccgcucggcaguuaauuuggcugaaaggugcgagcagaggcuugccuuacguuguggcacggcgcgucgaccagauagcagggacggcaccccucugucgugguggguugggagaacaaacgaaacacacaccucauggggggguucucucccagacgcucagaagugcacaugugggcuugaggggaauugcauugauagccaguauuauuguaauugugacgccggaaggaaugaguggacuuccgauacuauuguccucucccagaaggagcaucugccggucacacagaucguuaugacggaugcuggccggccacacuccgaagcagccuacacccuagguccacuacugugucgaggagaccagucauuuuggaacucagccucauucaacacagaaaccuccuaccugcacuuuccugcguuccacggcgaauuaacagcugacguguguuuuuucuuuaaaacuacagucuccagcgggguauucauggaaaacuugggaaucaccgacuuuauccggaucgaacugcgugcaccaacugaaguaaccuucagcuuugacguggggaaugguccaugugaggugaccgugcaguccccaacacccuuuaacgauaaccaguggcaucaugugcgugcagaacggaacgugaaaggagccucacuccagguugaccagcuuccacagaagaugcagccugcaccagcagauggacacguuagauugcagcugaacucucagcucuucaucggcgguacugccacacgacagaggggcuuucugggcugcauccgcucucugcagcucaacggaguggcccuggaccuggaggagcgggcaacagugaccccgggcguggaacccggcugcgcaggacacuguuccaccuaugggcaucuguguagaaacggaggucgauguagagaaaaacgcagaggcgugacuugugacugugccuucuccgcuuaugacgggccauuuuguuccaacgagaucucugcauauuucgcuacuggaaguucgaugacuuaccauuuccaggagcacuacaccuugagugaaaauucaagcagccuggucucuucccuccaccgcgacgugacacugacucgagaaaugauuacucuuucuuuucggaccacccgaaccccgucccuacugcuguauguuaguucguuuuaugaggaauaucucagcgucauucuggcaaauaacggaucucugcagauucguuacaaguuggacaggcaccagaaccccgaugcauuuacguuugacuucaaaaauauggccgacggccagcugcaucaggugaaaauuaaucgggaggaagcuguagucaugguggagguaaucccccagaugcaaaaaucuaauuag

SEQ ID NO: 229004 - RNA, 3867 nt, Artificial Sequence
  derived and/or modified sequence
auggcgucaguggcuugggccguucuaaaagucuuacugcuucuuccuacccaaacauggucgccugugggagcagggaauccccccgacugugacgcaccguuggcuagugcauuaccacgcucuucuuucuccucaagcagcgaauuaucgucuagucacggaccuggauucagccggcucaaccgccgagauggggccggaggauggacaccccuagugaguaauaaguaucaguggcuacagauugaucucggcgagcggauggaggucacagccguugcaacucaggguggcuacggaucaucugacugggucacgagcuaccuacuuauguucagugacgggggcaggaauuggaagcaauauagaagagaagaauccauaugggguuucccagggaauaccaacgccgacagcguugugcauuacaggcugcaacccccauuugaagccagguucuugcgauucuugccacuagccuggaacccacggggccguaucggcaugcgaauugagguauauggaugugcauauaagagcgaagugguguacuuugacgggcagucagcucugcuguaccgacuagacaagaagccuuuaaagccaauccgagacguuaucagucuaaaguuuaaagcaaugcagagcaacggcaucuuacuucacagggagggccaacacggaaaccacaucaccuuagaguugauuaaaggcaaacugguguuuuuccuaaacucugguaaugcaaaacugccaucuaccaucgccccagugacucuaacccugggcucccuccucgacgaucagcauuggcauagcgugcucauugagcuucuggauacccaagugaacuucacaguugacaagcacacucaucauuuucaggccaagggggacuccucuuaccuggaccucaacuucgaaaucaguuuugggggcauuccaacaccuggcagaucgagagcuuuccgccgcaagaguuuccacgggugcuuagagaaucuuuacuacaaugggguagaugugaccgaacuagcgaaaaaacauaagccucagaucuugaugaugggaaacgucaguuucuccugcccucagccucagacaguuccuguaaccuuccuuucuucccgcuccuaucucgcacuaccagguaauucaggcgaagauaaggucucggugacuuuccaguuccgcacuuggaaucgggcuggucaucuccuauuuggugaacucagacgugguagcgguucuuucguuuuauuuuuaaaggauggcaaacuuaagcuaagccuguuucaaccuggccagucaccuagaaauguaacagcgggggcgggccugaacgacggacaguggcacuccguuagcuucagcgccaaauggucacauaugaacguggucgucgacgacgacacagccguacagccucugguugcuguccugauugacucgggugauaccuauuacuucggagggugccuagacaacucgagcgggucaggcugcaaaucuccacugggaggauuucagggcugccucagauuaaucacaauaggcgauaaagcagucgaccccauccugguucaacagggggcccugggcucuuuccgggacuuacagauagauagcugcggcaucacagauagaugucuuccaagcuauugcgagcacggcggcgaauguagucaaucaugggacaccuucuccugcgacugucugggcacaggguacaccggagaaacaugccauagcucucuguacgagcaaucaugcgaggcucacaagcacagaggaaaucccuccggucuguauuacaucgacgcagauggcuccgguccucucggcccauuccugguuuacugcaauaugacagcugacgcugccuggacuguggugcaacauggaggucccgacgcugucacacuccgaggagcaccuucaggucauccccggagugcggucucuuucgcuuacgccgcgggcgcagggcagcuuagaagcgccgugaaccuggccgagcggugugaacagcgacuagcccugagauguggaaccgcuagaaggcccgauucgagagauggaacaccacugagcugguggguaggcaggacaaacgaaacucacaccucuuggggcgguagccugccggaugcucagaaauguacuugcggacuggaggguaauuguauagacagccaauauuacugcaauugugacgccgguagaaacgaauggaccucggacacaaucguauugagccagaaagaacaucuuccagugacacaaauaguuaugacugacgcagggcguccucauucggaagccgccuacacauuagggccacugcucugcagaggcgaccaaaguuucuggaacucagcuucuuucaacacggagacaaguuaucuucacuucccugccuuucacggagagcugaccgccgacguuugcuucuuuuucaagaccacaguuucaucuggaguguucauggagaaccugggaauuacagacuuuauuaggaucgaguuacgggccccaacugagguaaccuuuuccuuugacgugggaaacggacccugcgaagugaccguacaguccccgacacccuucaacgacaaccaguggcaucauguacgggccgaacgcaauguuaagggagcuucauuacagguggaccagcugccacaaaagaugcagccugccccagccgacggucauguucgccuucagcuuaauucccaguuguucaucggggguacugcaacaaggcagcgaggcuuucuggguuguaucaggucccugcaguuaaacggugucgcucuggaucuggaggaacgcgccaccgucacaccuggcguugagccagguugcgcuggucacugcucaaccuacggacacuugugcaggaauggagggaggugucgcgaaaagagaagggguguaacuugcgacugugcauuuagugcguacgacggcccauuuugcagcaaugaaauuuccgccuacuuugccaccggcagcagcaugacauaccauuuccaggagcacuacacacuauccgagaacuccucgucccuggucuccagccugcaccgugaugucacccuuacaagagaaaugaucacuuugagcuucagaacaacccguacaccaucccuccuucuuuacguguccucuuuuuacgaggaauaccugucagugauuuuggccaauaacggcucguuacagauucgauauaagcuggaucgccaccaaaacccagacgccuuuacauucgacuucaagaacauggcagauggucagcuccaucaagugaaaaucaauagggaagaggccguuguuaugguggagguuaaucagaguacuaaaaaacaagugauuuuaucaucugggacugaauucaacgcggugaaaucccugauacucggcaaagugcuagaggccgccggcgccgauccugacacuaggcgugcagcuacuagcggauucacggguugccucagugccguccgguucgggagagccgcgccacugaaagcugcccuuagacccuccggcccuucuagagucacaguacgcggacauguugcaccuauggcacggugugcggccggggcugccuccgggucaccagcuagagaacuggcacccagacuugccggcggugcagggcggucaggccccgcggaugaaggcgagccauuagugaaugcugauagaagagacagugccgucauagggggaguaaucgcgguggucaucuuuauccugcugugcaucacugcaaucgccauacgaauuuaccagcagcggaaacugaggaaagagaacgaguccaaggugucaaagaaggaagaguguuag

SEQ ID NO: 229005 - RNA, 3120 nt, Artificial Sequence
  derived and/or modified sequence
auggaagugacugcaguggcuacucaaggggguuacgguucuucugauugggugaccucuuaucuuuugauguuuucugauggcggcagaaauuggaagcaguaucguagagaggagucaauuuggggcuucccaggcaacacuaacgcggacuccguugugcauuacaggcugcaaccuccguucgaagcccgguuucugagguuccucccacuagcauggaauccaagagggaggauuggcaugcggauugagguauacggaugcgcauauaaaucagaagugguguauuuugacgggcagucagcacugcuguauagacuggauaagaaaccguuaaagcccauucgcgacguuauaucucugaaauucaaggcaaugcagagcaacgggauccuucugcaucgcgaggggcagcauggaaaucacaucacacucgaacuuauaaaaggcaagcucguauucuuucucaauuccggaaaugccaagcugccauccacgauugcacccgucacacuuacacuggggucuuugcucgacgaccaacacuggcauucuguccuuaucgaacuucuggauacacaggugaacuucacaguggacaaacacacucaccauuuucaagcuaaaggcgacuccuccuaccuggaucuaaauuuugaaauuaguuuuggcgguauaccaaccccagggaggucacgggcauuccggagaaaaucauuccauggcugccucgaaaaccuguacuacaauggagucgacgugaccgagcuggcgaagaaacauaagccucagauuuuaaugaugggcaacgugagcuuuucgugcccucagccacagacaguccccgucacauuccuauccuccagaagcuaucucgcacucccaggaaauuccggugaagauaaagucucagucacuuuccaauuccgcacguggaaucgcgccggccaccuacuuuucggcgaauugagaaggggauccgguucguuuguguuauuccugaaggaugggaagcucaagcugucacuauuccaaccaggccaaucuccucgcaaugugaccgcaggagcaggacucaaugacggucaguggcauuccguuaguuucagugccaaguggucccacaugaauguugugguugacgacgauacagccgugcagccucucguggccguguuaauugacucuggagacaccuauuauuucggagguugucuggacaauuccuccggcucagguugcaaaagcccuuuggguggcuuucagggauguuugcgguuaauuaccauuggcgauaaggccgucgaccccauuuuggugcaacagggugcucucgggagcuuccgggaccugcaaauugacagcugcggcaucacagauaggugccuuccgucuuacugcgaacauggcggagagugcucacagagcugggauaccuucucaugcgauugccuuggcacagguuauacaggggaaacuugccacuccucacucuaugaacaauccugugaagcucacaaacaucgcggaaauccuuccgguuuauauuacaucgaugcagacgguagcgguccacuggggccguuccuggucuauugcaauaugaccgccgacgcagcuuggaccguaguucagcauggaggaccugacgcagucacccugagaggugcgccuucaggacacccacgaucagcagucucuuucgcguaugcugcuggagcaggacaacugcgcagcgcagucaacuuggcagaacgcugcgagcagcggcuggcccuacguuguggcaccgcucggcgucccgauagccgagacgguaccccucuguccuggugggugggucgaacaaacgaaacccacacaaguuggggagggucucugccugacgcccagaaaugcacauguggccuagaaggaaauuguauagacucucaguacuauuguaacugugacgccggacgcaaugaauggacuuccgacacgauuguccuuucccagaaagaacaccugcccgucacccaaaucgucaugaccgaugcuggucgaccgcauuccgaggcggccuauacucuuggaccccuccugugccggggagaucagucauuuuggaacucagccucauucaacacagaaaccuccuaccugcacuuuccugcguuccacggcgaauuaacagcugacguguguuuuuucuuuaaaacuacagucuccagcgggguauucauggaaaacuugggaaucaccgacuuuauccggaucgaacugcgugcaccaacugaaguaaccuucagcuuugacguggggaaugguccaugugaggugaccgugcaguccccaacacccuuuaacgauaaccaguggcaucaugugcgugcagaacggaacgugaaaggagccucucuccagguagaccaauugccgcagaaaaugcaaccagcuccagcugacggccaugugagacugcagcugaauucacaacuuuucauuggcggaaccgcaacucgacaacgcgguuuucuaggguguauacgaucgcugcaacucaacggaguggcccuggacuuggaagagagggcuacggugacaccaggaguagagccaggaugcgcaggucacuguuccacauacggacaucucugccgcaacgggggcagaugcagagagaagaggcggggaguaaccugugauugcgcuuuuagcgcuuaugauggcccauuuugcagcaacgaaaucucugccuacuuugcaacuggcuccuccaugaccuaccacuuccaggagcauuauacccuguccgagaacucauccucccucguauccucuuuacaccgagacgucacacugacgcgcgaaaugaucacguugucuuuccgaaccaccagaacaccuucauugcuccucuacgucaguucuuucuacgaagaguauuugaguguuauucuggcuaacaaugggucucuucagaucagauacaaauuggaccgacaucaaaauccugacgcauucacuuucgacuuuaaaaacauggcugacgggcaguuacaucaggucaaaauaaaucgagaagaagcugugguaaugguggagguaauuccucagaugcagaaaucuaauuag

SEQ ID NO: 229006 - protein, 2269 aa, Artificial Sequence
  derived and/or modified sequence
MAEPSSARRPVPLIESELYFLIARYLSAGPCRRAAQVLVQELEQYQLLPKRLDWEGNEHNRSYEELVLSNKHVAPDHLLQICQRIGPMLDKEIPPSISRVTSLLGAGRQSLLRTAKDCRHTVWKGSAFAALHRGRPPEMPVNYGSPPNLVEIHRGKQLTGCSTFSTAFPGTMYQHIKMHRRILGHLSAVYCVAFDRTGHRIFTGSDDCLVKIWSTHNGRLLSTLRGHSAEISDMAVNYENTMIAAGSCDKIIRVWCLRTCAPVAVLQGHTGSITSLQFSPMAKGSQRYMVSTGADGTVCFWQWDLESLKFSPRPLKFTEKPRPGVQMLCSSFSVGGMFLATGSTDHVIRMYFLGFEAPEKIAELESHTDKVDSIQFCNNGDRFLSGSRDGTARIWRFEQLEWRSILLDMATRISGDLSSEEERFMKPKVTMIAWNQNDSIVVTAVNDHVLKVWNSYTGQLLHNLMGHADEVFVLETHPFDSRIMLSAGHDGSIFIWDITKGTKMKHYFNMIEGQGHGAVFDCKFSQDGQHFACTDSHGHLLIFGFGCSKPYEKIPDQMFFHTDYRPLIRDSNNYVLDEQTQQAPHLMPPPFLVDVDGNPHPTKYQRLVPGRENSADEHLIPQLGYVATSDGEVIEQIISLQTNDNDERSPESSILDGMIRQLQQQQDQRMGADQDTIPRGLSNGEETPRRGFRRLSLDIQSPPNIGLRRSGQVEGVRQMHQNAPRSQIATERDLQAWKRRVVVPEVPLGIFRKLEDFRLEKGEEERNLYIIGRKRKTLQLSHKSDSVVLVSQSRQRTCRRKYPNYGRRNRSWRELSSGNESSSSVRHETSCDQSEGSGSSEEDEWRSDRKSESYSESSSDSSSRYSDWTADAGINLQPPLRTSCRRRITRFCSSSEDEISTENLSPPKRRRKRKKENKPKKENLRRMTPAELANMEHLYEFHPPVWITDTTLRKSPFVPQMGDEVIYFRQGHEAYIEAVRRNNIYELNPNKEPWRKMDLRDQELVKIVGIRYEVGPPTLCCLKLAFIDPATGKLMDKSFSIRYHDMPDVIDFLVLRQFYDEARQRNWQSCDRFRSIIDDAWWFGTVLSQEPYQPQYPDSHFQCYIVRWDNTEIEKLSPWDMEPIPDNVDPPEELGASISVTTDELEKLLYKPQAGEWGQKSRDEECDRIISGIDQLLNLDIAAAFAGPVDLCTYPKYCTVVAYPTDLYTIRMRLVNRFYRRLSALVWEVRYIEHNARTFNEPESVIARSAKKITDQLLKFIKNQHCTNISELSNTSENDEQNAEDLDDSDLPKTSSGRRRVHDGKKSIRATNYVESNWKKQCKELVNLIFQCEDSEPFRQPVDLVEYPDYRDIIDTPMDFGTVRETLDAGNYDSPLEFCKDIRLIFSNAKAYTPNKRSKIYSMTLRLSALFEEKMKKISSDFKIGQKFNEKLRRSQRFKQRQNCKGDSQPNKSIRNLKPKRLKSQTKIIPELVGSPTQSTSSRTAYLGTHKTSAGISSGVTSGDSSDSAESSERRKRNRPITNGSTLSESEVEDSLATSLSSSASSSSEESKESSRARESSSRSGLSRSSNLRVTRTRAAQRKTGPVSLANGCGRKATRKRVYLSDSDNNSLETGEILKARAGNNRKVLRKCAAVAANKIKLMSDVEENSSSESVCSGRKLPHRNASAVARKKLLHNSEDEQSLKSEIEEEELKDENQLLPVSSSHTAQSNVDESENRDSESESDLRVARKNWHANGYKSHTPAPSKTKFLKIESSEEDSKSHDSDHACNRTAGPSTSVQKLKAESISEEADSEPGRSGGRKYNTFHKNASFFKKTKILSDSEDSESEEQDREDGKCHKMEMNPISGNLNCDPIAMSQCSSDHGCETDLDSDDDKIEKPNNFMKDSASQDNGLSRKISRKRVCSSDSDSSLQVVKKSSKARTGLLRITRRCAATAANKIKLMSDVEDVSLENVHTRSKNGRKKPLHLACTTAKKKLSDCEGSVHCEVPSEQYACEGKPPDPDSEGSTKVLSQALNGDSDSEDMLNSEHKHRHTNIHKIDAPSKRKSSSVTSSGEDSKSHIPGSETDRTFSSESTLAQKATAENNFEVELNYGLRRWNGRRLRTYGKAPFSKTKVIHDSQETAEKEVKRKRSHPELENVKISETTGNSKFRPDTSSKSSDLGSVTESDIDCTDNTKTKRRKTKGKAKVVRKGKTFTANISKTVRRQRQSKRPRLSVDDNDWEDLDYAKSKRVLRRSKIKTRNQGRRTVRYHDGDDDRSLENVLDFNGCTL

SEQ ID NO: 229007 - DNA, 6810 bp, Artificial Sequence
  derived and/or modified sequence
atggccgagcccagcagcgccagaagacccgtgcccctgatcgagagcgagctgtacttcctgatcgccagatacctgagcgccggcccctgcagaagagccgcccaggtgctggtgcaggagctggagcagtaccagctgctgcccaagagactggactgggagggcaacgagcacaacagaagctacgaggagctggtgctgagcaacaagcacgtggcccccgaccacctgctgcagatctgccagagaatcggccccatgctggacaaggagatcccccccagcatcagcagagtgaccagcctgctgggcgccggcagacagagcctgctgagaaccgccaaggactgcagacacaccgtgtggaagggcagcgccttcgccgccctgcacagaggcagaccccccgagatgcccgtgaactacggcagcccccccaacctggtggagatccacagaggcaagcagctgaccggctgcagcaccttcagcaccgccttccccggcaccatgtaccagcacatcaagatgcacagaagaatcctgggccacctgagcgccgtgtactgcgtggccttcgacagaaccggccacagaatcttcaccggcagcgacgactgcctggtgaagatctggagcacccacaacggcagactgctgagcaccctgagaggccacagcgccgagatcagcgacatggccgtgaactacgagaacaccatgatcgccgccggcagctgcgacaagatcatcagagtgtggtgcctgagaacctgcgcccccgtggccgtgctgcagggccacaccggcagcatcaccagcctgcagttcagccccatggccaagggcagccagagatacatggtgagcaccggcgccgacggcaccgtgtgcttctggcagtgggacctggagagcctgaagttcagccccagacccctgaagttcaccgagaagcccagacccggcgtgcagatgctgtgcagcagcttcagcgtgggcggcatgttcctggccaccggcagcaccgaccacgtgatcagaatgtacttcctgggcttcgaggcccccgagaagatcgccgagctggagagccacaccgacaaggtggacagcatccagttctgcaacaacggcgacagattcctgagcggcagcagagacggcaccgccagaatctggagattcgagcagctggagtggagaagcatcctgctggacatggccaccagaatcagcggcgacctgagcagcgaggaggagagattcatgaagcccaaggtgaccatgatcgcctggaaccagaacgacagcatcgtggtgaccgccgtgaacgaccacgtgctgaaggtgtggaacagctacaccggccagctgctgcacaacctgatgggccacgccgacgaggtgttcgtgctggagacccaccccttcgacagcagaatcatgctgagcgccggccacgacggcagcatcttcatctgggacatcaccaagggcaccaagatgaagcactacttcaacatgatcgagggccagggccacggcgccgtgttcgactgcaagttcagccaggacggccagcacttcgcctgcaccgacagccacggccacctgctgatcttcggcttcggctgcagcaagccctacgagaagatccccgaccagatgttcttccacaccgactacagacccctgatcagagacagcaacaactacgtgctggacgagcagacccagcaggccccccacctgatgcccccccccttcctggtggacgtggacggcaacccccaccccaccaagtaccagagactggtgcccggcagagagaacagcgccgacgagcacctgatcccccagctgggctacgtggccaccagcgacggcgaggtgatcgagcagatcatcagcctgcagaccaacgacaacgacgagagaagccccgagagcagcatcctggacggcatgatcagacagctgcagcagcagcaggaccagagaatgggcgccgaccaggacaccatccccagaggcctgagcaacggcgaggagacccccagaagaggcttcagaagactgagcctggacatccagagcccccccaacatcggcctgagaagaagcggccaggtggagggcgtgagacagatgcaccagaacgcccccagaagccagatcgccaccgagagagacctgcaggcctggaagagaagagtggtggtgcccgaggtgcccctgggcatcttcagaaagctggaggacttcagactggagaagggcgaggaggagagaaacctgtacatcatcggcagaaagagaaagaccctgcagctgagccacaagagcgacagcgtggtgctggtgagccagagcagacagagaacctgcagaagaaagtaccccaactacggcagaagaaacagaagctggagagagctgagcagcggcaacgagagcagcagcagcgtgagacacgagaccagctgcgaccagagcgagggcagcggcagcagcgaggaggacgagtggagaagcgacagaaagagcgagagctacagcgagagcagcagcgacagcagcagcagatacagcgactggaccgccgacgccggcatcaacctgcagccccccctgagaaccagctgcagaagaagaatcaccagattctgcagcagcagcgaggacgagatcagcaccgagaacctgagcccccccaagagaagaagaaagagaaagaaggagaacaagcccaagaaggagaacctgagaagaatgacccccgccgagctggccaacatggagcacctgtacgagttccacccccccgtgtggatcaccgacaccaccctgagaaagagccccttcgtgccccagatgggcgacgaggtgatctacttcagacagggccacgaggcctacatcgaggccgtgagaagaaacaacatctacgagctgaaccccaacaaggagccctggagaaagatggacctgagagaccaggagctggtgaagatcgtgggcatcagatacgaggtgggcccccccaccctgtgctgcctgaagctggccttcatcgaccccgccaccggcaagctgatggacaagagcttcagcatcagataccacgacatgcccgacgtgatcgacttcctggtgctgagacagttctacgacgaggccagacagagaaactggcagagctgcgacagattcagaagcatcatcgacgacgcctggtggttcggcaccgtgctgagccaggagccctaccagccccagtaccccgacagccacttccagtgctacatcgtgagatgggacaacaccgagatcgagaagctgagcccctgggacatggagcccatccccgacaacgtggacccccccgaggagctgggcgccagcatcagcgtgaccaccgacgagctggagaagctgctgtacaagccccaggccggcgagtggggccagaagagcagagacgaggagtgcgacagaatcatcagcggcatcgaccagctgctgaacctggacatcgccgccgccttcgccggccccgtggacctgtgcacctaccccaagtactgcaccgtggtggcctaccccaccgacctgtacaccatcagaatgagactggtgaacagattctacagaagactgagcgccctggtgtgggaggtgagatacatcgagcacaacgccagaaccttcaacgagcccgagagcgtgatcgccagaagcgccaagaagatcaccgaccagctgctgaagttcatcaagaaccagcactgcaccaacatcagcgagctgagcaacaccagcgagaacgacgagcagaacgccgaggacctggacgacagcgacctgcccaagaccagcagcggcagaagaagagtgcacgacggcaagaagagcatcagagccaccaactacgtggagagcaactggaagaagcagtgcaaggagctggtgaacctgatcttccagtgcgaggacagcgagcccttcagacagcccgtggacctggtggagtaccccgactacagagacatcatcgacacccccatggacttcggcaccgtgagagagaccctggacgccggcaactacgacagccccctggagttctgcaaggacatcagactgatcttcagcaacgccaaggcctacacccccaacaagagaagcaagatctacagcatgaccctgagactgagcgccctgttcgaggagaagatgaagaagatcagcagcgacttcaagatcggccagaagttcaacgagaagctgagaagaagccagagattcaagcagagacagaactgcaagggcgacagccagcccaacaagagcatcagaaacctgaagcccaagagactgaagagccagaccaagatcatccccgagctggtgggcagccccacccagagcaccagcagcagaaccgcctacctgggcacccacaagaccagcgccggcatcagcagcggcgtgaccagcggcgacagcagcgacagcgccgagagcagcgagagaagaaagagaaacagacccatcaccaacggcagcaccctgagcgagagcgaggtggaggacagcctggccaccagcctgagcagcagcgccagcagcagcagcgaggagagcaaggagagcagcagagccagagagagcagcagcagaagcggcctgagcagaagcagcaacctgagagtgaccagaaccagagccgcccagagaaagaccggccccgtgagcctggccaacggctgcggcagaaaggccaccagaaagagagtgtacctgagcgacagcgacaacaacagcctggagaccggcgagatcctgaaggccagagccggcaacaacagaaaggtgctgagaaagtgcgccgccgtggccgccaacaagatcaagctgatgagcgacgtggaggagaacagcagcagcgagagcgtgtgcagcggcagaaagctgccccacagaaacgccagcgccgtggccagaaagaagctgctgcacaacagcgaggacgagcagagcctgaagagcgagatcgaggaggaggagctgaaggacgagaaccagctgctgcccgtgagcagcagccacaccgcccagagcaacgtggacgagagcgagaacagagacagcgagagcgagagcgacctgagagtggccagaaagaactggcacgccaacggctacaagagccacacccccgcccccagcaagaccaagttcctgaagatcgagagcagcgaggaggacagcaagagccacgacagcgaccacgcctgcaacagaaccgccggccccagcaccagcgtgcagaagctgaaggccgagagcatcagcgaggaggccgacagcgagcccggcagaagcggcggcagaaagtacaacaccttccacaagaacgccagcttcttcaagaagaccaagatcctgagcgacagcgaggacagcgagagcgaggagcaggacagagaggacggcaagtgccacaagatggagatgaaccccatcagcggcaacctgaactgcgaccccatcgccatgagccagtgcagcagcgaccacggctgcgagaccgacctggacagcgacgacgacaagatcgagaagcccaacaacttcatgaaggacagcgccagccaggacaacggcctgagcagaaagatcagcagaaagagagtgtgcagcagcgacagcgacagcagcctgcaggtggtgaagaagagcagcaaggccagaaccggcctgctgagaatcaccagaagatgcgccgccaccgccgccaacaagatcaagctgatgagcgacgtggaggacgtgagcctggagaacgtgcacaccagaagcaagaacggcagaaagaagcccctgcacctggcctgcaccaccgccaagaagaagctgagcgactgcgagggcagcgtgcactgcgaggtgcccagcgagcagtacgcctgcgagggcaagccccccgaccccgacagcgagggcagcaccaaggtgctgagccaggccctgaacggcgacagcgacagcgaggacatgctgaacagcgagcacaagcacagacacaccaacatccacaagatcgacgcccccagcaagagaaagagcagcagcgtgaccagcagcggcgaggacagcaagagccacatccccggcagcgagaccgacagaaccttcagcagcgagagcaccctggcccagaaggccaccgccgagaacaacttcgaggtggagctgaactacggcctgagaagatggaacggcagaagactgagaacctacggcaaggcccccttcagcaagaccaaggtgatccacgacagccaggagaccgccgagaaggaggtgaagagaaagagaagccaccccgagctggagaacgtgaagatcagcgagaccaccggcaacagcaagttcagacccgacaccagcagcaagagcagcgacctgggcagcgtgaccgagagcgacatcgactgcaccgacaacaccaagaccaagagaagaaagaccaagggcaaggccaaggtggtgagaaagggcaagaccttcaccgccaacatcagcaagaccgtgagaagacagagacagagcaagagacccagactgagcgtggacgacaacgactgggaggacctggactacgccaagagcaagagagtgctgagaagaagcaagatcaagaccagaaaccagggcagaagaaccgtgagataccacgacggcgacgacgacagaagcctggagaacgtgctggacttcaacggctgcaccctgtag

SEQ ID NO: 229008 - DNA, 12929 bp, Artificial Sequence
  derived and/or modified sequence
cgccagcccggtcaggcctcggcgcggcctacacgctccgctcgctcgctcgctcccgcctcccgccccgcgcccggccatggcggagccgtcgtccgcccgacgcccggtgcctctcatcgagtcggagctgtacttccttatcgcccggtacctatcggcgggcccgtgtcggagagcggcccaggtgctggtgcaggagctggagcagtaccagttgttgccgaagagattggactgggagggcaacgagcacaacaggagctacgaggagttggtcttgtccaataagcatgtggctcctgatcatcttttgcaaatctgccagcgcatcggtcctatgttggataaagaaattccacccagtatttcaagagtcacttctttacttggtgcaggaaggcagtctttgctacgtacagcaaaagactgcaggcacacagtttggaagggctctgcctttgctgctcttcatagaggaagacctcctgaaatgccagtgaattatggttccccaccaaatcttgtggagatacatcgaggaaaacaactcacagggtgttccacttttagtacagcatttccaggaactatgtatcagcatataaaaatgcacagaaggattctcggacatctatctgctgtttactgtgtagcatttgataggacaggacatagaatctttacaggttcagatgactgtttggtaaagatttggtcaacacataatggccgcttgttatctacattaagaggtcattctgcagaaatttcagatatggcagtaaactatgagaatacaatgattgctgcggggagctgtgataaaattattagagtgtggtgcttgagaacttgtgccccagttgctgtgctccaaggacacacaggatcaattacatctttacagtttagcccgatggccaaaggctctcaaagatacatggtttccactggtgctgatgggacagtttgcttttggcaatgggatttagaatccttaaaatttagcccacgtcccctgaagttcactgaaaagcctaggccaggcgttcaaatgctttgttcttcttttagtgttggtggtatgtttttagccacaggtagtactgatcatgtaatcagaatgtattttttgggttttgaagcacccgaaaaaatcgcagaacttgaaagccacactgataaagtagatagtatccaattttgtaacaatggtgatcggttcctaagtggtagcagagatggaacagcacggatttggagatttgagcagttagaatggaggagcattttattggatatggctaccagaatctcaggggacttatcttccgaagaggaaaggtttatgaaacctaaagtaacaatgatagcttggaatcaaaatgatagcattgttgtcacagctgtgaatgatcatgtcctcaaagtgtggaattcttacactggacaactgcttcataacttaatgggacatgctgatgaagtatttgttctggagacacatccctttgattccagaattatgttatctgcaggacatgatggcagcatatttatatgggatattacaaaaggtaccaagatgaaacattattttaatatgattgaaggacaaggacatggagctgtgtttgactgtaagttttcacaggatggacagcattttgcctgtacagattctcatgggcaccttctgatatttggttttggatgcagcaaaccatatgaaaagattcctgatcagatgttcttccatactgactatcgaccacttattagagattctaataattatgtcttagatgagcaaactcagcaggctcctcatcttatgcctccaccattcttggtagatgtagatggaaatcctcatccaaccaagtatcagagattagtaccaggccgagaaaattctgcagatgaacatttgattccacagctgggctatgtggcaacaagtgatggagaggtgattgaacaaattataagcctgcaaaccaatgataatgatgaacgcagcccagaatcgagtattcttgatggaatgataagacagttgcagcagcagcaagatcagagaatgggagcagatcaggatactattccaagaggactttcaaatggtgaagaaacaccccggagaggttttagaaggctgagcttagacattcagtcccctccaaatattggtctgcgtcgtagtggacaagttgaaggtgttcgtcagatgcatcaaaacgctccacgcagtcagattgctacagaacgtgacctgcaggcttggaaacgaagagtggttgtaccagaggtaccactaggcatatttaggaagctggaagacttccgattagagaaaggtgaagaggaaagaaatctttatataataggaagaaaaagaaagactcttcagctctcacataagtcggattcagtggttttggtatcacagtctagacaaaggacatgtaggcgtaaatatccaaattatggtagaagaaatcgtagctggcgtgagttatcttctggaaatgagtcttcaagctctgtaagacatgagacttcctgtgatcagagtgaaggttctggttcttcagaagaggatgaatggagaagtgacagaaaaagtgagagttacagcgaaagttcaagtgactcttcatctagatattccgattggacagctgatgcgggcatcaatttgcagcctcctttaagaacatcatgtcgtcgacgaattactcgattttgtagtagttcagaagatgaaatatctactgagaatttatctcctccaaaaagaagacgaaagagaaagaaagaaaataagcctaagaaggagaatttgcggaggatgactccagcagagcttgcaaatatggagcatttatatgaatttcaccctccagtttggattactgacaccacacttagaaaatctccttttgttcctcaaatgggtgatgaggtaatatattttcgacagggtcatgaagcttatattgaggctgtaagaagaaataatatttatgaactgaaccctaataaggagccatggagaaaaatggatcttagggatcaagaattggttaaaatagttggaatacgatatgaagttgggccccctacactctgttgcctaaaactagcatttatagatccagcaactggaaaacttatggacaaatctttctctattagatatcatgatatgccagatgttattgactttcttgtattgcgtcaattttatgatgaagcaagacagaggaattggcagtcttgtgacagattccgctctattattgatgatgcttggtggtttggaacagtgttaagtcaagagccatatcaaccacagtatcctgatagtcatttccagtgttatattgttaggtgggataatactgaaattgaaaaacttagcccatgggacatggaaccaattcctgataatgttgatccacctgaagaattaggagctagtatttctgtcacaacagatgagctagagaaattgctctataaaccacaagctggtgaatggggtcagaaatcaagagatgaagaatgtgatagaattatcagtggtatagatcaacttttgaatcttgatatagcagcagcttttgcaggccctgttgatttgtgtacatacccgaagtactgtactgtagtagcttatccaaccgatctttacacaattcgaatgagacttgttaatcgattttacaggaggctgtctgcgttagtttgggaagtcagatatatagaacataatgccagaacatttaacgaacctgagagtgtaattgcaagatcagctaaaaagataactgaccaacttttaaaatttatcaagaatcaacactgtacaaatatctcagaactttctaacacatctgaaaatgatgagcaaaatgctgaggatttggatgatagtgatcttcctaaaacatcttctggaaggaggagagtccatgatgggaaaaaaagcatcagagctacgaactatgttgaaagcaactggaagaaacagtgtaaggaactagtgaacttaatttttcagtgtgaagattctgaaccatttagacaacctgttgatttggttgaatatccagactacagagatattatagataccccaatggattttggaacagtaagggaaactctagatgcgggaaattatgacagccctttggagttttgcaaagacatccggctgatatttagcaatgcaaaagcgtatacaccaaacaaaagatcaaagatttatagtatgaccttgagattatctgccttatttgaagaaaaaatgaagaaaatctcttctgattttaaaattggtcaaaaattcaatgaaaaacttcgaagaagccagaggttcaagcaacggcaaaattgtaaaggtgacagtcagcctaacaaaagtatcagaaacctcaagccgaagaggttaaaatctcagacaaaaataattcctgagttggtaggttctcctacccagtctacctcaagtaggacagcttatcttggaacccacaagacaagtgctggtatctcttcaggtgttacttctggtgactcttcagattcagcagaatcatcagaaaggaggaaaagaaatagacctataacaaatggttctacattatctgaaagtgaagtggaagattctttagctacctctttgtcatcgtcagcttccagtagttctgaggaaagcaaagagagttccagagctcgtgaatcctcctcacgcagtgggctatccagaagcagcaatctcagggtaaccagaactagagctgctcaaagaaaaactggtcccgtttcattagcaaatggatgtggcagaaaagccactcgaaagagagtctatttaagtgattctgataacaattcattggagactggtgaaattctaaaagccagagctggaaataaccgaaaagtcttaaggaagtgtgctgctgtggctgccaataaaataaagctaatgagtgatgtagaagagaattctagctctgaaagtgtctgttctggtcggaagctgcctcaccgcaatgcttctgctgtagctagaaaaaagttattacataattctgaagatgaacagagcttaaagtcagaaattgaagaagaggagctaaaagatgaaaatcaactattaccagtgtccagttctcacactgcccagagcaatgttgatgaatctgaaaacagagactcagagtcagaaagtgatttgcgggtagcccggaaaaattggcatgctaatggttacaagtcccatactccagcaccttcaaagacaaaatttcttaaaatagagtcttctgaggaagactctaaaagtcatgattcagatcatgcatgtaacagaactgctggcccatcaacgtctgtgcagaaacttaaggcagagagcatctcagaggaagcagattctgaaccaggaagatctggtggtaggaaatacaatacatttcacaagaatgcgagtttctttaaaaaaaccaagattctgagtgactcagaagactctgaatctgaagagcaagatagagaagatgggaaatgtcataaaatggaaatgaacccaatttcaggaaatctgaactgtgaccctattgctatgtcccagtgttcctcagatcatggatgtgaaactgatttagattcagatgatgacaaaatagaaaaaccaaacaattttatgaaagattctgcatcacaagacaatggactaagcagaaaaatttccaggaaaagggtctgttccagtgactcagacagtagtttacaggtggttaagaaatcatcaaaagccagaacaggtctcctgaggattactcgaagatgtgcagctacggctgccaataagatcaagctcatgagtgatgtagaagatgtcagtttagaaaatgtgcacactagaagcaaaaatggaaggaaaaaacctctccatcttgcttgtactacagctaagaagaaattgagtgattgtgaaggaagtgtacattgtgaagtaccaagtgaacagtatgcctgtgaaggcaagccacctgatcctgactccgaaggtagtacaaaagtgcttagtcaggctctaaatggagactcagactctgaagatatgttgaattcagaacacaagcacaggcataccaatattcacaaaatagatgcaccttctaaaagaaaaagttcctctgttacatcttcaggagaagattcaaaaagtcatattccagggagtgagactgataggacattttcttcagagtcaaccttggcacaaaaagctactgcagagaataattttgaagtggaactgaattatgggctgcgcaggtggaatggcagaagactcaggacctatggaaaggctccttttagtaagacaaaagtgattcatgattcacaggaaacagcagagaaggaagtaaaaaggaagagatcgcatcctgaattggaaaatgtgaaaatctctgaaacaactgggaattcaaagtttagacctgatactagttccaaatcatcagatttgggatctgtaactgaatcagatattgactgtactgataatacaaaaaccaaaaggaggaaaacgaaaggaaaagcaaaagtagttagaaaaggtaaaacttttacagctaacatatctaaaactgtgagacgtcaaagacaaagcaaacgccctaggttaagtgtggatgataatgactgggaggatttggactatgcaaaatctaaaagagttcttcgacgttcaaaaataaaaacgagaaatcagggtagaaggactgtgagataccatgatggggatgatgacagaagtttagaaaatgtgttagatttcaatggttgcaccttatgaccttgagggaaagccagttcatttaagaggaaatggactggcatttatggtgaaagctggctgttaaaattatttttttgtcttacaattcagggaatatatttatatttttctatgaaaagttatgaatgtgactaaatcatgactgttatttttatttgcacttgctggtctttgtagcagcattcagcacaggtgccaaaatatgcttcattttgggggcagatctattttgacagtatttgactacatatagcaagagtttgaaatatgttaaacactagacatcctggttatcaaaaccaatgagcattactttcatggcagcaagtgtcatgcagttattttctgaatttgtcaaagaggcagtagtttctaacccctgttctatagtagttacaacaatttcacaacctatgtttacagattcttcataaatacatgcatactgacactataatcatgggaggtgtaaccatgattagtaggcgaggtacctaccacttttttttttttcttcccctggctacttgagtagaatgcattataccagatctggtcactttcattgaaatggtttctaattttcttcccaagtgctgttgggtttttttcttcttaaggaaaacgttgtcacttttatgttataaacttgaatttataaagtgctggtaaattatttttaatgatttgagtgcatgttttaaacctctaggaccagagcatagtcagagcattttcttttaaattgtgcactaacaaaatgctatataatctgtcttctgtccaagatctcctggtttccattgtaagggatttaaccaaaatcttgctcttccataatcttactctgtgaaatagaggaattcgtgtgccttagatttagaagtgtgttctttaatagagtgtacagggctaaaagagtatttaagttaatatgtaggtttcccccatctgtattccaattgtagaggtgagttttgttaagagtacaattgcaaatcttatctatataggaaaatagctaaatgtcattctccatctctttgttttagtttactgcttccatgtgcaatcctaagcattctttgctggggcaactaaatgtatctttattagtgacttctagtccaaatataagaaactgtcatgttttgtgggaaaataattttataatccatttaaagtgaaagtttatcacacaaatagtacacttattttctaaccaaatacttgataggttatgctactccagtgtagatggccattcctaacttgtttgtgcctgaagatggacttgattcaaatggtttacatatttagtgggtaagggatatgttacagtaccccacctgtaagttatttattagccctaattgtgtttgatttcagacaaaattaacccttttctcctgtgtatctttgaagtggcagataaggtgaagcatcagactggtatcaatattagacaatgttatttattagccctaattgtgtttggtttcagacaaaaccttttctcctgtgtatctttgaagtggcagacaaggcgaagcatcagactggtattaatgttagagaatgttctgaagtgttcctattttgtagttatctattccatttgacatagtagaaggtacattttctttctactctgatgcatggggaaggatgtttttggacattatcaactgagataggtgggaaacctcctctcatttgtggcttagagagctatcaccatttcagaactatgatgcttttcttctcagaacttgtgttaagtagatagtaaacagattgattcatgataattgtccttgactaagactgaaaagactaatgggatgccttttactttgctaattttaaaaactggtgatagatgtcaaatccattaatttatttaaactcttcttaaccttctcttttataatctgttctcaggttttaactccatgtttaccatcatttgcaaaaaggtaccaaaaaaatccataaataaatatggaatacattcataagtacatacattcttttggtataaaacaatattttgacagtttaggcttcattaatagaactattctgattatttggactgcattaattggtcattgactggccatccaattaccattttttctttcagtccaaaatagttagacccttgcatacagaagtggtattttggtttttaatcagatttggtttcatcagaagcagcaagaatggacctgatgtctttaaaagcatagccgacaatggtagcttctcaagttatgaaataaaactgagagataatggagaaaataatttttatgggtttttttggttatggtgctattcctaaggttaactttgaatatgtgacacacacactcctaagtacctttaaggaaaattaataaatcattaatagttaaaatgtttacattgagcactagaacatgtttggccttttttttctacgttatgcaaaatgcccagggatttaatgcacaggtgtactttaatgtttagggtcagtttgtagtattcttgagaaaaagataaagggttataatttgaatgtgaactgatccagaaataagtgctgtacctttccactgcacttgaagttcaacttaatggtgtatgtgaaaaacaaaaactactttggttgtgtatgtccaaagtcctatggttttattcatttatggttttacaggctttgaagtactcagatttgatttttgctttcttggaaagactcactttaccaagcatataaaggaaaaatgatttcaaacattgacaagatagatgagtgttaacaaagctttcttttttcgtgtcctccttatttaaaaaggtatacttacaatgtgaagtaacttatgaataaaaggaaaagtttatcccatattcaaataattcctaaggtcagcctccctttttgtaagtggcaaatatctgattaaatcatttctcagtttattaatccttggaaacaatgatatagcagttactcacagcttgtaaattacaacagaaaggttcctttcaaatagtagagctgcacctaaagaggaaattgggtttataagaaaatggaggcaaagaacttaagttttaagaaaaagcacttcaaaacagaagggcaaatggaaaaggggaatataaaacaaaccaataaaaataccatctgagggtgttactgtccaaaagtaaagaataagatgcatcactaagccctttgcactcgttatgacctcgtaagtaaaaattatcacttagaataaggggtgcacactacattccctctgtcttctagacttttttttttgtagaagaatcagaaaacaatttactaacctccctgtttgatattaaaaataggaagaattttaatattttctgttagtacaagttgaacttgattgtgccaactgaaaccccagaggtttgtatatcagtagaatgcaagaacattgttaaaggtgcttacgatcttttttgttttcctttccactccattgtatcaattttttgagtaacttttaaatggctagaaaatggtctttttgctttgcccttttaaagctgaaataaccagctccattcttttcatgaatagtaagttgatatatttatttatcaggtatcttgcagttgtcaccaaatactgtagttttcttatgttgtatggaaattatagttcaattattttaatgtgatagagtgcaacaagtcattgtagaacttttcacctgttaatgttgaagttatacctctgaatttctgctgtggatatcaaggaaataataaagcagaaaccccaagaaatttgcaacttaacagtttgagactgtctcttatcctagtatttgggaagagaaggaataaatttgtcaaaactaggtgagaaaatagagcattgtgggaaaaactgagtccaactagattagcaaatgttaattcctagctcaaactgtgaatagtaaggattgaaaagtaaagtatgtaatgctaagggctgtgttgtcttttcttacgattttaagttttaaaggctgttaaattacagagatgttgcccaaggatacatggggattctcaaaagtaagagatttttacctttttcataatctgccaagctggttcctaatatattgttaaattggtagaaaaatatctttaaattggtgtctgctcaagaattgcttttctagatttgatggagggagggggagagtcacatcatttggattctaccaatctgcaggctctatctttggcaacatgtaaataattagactatacatctgtttctcaagtatggcaagaccaatagtttgaatttaattatcaatgctatggtatactttctggtcatattttagttatgtcagttttaaggtaagttttttcatttattaaagcccttaaatgagattttagactgccaaagagaagaggcagtccaattgacctaactgaaatgagatgaccagtatatagagcctagatggactgtagcagctctacccctttgttttacaaggtaaatcattttaaaaattaccttttttgatcagtgggtaaaagttaaagggatctttaatttttgatatattcaagttaattttctaaatgtgaatcagtccttggactgcaactatatattcacctacaaaatcccaatcaaaaaattacatgagcctgtcaagcagatctttagttttccacttcacataagatcgttaatgttctaaattaatctattcatttagatgatttttgtcagttcttaaatgggatataataaatttagcattttcatcttaacaagcaaaagagttaaaaaacaaaacaaaacactactccaagccaaatacattctagctggttaattccagacttgtcccaagtggttccccaacctcttttccactggtaatttcttttcatgcaggcagaatataggggtgcgagcgctgtgagttttacatatgagcttggataggggaactgaagcgagtcaggagccctgctggaaaaggggtttgccattggattgtctgtggcctggtttctttccagtagtacagtaatagggtagattgaaaacaagtatttacttctgattctgcctgcatttagtgtgaaatgctcttaaggtattgcttctaaaaagcaaattaagcagttaagtataaagtccctgaattcatatttcaaaataaggcttttatgagatttttattaaaaattgcaatagccatcacaaatctgagtttttctaggggtgagagaaaactgtattgtgatgagctagattagttgtagttccagaataagaacaaaaattcagagttgtgtggtgcccatcattgagtaaatgaaccctaaaaatgaataagctaatgaactagttcatggaattatttctgatggtcttttgacctgatgctgccatactgcagtgttaccagctccccctagaaaacggaactgtttaaaaacacagcaagttacagaaaccattttattctacagccattggggtacttcagtttatgggatgtttttggaaacttctgctttgggagggatgaagatcattgataaatgttatttgctttctgagttttggggtcatttcattgcttatcaatgaagggcagacagaggagagaatatctcaagtcttttctgataaaaggcttgcttgagggagcttataacttgcacctagagggtttacccactttgtggatttgatttatccaccaaccacagcaaccaataatgtcaagattctaggagtttatgaaagaggctagtatgttttcattttgagtcagacattcttttctcattctcaaatctgttttaaatgctccaattttaaaaatgccaatgaaaattttataatgcttctgtagtaaccatatgcagtttactttgaatttaggaaaacagttttgtatgatgaaatattgtgcagaatctgtaaataaggtagcttaaaaattaaaaaaaagtctaattagaa

SEQ ID NO: 229009 - DNA, 6810 bp, Artificial Sequence
  derived and/or modified sequence
atggctgagcctagcagcgctagacgccctgtccccttgatagaaagtgagctgtattttctgattgcccgatatctgtcggccgggccctgtcgacgggcagctcaagtgttggtacaagagctcgaacagtaccagctgctgccaaagcgtctcgattgggaggggaacgagcacaaccggtcctacgaggaactcgtcctatctaataagcatgtggcccctgatcacctgctgcagatctgtcagaggattggacctatgttagataaggagatccctcccagtatctctagggtcacgtctttactcggcgcaggcaggcagtccctgttacgaacagctaaggactgtcgacacactgtgtggaaagggtcagctttcgccgctcttcacagaggccgccctcctgagatgcctgttaattatggatcacctccgaatctggtggaaatacacaggggaaagcaactcactggatgttcgacgttctctaccgctttccctggcactatgtatcagcatattaaaatgcacaggcgcatcctcggtcatctatctgctgtatattgcgttgcgttcgaccggactggccatcggatttttactggaagcgatgactgcctggttaaaatatggtccacacataacggccggcttctttccacgctgcggggccatagtgccgagatctccgatatggccgtaaattatgagaacactatgatcgccgcaggttcctgcgacaaaattatcagggtgtggtgtctcagaacatgtgcacctgtggctgttctgcagggtcacacgggcagcatcacttccctgcagtttagtccaatggctaaaggtagtcagaggtatatggtttccaccggcgctgacgggacggtgtgtttttggcaatgggatctggagtccctgaagtttagtcctcgaccactcaaatttaccgagaaacctagacctggggtgcagatgttgtgtagctccttttccgtcggaggaatgtttctagcaaccggatcaactgaccacgtgataaggatgtatttcctagggtttgaggctccagaaaagatcgccgaactggagagccacactgacaaagtggactcaatccagttttgcaacaatggcgaccggttcctgtctggctcccgggatgggaccgccaggatatggcgctttgagcagctggaatggaggagtattttgcttgatatggctacacggatttctggagacctgtcaagtgaagaggagcggttcatgaagcctaaagtgactatgattgcgtggaaccagaacgactcgattgttgtgactgcagtcaatgatcatgtgcttaaggtgtggaactcttacactggccagctgttgcacaatttaatggggcacgccgatgaagtatttgttttggagacccatccctttgattcacgcatcatgttgagcgcaggtcacgacggttctatatttatctgggacattacaaagggcaccaagatgaaacattactttaatatgatcgaaggccaaggccatggcgcggtgtttgactgtaaattttcccaagacggacaacacttcgcttgtactgattcccacggtcacctcctcatcttcgggttcggctgctcaaagccatatgagaaaattcctgaccaaatgttttttcataccgactatcgaccgttaatccgagattctaacaactacgtactggatgagcagacccagcaggctcctcacctgatgccccctccctttctggtagatgttgatgggaacccccaccccacaaaatatcagagactggtgccaggaagggagaacagcgccgatgagcacctcattccccagctgggctatgtggccacatcagacggtgaagtgatagaacaaattatcagtttgcaaacgaatgataacgatgagcggagcccagagtcttctattcttgacggcatgattaggcaattgcaacaacagcaagatcagcggatgggtgccgaccaggatactattccccgaggactcagcaatggcgaagaaactccaagaagggggtttcgccggctttcactggacattcagtccccacccaacatcggacttcgccggtctggtcaggtcgaaggcgtaaggcagatgcaccagaacgctccacgtagccaaatagccacagaacgggatttacaagcatggaagcgccgggtggtagtgcctgaagtgcctcttggtatttttcgtaaactcgaggactttagactcgagaaaggtgaggaggagagaaacctttatatcatcgggagaaaacgcaagacacttcaactttcccacaagagcgatagcgtggtcctcgtttctcaatccagacaaaggacttgtcggaggaaataccccaactatgggcgacgaaatcggtcttggagagagttgtcatccggaaacgagtcctcctccagcgtgagacatgaaacctcatgtgaccaaagtgaagggagcggctcaagcgaagaggatgaatggcgcagcgaccgaaaaagcgagagttacagtgagtcgtccagcgatagctcctcccgatatagtgattggacggcagacgcaggcattaatttgcagccgcctctaagaacctcatgccggcgacggattacacgcttttgcagttcatcggaggatgagatctctacagagaacctgtcaccccccaagagaagacggaaacggaaaaaagaaaacaaacccaagaaagagaatctgcgaaggatgacccccgctgagctcgcgaacatggaacacctttatgagtttcacccaccagtttggattacagatactaccctcagaaagtcacccttcgtgccacagatgggtgatgaggtcatttattttagacaggggcatgaagcctacatcgaggcggtgcgccggaacaacatctatgaactgaaccctaacaaagaaccctggagaaaaatggacctcagagaccaggaactcgtgaagatcgtcggaatcagatatgaagtgggcccacctaccctgtgctgtctgaaactggcgttcattgatccagccactggtaagctgatggacaaaagtttttctatcagataccacgatatgccagatgtcatcgattttctggtgctgcggcaattctacgacgaggcccgccagcgaaattggcagagttgcgatcgcttccgtagtatcatagacgacgcctggtggttcggcaccgtgctgtcccaggagccatatcagccccagtaccctgattcccatttccagtgctatattgtcagatgggacaacacagaaatcgagaaacttagcccatgggacatggaaccgattcctgataatgtggatccgccggaagaattgggcgcaagtatctccgttacgaccgacgagctggaaaagctcctgtacaaaccacaggccggcgaatggggacagaagtctagagacgaagagtgtgaccgtataatttctgggattgatcagctgctgaatcttgacatcgctgccgccttcgcgggtcccgtggacttgtgcacttacccaaagtattgtaccgtggtcgcctatccaacggacctgtacacgatcagaatgagactcgtaaatagattctacaggcgactgtctgcacttgtatgggaggttaggtacattgaacataacgcccgaactttcaacgaacccgagtctgtcattgcccgaagcgctaagaagatcaccgatcagctattaaagtttattaaaaatcagcactgtacgaatattagtgagctcagtaacacaagtgaaaacgacgagcagaatgcagaggatctggacgactctgacctaccaaagacaagcagcggtcgtaggcgagttcacgatggcaaaaaaagtatccgcgctacaaattatgttgagagcaattggaaaaaacagtgtaaagagttggtgaacttgatcttccagtgcgaggattccgagccattccgccagcccgttgacctggttgagtatcccgactacagagatattattgacactccaatggactttggaactgtgcgagagaccttggatgcagggaattacgattcccccttagagttttgtaaggacatccgacttatatttagcaatgctaaagcgtataccccaaacaaacgatcaaaaatctacagcatgactctacgcctttctgccctgtttgaggagaagatgaagaagatttcttccgatttcaagataggccagaagttcaacgaaaagttgcgtcgtagccaaagattcaagcagagacagaactgcaaaggagacagtcagcctaataagtctatcagaaacctgaagcctaagcgcttgaagtctcagactaaaattatcccagagctggtcgggagccccacgcagtcgacctcttccagaactgcctacctcggcacacataagacatccgctggaatctcttccggtgtgaccagcggcgatagttctgattcagctgagtctagtgaacgtagaaaacggaatagacctatcactaacggaagcactctaagcgaatctgaagtggaggacagccttgctacttcactgagttctagtgcatcctctagtagtgaggaaagcaaggaaagttccagggctagagagagctcatctcgctcaggtctgtcgcggtcaagcaatctgagggtcaccaggacccgcgccgcgcagcggaagaccgggcccgtctctttagcaaatggatgcggccgaaaggcaaccagaaagcgtgtttatctatctgacagcgataataatagtctagagaccggcgagattctaaaagcgagagccgggaacaacagaaaagtccttagaaaatgtgccgccgtggcagccaacaaaattaaactaatgtcagatgtggaggagaacagcagcagtgagagtgtgtgttccggccgcaaattgccacatcggaatgcgtcagccgtggctcgaaagaaactgctccataattctgaggacgagcagtcgctcaagagtgaaatcgaggaagaggaattgaaagacgagaaccagctgctgcccgtgtcttcatcccatactgcacagagcaacgtggatgaatcggagaatagggattccgaaagcgagtcggatttgagggtggcccgcaaaaactggcacgccaacggttacaaaagtcatacgcctgcccccagtaagacaaagtttctcaaaatcgaatcctccgaggaggattccaagagccacgatagcgatcatgcctgcaatagaacagcaggcccttctacgtccgttcagaaactcaaggcagaatccataagcgaggaggccgactccgagcctggtcgatcaggcggccgcaagtataatacctttcacaaaaatgccagcttcttcaagaaaacaaagattctcagtgatagtgaggattctgaaagcgaggaacaggatcgcgaggatggcaagtgtcataagatggagatgaatcctataagcggcaatctgaactgtgaccccattgctatgagccagtgctcatcagaccacggatgtgaaacggaccttgactccgacgatgataaaatcgaaaaacccaataacttcatgaaagattctgcttctcaagacaacggattgtcacggaagatttcccgtaaacgagtgtgcagctccgatagcgactccagtctgcaggtggttaagaaaagttctaaggctcgcacagggcttctgcggattactagaagatgcgccgccaccgccgcgaacaagattaaactgatgagcgacgtcgaagacgtcagcctggagaatgtacacaccagaagcaagaacggtcgcaaaaaaccccttcacctcgcatgcactacagccaagaaaaagctaagtgactgcgaagggagtgtccactgtgaagtcccttctgagcagtacgcatgcgagggcaaacctcctgatccagattctgagggctcaacaaaggtgcttagtcaggcactgaacggggatagtgatagtgaagacatgctgaacagtgaacataaacatcgacacactaacattcacaagattgatgcacccagcaaacggaagtcctcttccgtgacgagctcaggggaggactccaagagccatatccccggctccgagacagaccgcactttcagtagcgagagcaccctagctcagaaagccactgctgaaaataacttcgaggtggaattgaattacggcttacgaagatggaacggtagacgcctgcgcacttacggtaaggccccttttagcaaaacaaaggttatccatgattcccaggagacggcagagaaggaagtcaagagaaaaaggagtcacccagaactggaaaacgtcaagatcagtgagaccacagggaatagtaagttcagaccagacactagctccaagagcagcgacctgggatctgtgacggagagcgacatcgactgtacagacaataccaagacgaagagaaggaaaacaaaaggtaaagccaaagtcgtaagaaaaggaaagacgtttacggcgaacatcagcaagaccgtgcgccggcagaggcagtctaaacggccccgtctgagtgtcgatgataatgactgggaggatctcgactatgctaagagtaaaagggtgctgagacggtctaaaatcaagacgcgtaaccaaggcaggaggactgtaaggtatcatgatggagacgatgaccgctcgcttgagaacgtgctggacttcaatggttgcacgctttag

SEQ ID NO: 229010 - DNA, 6810 bp, Artificial Sequence
  derived and/or modified sequence
atggccgagcccagcagcgcccggcggcctgtgcccctcatcgagagcgagctgtacttcctgattgcccgctacctgtctgctggcccctgccggcgggccgcccaggtgctggtgcaggagctggagcagtaccagctgctgcccaagaggctggactgggagggcaatgagcacaacagaagctatgaggagctggtgctgagcaacaagcacgtggccccagaccacctgctgcagatctgccagagaattggccccatgctggacaaggagatcccccccagcatcagccgggtgaccagcctgctgggcgccggccggcagagcctgctgaggacagccaaggactgccgccacacagtgtggaagggcagcgcctttgctgccctgcaccggggccggcccccagagatgcctgtgaactacggcagcccccccaacctggtggagatccaccggggcaagcagctgaccggctgcagcaccttcagcacagccttccctggcaccatgtaccagcacatcaagatgcaccggcgcatcctgggccacctgtctgctgtgtactgtgtggcctttgacagaacaggccaccgcatcttcaccggcagtgatgactgcctggtgaagatctggagcacccacaacggccgcctgctgagcaccctgcggggccacagcgctgagatcagtgacatggctgtgaactatgagaacaccatgattgctgctggcagctgtgacaagatcatccgggtgtggtgcctgcggacctgtgcccctgtggccgtgctgcagggccacacaggcagcatcaccagcctgcagttcagccccatggccaagggcagccagcgctacatggtgtccactggagcagatggcaccgtgtgcttctggcagtgggacctggagagcctgaagttcagcccccggcccctgaagttcacagagaagcccaggcctggggtgcagatgctgtgcagcagcttctctgtgggcggcatgttcctggccaccggcagcacagaccacgtgatccgcatgtacttcctgggctttgaggcccctgagaagattgctgagctggagagccacacagacaaggtggacagcatccagttctgcaacaatggagaccgcttcctgagcggcagcagagatggaacagcccgcatctggaggtttgagcagctggagtggaggagcatcctgctggacatggccacccgcatcagcggggacctgagcagcgaggaggagcgcttcatgaagcccaaggtgaccatgattgcctggaaccagaatgacagcatcgtggtgacagctgtgaatgaccacgtgctgaaggtgtggaacagctacacaggccagctgctgcacaacctgatgggccacgcagatgaggtgtttgtgctggagacccacccctttgacagccgcatcatgctgtctgctggccatgatggcagcatcttcatctgggacatcaccaagggcaccaagatgaagcactacttcaacatgattgagggccagggccacggggctgtgtttgactgcaagttcagccaggacggccagcactttgcctgcacagacagccacggccacctgctgatctttggatttggctgcagcaagccctatgagaagatcccagaccagatgttcttccacacagactaccggcccctcatccgggacagcaacaactacgtgctggatgagcagacccagcaggccccccacctgatgcccccacccttcctggtggatgtggatggcaacccccaccccaccaagtaccagaggctggtgcccggccgggagaacagcgcagatgagcacctgatcccccagctgggctacgtggccaccagtgatggagaggtgattgagcagatcatcagcctgcagaccaatgacaatgatgagaggagccctgagagcagcatcctggatggcatgatccggcagctgcagcagcagcaggaccagaggatgggcgctgaccaggacaccatcccccggggcctgagcaatggagaggagaccccaagaagaggcttccggcggctgagcctggacatccagagcccccccaacatcggcctgcggcgcagcggccaggtggagggcgtgcggcagatgcaccagaatgcccccaggagccagatcgccacagagcgggacctgcaggcctggaagagaagagtggtggtgcctgaggtgcccctgggcatcttcaggaagctggaggacttccggctggagaagggggaggaggagaggaacctgtacatcattggaaggaagaggaagaccctgcagctgagccacaagagtgacagcgtggtgctggtgtcccagagccggcagaggacctgcaggaggaagtaccccaactatggaagaagaaacagatcctggagggagctgagcagtggaaatgaaagcagcagctctgtgagacatgagaccagctgtgaccagagcgagggcagcggcagcagcgaggaggatgagtggaggagtgacaggaagtctgagagctacagcgagagcagcagtgacagcagcagccgctacagcgactggacagcagatgctggcatcaacctgcagccccccctgcggaccagctgcagaagacgcatcacccgcttctgcagcagcagtgaagatgagatcagcacagagaacctgagcccccccaagagaagaaggaagaggaagaaggagaacaagcccaagaaggagaacctgcggaggatgaccccagctgagctggccaacatggagcacctgtatgagttccacccccctgtgtggatcacagacaccaccctgaggaagagcccctttgtgccccagatgggagatgaagtcatctacttccggcagggccacgaggcctacatcgaggccgtgagaagaaacaacatctatgagctgaaccccaacaaggagccctggaggaagatggacctgcgggaccaggagctggtgaagatcgtgggcatccgctatgaggtgggcccccccaccctgtgctgcctgaagctggccttcattgatcctgccaccgggaagctgatggacaagagcttcagcatccgctaccatgacatgccagatgtgattgacttcctggtgctgcggcagttctatgatgaggcccggcagaggaactggcagagctgtgaccgcttccgcagcatcattgatgatgcctggtggtttggaacagtgctgagccaggagccctaccagccccagtacccagacagccacttccagtgctacatcgtgcgctgggacaacacagaaattgagaagctgagcccctgggacatggagcccatcccagacaacgtggaccccccagaggagctgggcgccagcatctctgtgaccacagatgagctggagaagctgctgtacaagccccaggccggggagtggggccagaagagcagagatgaagaatgtgaccgcatcatctctggaattgaccagctgctgaacctggacattgctgctgcctttgctggccctgtggacctgtgcacctaccccaagtactgcaccgtggtggcctaccccacagacctgtacaccatccgcatgaggctggtgaaccgcttctaccgccgcctgagcgccctggtgtgggaggtgcgctacatcgagcacaatgcccggaccttcaatgaacctgagagcgtcatcgcccggagcgccaagaagatcacagaccagctgctgaagttcatcaagaaccagcactgcaccaacatcagcgagctgagcaacaccagtgaaaatgatgagcagaatgctgaggacctggatgacagcgacctgcccaagaccagcagcggcagaagaagagtgcatgatggcaagaagagcatccgggccaccaactacgtggagagcaactggaagaagcagtgcaaggagctggtgaacctgatcttccagtgtgaagattctgagcccttccggcagcctgtggacctggtggagtacccagactacagagacatcatcgacacccccatggactttggcaccgtgcgggagaccctggatgctggcaactatgacagccccctggagttctgcaaggacatccgcctcatcttcagcaatgccaaggcctacacccccaacaagaggagcaagatctacagcatgaccctgcggctgagcgccctgtttgaggagaagatgaagaagatcagcagtgacttcaagattggccagaagttcaatgagaagctgcggcgcagccagcgcttcaagcagaggcagaactgcaagggggacagccagcccaacaagagcatccggaacctgaagcccaagaggctgaagagccagaccaagatcatccctgagctggtgggcagccccacccagagcaccagcagcaggacagcctacctgggcacccacaagaccagcgctggcatcagcagcggcgtgaccagcggggacagcagtgacagcgctgagagcagcgagaggaggaagaggaaccggcccatcaccaacggcagcaccctgtctgagagcgaggtggaggacagcctggccaccagcctgagcagcagcgccagcagcagcagcgaggagagcaaggagagcagccgggcccgggagagcagcagccgcagcggcctgagccgcagcagcaacctgcgggtgaccaggaccagggctgcccagaggaagacaggccctgtgtccctggccaacggctgcggcaggaaggccaccaggaagagggtgtacctgagtgacagcgacaacaacagcctggagaccggggagatcctgaaggcccgggccggcaacaacaggaaggtgctgaggaaatgtgccgctgtggccgccaacaagatcaagctgatgtctgatgtggaggagaacagcagcagcgagagcgtgtgcagcggcaggaagctgccccacagaaatgccagcgctgtggccaggaagaagctgctgcacaacagtgaagatgagcagagcctgaagtcagaaattgaggaggaggagctgaaggatgagaaccagctgctgcctgtgagcagcagccacacagcccagagcaatgtggatgaaagtgagaacagagacagcgagagcgagagtgacctgcgggtggccaggaagaactggcacgccaacggctacaagagccacaccccagcccccagcaagaccaagttcctgaagattgagagcagcgaggaggacagcaagagccatgacagcgaccacgcctgcaacagaacagctggccccagcacctctgtgcagaagctgaaggccgagagcatcagcgaggaggccgacagcgagcccggccgcagcggcggcaggaagtacaacaccttccacaagaatgccagcttcttcaagaagaccaagatcctgagtgacagtgaagattctgagagcgaggagcaggacagagaagatggcaagtgccacaagatggagatgaaccccatcagcggcaacctgaactgtgaccccatcgccatgagccagtgcagcagtgaccacggctgtgaaacagacctggacagtgatgatgacaagattgagaagcccaacaacttcatgaaggacagcgccagccaggacaatggcctgagcaggaagatcagcaggaagagggtgtgcagcagtgacagcgacagcagcctgcaggtggtgaagaagagcagcaaggccaggacaggcctgctgcgcatcacccggcgctgtgccgccacagctgccaacaagatcaagctgatgtctgatgtggaggatgtgtccctggagaatgtgcacaccaggagcaagaatggaaggaagaagcccctgcacctggcctgcaccacagccaagaagaagctgagtgactgtgagggctctgtgcactgtgaggtgcccagcgagcagtatgcctgtgagggcaagcccccagaccctgattctgagggcagcaccaaggtgctgagccaggccctgaatggagacagcgacagcgaggacatgctgaacagcgagcacaagcaccgccacaccaacatccacaagattgatgcccccagcaagaggaagagcagctctgtgaccagcagcggggaggacagcaagagccacatccctggcagcgagacagacaggaccttcagcagcgagagcaccctggcccagaaggccacagctgagaacaactttgaggtggagctgaactacggcctgcggcgctggaatggaagaaggctgcggacctacggcaaggcccccttcagcaagaccaaggtgattcatgacagccaggagacagctgagaaggaggtgaagaggaagaggagccaccctgagctggagaatgtgaagatcagcgagaccaccggcaacagcaagttccggccagacaccagcagcaagagcagtgacctgggctctgtgacagaaagtgacatcgactgcacagacaacaccaagaccaagaggaggaagaccaagggcaaggccaaggtggtgaggaagggcaagaccttcaccgccaacatcagcaagacagtgcggcggcagaggcagagcaagaggccccggctgtctgtggatgacaatgactgggaggacctggactatgccaagagcaagagggtgctgcggcgcagcaagatcaagaccaggaaccagggccgcaggacagtgcgctaccatgatggagatgatgacaggagcctggagaatgtgctggacttcaacggctgcaccctgtag

SEQ ID NO: 229011 - DNA, 6810 bp, Artificial Sequence
  derived and/or modified sequence
atggccgagcccagcagcgcccggcggcccgtgcccctgatcgagtcagaactgtatttcttaattgctaggtatctgagcgcgggaccgtgcaggcgagctgctcaggtgctcgtgcaggagcttgaacagtaccagctgctaccgaaacggctcgactgggaggggaacgagcacaaccgtagctatgaagagctcgtgttgtctaacaagcacgttgcacctgaccacctactccaaatttgccaaaggattggcccgatgcttgataaggagatccccccatccatttcgcgcgtgacttccttactgggtgcaggaagacagagcctcttgcgaaccgccaaggattgccggcacacagtatggaaaggatcagcttttgcggcccttcataggggtcgccccccggagatgcctgtgaattacgggtcccccccgaaccttgtcgagattcacaggggaaagcagctgacggggtgctctacctttagtactgcctttcctggaaccatgtaccagcacatcaaaatgcacaggagaatcctgggccacctgtctgcagtctactgcgtggcctttgaccgcaccgggcacagaatctttaccggatccgatgattgtctggtcaagatatggagcacccacaatggacgcttactcagcaccctccgcggccactccgcagagatcagcgatatggccgtgaattacgagaatactatgatcgctgctggctcctgtgacaaaatcatcagggtatggtgtctcagaacatgtgcaccggtcgcagttctccaggggcacaccggcagtataacaagtctgcagttcagtccaatggcgaaaggttcacaacgatacatggtgtccacaggagccgacgggacagtctgcttttggcagtgggacctggagagcctgaaatttagtccaagaccactcaagtttactgagaagccaagacctggcgtgcagatgctgtgctccagtttctctgtagggggaatgttcctggccaccggaagtacagaccacgtcattaggatgtacttcctgggatttgaagcccctgagaagattgctgaactggaaagccacaccgacaaggtcgactccatccaattttgcaacaatggtgacaggtttctatctgggagccgcgatgggacggcaaggatatggcgtttcgagcagcttgagtggcggtcaatcctgttggatatggccacgagaatctcaggggatttatcgagcgaagaagaacggttcatgaaaccaaaggttacaatgatcgcatggaatcaaaacgattctatcgtggtgacggcggtcaacgatcatgtcctaaaggtgtggaacagctatactgggcagctgttacataatcttatgggtcacgccgatgaggttttcgtactggagacccatccgttcgatagtcggattatgctgagcgccggacatgacggcagcattttcatatgggacatcaccaaagggaccaaaatgaagcattattttaatatgatagaaggccagggacacggagctgtctttgactgcaagttcagccaggacggacagcacttcgcctgtactgattctcatggacatctgttaattttcggtttcggatgctcaaagccgtatgaaaaaatcccggaccaaatgttcttccatactgactaccgcccactcatacgggactctaacaattacgtcttagacgagcagacacaacaggcgcctcacttgatgccaccgccattcctcgtggacgtcgacggtaatccgcatcccactaagtatcagaggttggtccccggacgcgagaatagcgcagacgagcatctgatccctcagctgggatacgtggcaacatccgacggcgaagtgattgaacaaataatttcacttcaaaccaacgataacgatgaaagaagtcccgagagctcaatcctggacgggatgattagacagctgcaacagcagcaggaccaacgcatgggtgctgaccaggataccattccaagaggtttatcaaacggcgaagaaaccccacgacgcggattccggagactgtcccttgatatacaatctccgcccaatatcgggcttcgcaggagcggtcaagtggagggagtgcgccagatgcatcagaatgccccaaggagtcagatcgctactgagagggacctccaggcttggaagcgtagggtggtcgtgccagaagttccgctgggcatttttcgaaagctggaggactttcggttagagaaaggcgaggaggagcggaacttgtacatcatagggcgcaagaggaaaacattacagctaagccacaagtccgacagcgtggttctggtttcccagtcccgacaaagaacctgtagacggaaatacccaaattacgggcgacgtaaccggagttggagagaactcagcagcgggaatgagagtagcagttctgtgcggcacgaaacatcgtgcgaccagtccgagggtagcgggtctagtgaggaagatgaatggcgttccgacagaaagtctgagagttattcagaatctagcagcgacagctcgtccaggtacagtgactggacagccgatgcaggcatcaacctgcagcccccgttacgaacttcctgtagaagacggattactagattttgtagttcatctgaagatgaaattagcaccgagaacctcagccccccgaaaagacgaaggaaacgcaaaaaggagaataagccgaaaaaagagaatctgcgcagaatgaccccagcagagctggccaatatggagcacttatatgagtttcatccccctgtgtggatcacggacaccacactgcggaagtctccttttgttccacagatgggcgatgaggtcatatattttcggcagggacacgaggcctatattgaagccgtgcgacggaacaatatctatgaacttaatccaaataaggagccttggcggaagatggacttgagggatcaggaacttgttaaaatcgttggcattcgctatgaagtcggccctcccaccctctgctgccttaaactggcctttatcgacccagctaccggaaaattgatggataaatcctttagtatccggtaccacgatatgcccgatgtgatcgactttcttgttctgcggcaattctatgatgaggcaagacagcgtaactggcagagttgtgatagattcaggtcaatcatagacgacgcctggtggtttggaacagtgctcagccaggaaccgtatcagcctcagtaccccgactcccacttccagtgttatatcgtgaggtgggataatacagagattgaaaagctctctccgtgggatatggaacctatccctgacaatgtggaccctcctgaggagcttggcgctagtatcagtgtgactaccgacgagctggaaaaacttctgtataagccacaggccggagagtggggccagaagagcagagatgaggaatgcgatcggatcatttctggcatcgatcagctactaaatcttgacatcgcagccgctttcgccggcccagtcgacttgtgcacctatccaaaatactgcacagttgtcgcctaccccacagatctctacacaatccgcatgcgactggtaaatcgattctatcgcagacttagcgccttagtttgggaggtgcgttatattgagcataacgctcgcaccttcaatgaacctgagtcggtgatcgccaggtccgccaagaagattaccgaccagctcctgaaatttattaaaaaccagcattgtacaaatatcagcgaactaagtaatacctccgagaacgatgagcagaacgccgaggacctggacgatagcgacctgccgaagacctccagtggtaggaggagagtgcacgacgggaaaaagtcaatccgcgccactaattatgttgaatcaaactggaaaaagcagtgtaaggaactagtcaacttaattttccaatgcgaagatagcgaacccttccggcaaccagtggacttggtcgaatatcccgattatcgtgacattattgacactcctatggatttcggtactgtgagggagacgcttgatgctggcaactacgattctcccctcgaattctgcaaggatattaggctcattttctccaatgcaaaggcctatactcccaacaagcggtccaaaatttactctatgaccctcagactctcagccctgttcgaagaaaagatgaagaaaatcagctccgatttcaagataggccagaaattcaacgagaaattgagaaggagtcagcggtttaagcagcgccagaattgcaagggtgattcccagcccaataagtccatcagaaatcttaaacctaaacgcttgaagtcccagaccaagattatccctgagttagtaggctcaccaacccaatcaaccagcagtaggacagcctatctgggtacacataagacttcagccggaatctcctctggagttacttcgggcgattcaagcgactcagctgagtcctccgagcggcggaaacggaaccggccaatcacgaacggaagcactctctccgaatccgaggtggaagacagcctggccacctctctgagctcttcagcttcaagctcttccgaagagagcaaggagtccagtcgagcaagagaatcttcatccagaagcggcctgtcccgcagttctaaccttcgggtcactagaacaagagctgcacaacgcaagactggtcccgtgagcctggctaatgggtgcggacggaaggcaacaagaaagagggtctatctcagcgacagcgacaataactccttggaaacaggtgaaatcctgaaggctcgcgcgggcaacaatcgaaaggtattgagaaaatgcgcagcagtagcggcgaacaagatcaagctcatgtcagacgttgaagagaattcttcctcagaatccgtgtgcagtggtcgaaagttaccacatagaaatgcctcggcagtggccagaaaaaaactgctgcataactcggaagatgagcagtctctcaagtctgaaattgaggaagaagagctcaaggatgaaaaccagctgttgcccgttagttccagtcatacggcacaaagcaatgtagatgaaagcgaaaatagagattccgagtccgagtcagacctccgggttgctaggaagaattggcatgccaacggctacaagtcccataccccagctccaagtaaaactaagttcctcaagattgagtcaagtgaggaagactcgaagtcccacgattccgaccacgcgtgcaatcggacagctgggccaagcacttcagtgcagaaactgaaggctgagagtatctccgaggaggccgactccgaacctggacggagcggaggcagaaagtataataccttccataagaacgcgagcttttttaagaagactaaaattctcagcgactcagaagactcagaaagcgaggagcaggacagggaagacggcaagtgccacaaaatggagatgaacccaatctcaggaaatctcaattgtgatccaatcgctatgtcacagtgctcgagcgaccacggttgtgagactgatcttgactcagacgatgacaaaattgagaaaccaaataattttatgaaggatagtgcttcccaggataatggactatcccgcaagatcagccgcaaaagagtttgtagtagtgactccgattcttccctgcaggtggtcaagaagagctccaaggcccggactggtcttctgagaatcacaagacggtgtgccgctacagctgctaataagatcaaactgatgtcggacgttgaggatgtgtccctggagaatgtccataccagaagcaaaaacgggcgaaaaaagccactccatctcgcctgtaccaccgcaaaaaagaagctatcagattgcgaaggtagtgtgcattgcgaggtgccaagcgagcagtatgcctgtgaaggaaagccccctgatcccgattctgagggctcaaccaaggtcctttcacaagccctcaacggggactctgattcagaagacatgctgaattcggaacataagcacagacatacaaatattcacaagattgacgcgccttccaagcgaaaatcatcgtcggttacctcaagcggagaagactctaagagtcacatccccggtagtgagaccgatcgaacattcagttcagagagcacactggcccagaaggcgactgccgaaaataatttcgaagtggagctcaactatggacttcgccgctggaacggccgcagactccgtacgtatggaaaagcacccttttccaaaaccaaggtaatccacgattctcaggaaacggctgaaaaggaggtcaagagaaaaagatcccacccagagttagagaatgtaaagatctccgagactactggcaactcgaaattcaggccagacacctctagtaaaagctctgacttaggctctgtcacagagtctgacatcgactgcacagataacacaaagaccaagcgccgtaaaactaaaggtaaagcgaaggtggtgagaaaaggcaaaaccttcacagctaatatcagcaaaaccgtacggaggcagagacaatccaagaggccacggcttagtgtggacgataacgactgggaggatttggactacgctaaaagcaaacgcgtgctccgaagaagtaagattaaaacccggaatcaaggccgcaggactgtgcgataccatgacggtgatgacgaccgtagcttagaaaacgtcctcgatttcaacggatgcaccttgtag

SEQ ID NO: 229012 - DNA, 6809 bp, Artificial Sequence
  derived and/or modified sequence
atggctgagccaagcagcgcacgacgaccggtgccattgattgaatctgagttgtactttttgatcgccaggtacctgagcgcaggcccatgtcgcagagcagcccaagttcttgtccaggagttggagcaataccaactcttgcctaagcggctcgactgggaggggaacgaacacaacagaagctacgaggaactcgtgctatccaacaaacacgtagcaccagaccacctactgcagatctgccagaggatcggaccaatgctggacaaggaaatccctccatcgatttcacgcgtgacctcactactgggggctggtagacagtccctactgcggacagcaaaggactgtcggcatacagtatggaaggggtcggctttcgccgcactgcatcggggaaggccgccagagatgcccgtgaattacggttctcctcccaacctggtggagatccataggggaaagcaattgactggctgttctacctttagcacagcttttcccggaactatgtaccagcatattaaaatgcaccgaaggatcctggggcacctgagcgctgtgtactgtgtcgcttttgacaggaccggacatcggatatttaccggttccgatgactgtctggttaagatctggtccactcacaatgggaggctgctgtccacccttagagggcactcagccgagatttctgatatggcagtcaattacgaaaacacaatgatcgccgcaggtagctgcgacaagattatccgggtgtggtgcctccgcacttgcgcacctgtggccgtgctacaaggtcacactggaagcattacgagtctccagttctcgcccatggccaagggaagccagagatatatggtatctactggagccgatgggactgtgtgcttctggcaatgggacctggagtcactgaaattttcaccccgtccattgaaattcacggagaaaccgagacccggagttcagatgctttgctcttccttttctgttggtgggatgttcctcgctaccggatcgacagatcacgttattagaatgtactttcttggattcgaggctcccgagaaaatcgcagagctcgagtcccacacagacaaagtggattcgatacagttctgtaacaatggcgacaggttcctgagcggctctagagatggaaccgcacggatttggcggtttgagcagttggaatggcgcagtattctgctggacatggccacaaggatctcgggcgatctgagctctgaagaggaaagattcatgaaaccgaaagtcaccatgattgcttggaaccagaacgattcaatcgtggtcacagctgtgaatgaccacgtccttaaagtgtggaacagctacaccggtcagcttctgcataatctaatgggacacgctgacgaagtattcgtgctggagacccatccttttgattcacggatcatgctctccgccggacacgacggctctatttttatttgggacattacaaagggcaccaagatgaaacactactttaacatgattgaaggccagggacacggagcagttttcgactgcaaattctctcaggatgggcagcatttcgcatgtacggacagccacggccaccttttgatttttggctttggctgtagcaaaccttacgagaagattcctgaccagatgttctttcataccgattacaggcccctgatccgcgactcaaacaattacgtgctcgatgaacaaacacaacaggcgccacacctgatgccgcctccttttcttgtcgacgtcgatgggaacccacaccccactaaatatcaaagactcgtgccagggagggaaaactccgcagatgaacacctcattccacagcttggctatgttgctacttctgacggcgaggtgattgagcaaataatctcccttcagacaaatgacaacgatgagaggagtccggaatcgagcatcctggatggtatgatcaggcagttgcagcagcagcaggaccagcgcatgggcgctgaccaggatactatccccagggggctatccaatggagaggaaaccccgaggcgaggctttagaaggctgtcactcgacatccagagtccacccaacatcggcttgcggaggtcagggcaggtggaaggtgttcgccagatgcatcagaatgcccctagatcccagatagctactgaacgggacctgcaggcgtggaagcgtcgcgtggtggtgcctgaggttccgcttgggatttttcgtaagctggaagattttagacttgagaaaggtgaagaggaacgcaatttgtatattatcgggagaaaacgcaaaacgctacagctgtctcacaagagcgattctgtggtcctggttagccagtcccgccaacgtacctgccgccgaaagtatcccaactatggtcgtaggaatcgcagctggagggagctgtcctctggtaacgaaagttcctcctctgttcgtcatgaaacctcttgtgaccagagcgagggcagcggatcgtcagaggaagatgagtggcgctctgacagaaaaagtgaaagctactcagagtcgtcctctgattcatcctcaagatacagtgattggacagccgacgcgggaattaacttgcaacccccactgcgcacgtcttgccgacgaagaattactagattctgttctagctccgaagacgaaatatcgaccgaaaatttatctccgcctaagcgacggaggaagcgaaagaaggagaacaagcctaagaaggagaatttgcgtcgcatgaccccagcagagctggctaacatggagcacctgtatgagttccaccccccagtgtggattaccgacacaacattgagaaagtcccctttcgtgccacaaatgggggatgaagtgatttatttccgtcaaggacacgaggcatatatcgaggccgtgcgacggaataatatctacgaattgaacccaaataaggagccatggcgtaagatggacctccgcgatcaggaactcgtcaaaatagtaggcattcggtacgaggtgggcccaccaacgttgtgctgcttaaagttggcctttatcgacccggctacagggaaactcatggataagagcttctctatcagataccatgatatgcccgatgtgattgacttcctcgtcctgcgccaattttacgacgaggccaggcagaggaattggcagtcttgcgatcgattcagaagcattattgatgacgcctggtggttcggcactgttctgtcgcaggaaccttatcaaccacagtatcctgactctcactttcaatgttatattgtgcggtgggacaatactgagatcgaaaaactgtccccgtgggacatggagccaattccagacaacgtggaccctccagaagagctgggtgcaagcatctcagttactactgacgagctggagaagttgttgtataaacctcaggctggcgaatgggggcagaaatcaagagacgaggagtgtgatcggattatttctggcatcgaccagttattgaatcttgacattgccgcagcatttgctgggcctgtagatctgtgtacttaccctaaatattgtaccgttgtggcgtatccgaccgacctgtacacaataaggatgcggttggtcaacaggttttacaggcgccttagcgccttagtgtgggaagtcagatacatcgagcacaatgccaggacattcaacgagcccgagagcgtgatcgcccgatcagccaagaagattactgaccagctcttaaaattcatcaagaaccagcattgtacaaatataagtgaattatctaatacctctgagaatgatgagcagaacgcggaggatctggacgactcagatctccctaagaccagcagtggtcgccgacgggtgcacgacggcaaaaagagcatcagagcgacaaactacgtggagtctaactggaagaagcagtgtaaggagctggttaatctaatcttccagtgcgaggactcggaacctttcaggcaacccgtggacctggtggaatatcccgattacagagacataatcgacaccccaatggacttcggcacagtgcgggagacgctggacgctggaaattatgactcacccctggagttttgcaaggacatacgacttatattctcaaacgcaaaggcttacacaccaaataagcgctcgaagatatactccatgaccctgcgcctgagtgcgctgttcgaggagaagatgaaaaagatatccagcgactttaagattggccagaagttcaacgaaaagcttagaagaagccagaggttcaagcagcgacagaactgcaaaggtgactcgcaaccgaacaagtcaattcgaaacctcaagccaaagaggctgaagagccagacaaagatcattcccgagttggtgggatctccaacacaatctacaagcagtaggaccgcctacctggggactcacaagacctcagccggaatcagctctggcgtgactagcggcgacagctcagatagtgctgagagtagcgagcgccgtaaacgtaatagacctatcaccaacggatctactctgagtgagagcgaggtggaggactccctggctactagtctgtcttcctcagcttcctcttctagtgaagagtcaaaagagagcagcagggcacgtgagtcttcctccaggtccggtctctcccgcagttccaacctgagagtgactcgcacaagagctgcccagcggaagacaggccctgtgagcttggccaacggctgcggccgtaaggctactcgcaagagggtgtaccttagtgattcagataacaactctctcgaaaccggtgagatactgaaagcgagagccggaaataaccgaaaggtgttgcggaaatgtgcggcagtggccgctaacaagattaagcttatgagcgacgtggaagagaacagcagcagcgaatccgtgtgcagcggccgtaagctgccccaccgcaatgcctccgccgtggccagaaaaaagttgctgcacaacagcgaagacgagcagtctttgaagagcgagatcgaagaagaggaactgaaagatgagaaccagcttttacccgtaagctcatcacatactgctcagtcaaacgttgatgagagcgaaaacagagacagcgaatcagaaagcgacctgagggttgccagaaaaaattggcacgcaaatggttataaatcccataccccggcaccaagcaaaacaaaattcctcaagatcgaatcttctgaggaagacagcaaaagccatgactcagaccatgcatgtaatagaaccgcaggcccaagcacaagtgtgcaaaagctcaaggccgaatccatttctgaggaggctgacagcgagcccggtcgtagtgggggacggaagtataacacctttcataaaaatgcctctttcttcaaaaaaacgaagattctgtccgattcggaggatagcgagtccgaagaacaggatcgagaagacggaaagtgccacaagatggagatgaaccctatttcggggaacctgaactgcgatccgatcgccatgagccagtgctcttctgaccacggttgcgaaacagacctggactccgatgatgataaaatagaaaagcccaacaacttcatgaaggatagtgcaagtcaggacaacggactttcccgaaaaatcagtcggaaacgggtgtgctcctcggactctgattcctcactgcaggtagtgaaaaagagcagcaaggcaaggaccggactcctccggataactcgcagatgcgctgctacggccgcaaacaagattaagttgatgtctgatgtagaggacgtgtcccttgagaacgttcacactagatctaaaaatggcaggaaaaagcccctgcacctggcctgcaccaccgcaaagaagaaattgtctgattgtgagggatccgttcattgcgaggtgcctagcgagcagtacgcctgcgagggtaaaccaccagaccccgactctgaaggcagcactaaggtcctctctcaggcgctgaacggggactcggactcagaggatatgcttaattccgagcacaaacatcgtcacactaatattcacaagatcgatgcacctagcaagcggaaaagctcctccgtgaccagcagcggcgaagactcaaaatctcacatccctgggtccgaaacagatcgcacgtttagctcagaaagcactcttgctcaaaaagcaaccgccgagaataattttgaggtggaactcaactacggcctgcgccgatggaacggtagacggctgcggacctatggaaaagcccctttcagcaagacaaaggtgatccacgattctcaggagacagccgagaaggaagtcaaacgtaaacgaagccacccagagttggagaacgtcaagatctctgagactactgggaactctaagtttcgaccagacacaagctcgaagtccagtgatttaggatcggtgaccgaatcggacatcgattgtaccgataatacaaagactaaaaggaggaagaccaagggcaaggcaaaagtagtccgcaaggggaagacctttaccgcaaacattagtaagactgtccgtcgccaaaggcagtcgaagaggcccaggttgagcgttgatgataacgactgggaggacctcgactatgctaaatctaagcgtgtgctgaggcgtagcaaaattaagaccaggaaccagggcagacgaactgttcggtatcacgatggtgacgacgaccgcagcttggaaaacgtcctggactttaacggctgtactcttta

SEQ ID NO: 229013 - protein, 412 aa, Artificial Sequence
  derived and/or modified sequence
MAGSVGLALCGQTLVVRGGSRFLATSIASSDDDSLFIYDCSAAEKKSQENKGEDAPLDQGSGAILASTFSKSGSYFALTDDSKRLILFRTKPWQCLSVRTVARRCTALTFIASEEKVLVADKSGDVYSFSVLEPHGCGRLELGHLSMLLDVAVSPDDRFILTADRDEKIRVSWAAAPHSIESFCLGHTEFVSRISVVPTQPGLLLSSSGDGTLRLWEYRSGRQLHCCHLASLQELVDPQAPQKFAASRIAFWCQENCVALLCDGTPVVYIFQLDARRQQLVYRQQLAFQHQVWDVAFEETQGLWVLQDCQEAPLVLYRPVGDQWQSVPESTVLKKVSGVLRGNWAMLEGSAGADASFSSLYKATFDNVTSYLKKKEERLQQQLEKKQRRRSPPPGPDGHAKKMRPGEATLSC

SEQ ID NO: 229014 - DNA, 1239 bp, Artificial Sequence
  derived and/or modified sequence
atggccggcagcgtgggcctggccctgtgcggccagaccctggtggtgagaggcggcagcagattcctggccaccagcatcgccagcagcgacgacgacagcctgttcatctacgactgcagcgccgccgagaagaagagccaggagaacaagggcgaggacgcccccctggaccagggcagcggcgccatcctggccagcaccttcagcaagagcggcagctacttcgccctgaccgacgacagcaagagactgatcctgttcagaaccaagccctggcagtgcctgagcgtgagaaccgtggccagaagatgcaccgccctgaccttcatcgccagcgaggagaaggtgctggtggccgacaagagcggcgacgtgtacagcttcagcgtgctggagccccacggctgcggcagactggagctgggccacctgagcatgctgctggacgtggccgtgagccccgacgacagattcatcctgaccgccgacagagacgagaagatcagagtgagctgggccgccgccccccacagcatcgagagcttctgcctgggccacaccgagttcgtgagcagaatcagcgtggtgcccacccagcccggcctgctgctgagcagcagcggcgacggcaccctgagactgtgggagtacagaagcggcagacagctgcactgctgccacctggccagcctgcaggagctggtggacccccaggccccccagaagttcgccgccagcagaatcgccttctggtgccaggagaactgcgtggccctgctgtgcgacggcacccccgtggtgtacatcttccagctggacgccagaagacagcagctggtgtacagacagcagctggccttccagcaccaggtgtgggacgtggccttcgaggagacccagggcctgtgggtgctgcaggactgccaggaggcccccctggtgctgtacagacccgtgggcgaccagtggcagagcgtgcccgagagcaccgtgctgaagaaggtgagcggcgtgctgagaggcaactgggccatgctggagggcagcgccggcgccgacgccagcttcagcagcctgtacaaggccaccttcgacaacgtgaccagctacctgaagaagaaggaggagagactgcagcagcagctggagaagaagcagagaagaagaagccccccccccggccccgacggccacgccaagaagatgagacccggcgaggccaccctgagctgctag

SEQ ID NO: 229015 - DNA, 1239 bp, Artificial Sequence
  derived and/or modified sequence
atggcaggttctgtggggctggcgttgtgtggtcagacactggtcgtgaggggagggagtagattcttagctacgagtatagcctccagcgacgatgatagtttgttcatctacgattgcagcgctgccgagaaaaaatcccaggagaacaagggtgaagacgcccccctagaccagggttctggagctatcctcgcaagcacgttttcgaagagcggcagctattttgcattaacagatgatagcaagcgcctaatactctttcggactaaaccgtggcagtgtcttagtgtgagaaccgtggccagaaggtgtaccgcactgaccttcatcgcatccgaggaaaaggtactggtagccgacaagtccggcgatgtttatagtttctccgtactggaaccccatggatgtggtcgcctcgagctcggacacctgtcaatgttgctggatgtggctgtcagccctgatgataggttcatcctgaccgcagacagggacgaaaagattcgagtgtcgtgggcagccgccccacattcaatcgaatcattctgtttgggccataccgagtttgtttctaggatctcagtcgtccccactcagccagggctgctcctatcgtcttctggcgacggcacactcaggctgtgggaataccgtagcggtcggcaactccactgctgtcatttggcaagtctgcaggagctggtcgatcctcaggctccccagaaatttgctgcctcgcgtattgcgttctggtgccaggaaaattgcgtcgccctactgtgtgatggtacgccagtggtgtacatcttccagttggacgcgcgtcggcagcagctggtgtatcgccagcagctcgcctttcaacatcaggtgtgggatgttgcatttgaagaaacacagggcctctgggtgctccaagattgtcaggaagctcctcttgtactctacaggcctgtgggcgatcagtggcaatctgtgccggagtcaacagtgctgaagaaagtttccggagtgctgagggggaattgggccatgctggaggggtccgctggagccgacgcttcgttcagtagcctctataaggccacattcgataacgtcacaagttaccttaagaagaaggaagaaaggctccagcagcaattggaaaagaagcagagacgccgatctccccctcccggaccagacggtcacgctaagaagatgcgccctggggaagccactctctcctgctag

SEQ ID NO: 229016 - DNA, 1239 bp, Artificial Sequence
  derived and/or modified sequence
atggccggaagcgtaggcctagctttgtgtgggcagactctggtggtgcgcggcgggtcacggtttcttgcaacgagcatcgcgtcctctgacgatgacagcttgttcatatacgattgcagcgctgctgagaaaaaaagtcaggagaacaagggcgaagacgccccacttgaccaaggatctggagcaatcctggcaagcacctttagcaagagcggatcttattttgccctgacagatgacagcaaaaggctgattctgttcaggactaagccctggcagtgtctatccgtcagaaccgttgctagacggtgtactgctctgactttcattgcttctgaggagaaggtgttggtggcagacaaaagtggcgacgtgtacagcttttcagtcttggagccccatgggtgcggcagactagaacttggccatttaagcatgctcttggacgtggcagtctctcctgacgaccgctttatattgaccgcggaccgggacgaaaagattagagtgagctgggccgccgccccgcatagtattgaaagtttctgcttggggcacaccgagtttgtgagccggatctccgtggtgccaacccagcctggtctgctgctgtccagcagtggggacggcacacttagactgtgggaatacagatctggacgtcagctgcactgctgccacctcgcttcacttcaggagctggtggacccccaggcgcctcagaagtttgcagcaagtcgaatcgcattctggtgccaggagaactgtgtcgctctactttgtgacggtactcccgttgtgtatatcttccaactggatgcccgcagacaacagcttgtgtatcggcagcagctggcctttcagcaccaggtctgggatgtggcatttgaagaaactcaaggtctttgggtgctccaggattgccaggaggctccacttgtgctgtatcgccccgttggtgaccagtggcagtctgtgccagaaagtactgtgctgaagaaagtgtcgggcgtcctgagaggcaattgggcgatgttggaggggtccgctggggcagacgcttccttttcttccttgtataaggccaccttcgataatgtaacatcctatttgaagaagaaggaggaaagactacagcagcagcttgagaagaaacaacgccggagatccccccctcctggtcctgacgggcatgcaaaaaagatgcgacccggggaagcaaccctgagctgttag

SEQ ID NO: 229017 - DNA, 1239 bp, Artificial Sequence
  derived and/or modified sequence
atggccggctctgtgggcctggccctgtgtggccagaccctggtggtgcggggcggcagccgcttcctggccaccagcatcgccagcagtgatgatgacagcctcttcatctatgactgcagcgctgctgagaagaagagccaggagaacaagggagaagatgcccccctggaccagggcagcggggccatcctggccagcaccttcagcaagagcggcagctactttgccctgacagatgacagcaagaggctcatcctcttccgcaccaagccctggcagtgcctgtctgtgaggacagtggcccggcgctgcacagccctgaccttcatcgccagcgaggagaaggtgctggtggccgacaagtctggagatgtgtacagcttctctgtgctggagccccacggctgcggccgcctggagctgggccacctgtccatgctgctggatgtggccgtgtccccagatgaccgcttcatcctgacagctgacagagatgagaagatccgggtgtcctgggccgccgccccccacagcattgagagcttctgcctgggccacacagaatttgtgagccgcatctctgtggtgcccacccagcccggcctgctgctgagcagcagtggagatggcaccctgcggctgtgggagtaccgcagcggccggcagctgcactgctgccacctggccagcctgcaggagctggtggacccccaggccccccagaagtttgctgccagcagaattgccttctggtgccaggagaactgtgtggccctgctgtgtgatggcacccctgtggtgtacatcttccagctggatgcccggcggcagcagctggtgtaccggcagcagctggccttccagcaccaggtgtgggatgtggcctttgaggagacccagggcctgtgggtgctgcaggactgccaggaggcccccctggtgctgtacagacctgtgggggaccagtggcagagcgtgcctgagagcacagtgctgaagaaggtgtctggagtgctgcggggcaactgggccatgctggagggcagcgctggagcagatgccagcttcagcagcctgtacaaggccacctttgacaacgtgaccagctacctgaagaagaaggaggagcggctgcagcagcagctggagaagaagcagaggagaagaagccccccacctggcccagatggccacgccaagaagatgaggcctggagaggccaccctgagctgctag

SEQ ID NO: 229018 - DNA, 1239 bp, Artificial Sequence
  derived and/or modified sequence
atggccggcagcgtgggcctggccctgtgcggccagaccctggtggtccgcggtggttcaaggtttttggcgacctctatagcaagctcagatgacgacagcctgttcatttacgattgcagcgcggccgagaagaagtctcaggagaacaagggagaagacgcacctcttgaccaaggcagcggagcaatcctcgcgagtactttcagcaaaagcgggtcctacttcgctcttaccgacgacagcaagcggctaattcttttccggaccaagccgtggcagtgtctctccgtgcggacagttgctcgacgttgcacagccctcacctttatcgcctcagaggagaaggtgttggttgctgataaaagcggcgatgtctacagcttcagtgtcctggaaccccacggctgtggtcgtttagaattaggacatctgtcaatgctgctcgacgtggcagtgagccctgacgatcggttcatactgactgcagatcgcgacgaaaagattagggtgtcctgggccgcggctcctcactctatcgagagcttctgcctgggccacacagaatttgtatccagaatctctgtggtccctacccagcccggactcctactttcctcttctggcgacggcactttacggctgtgggagtacaggagcggccggcaacttcactgctgccatttggcctccttgcaggaactggtggacccccaggcgccacagaaattcgctgcctccagaatagccttctggtgccaggagaactgcgtagccctgttatgcgacgggactccggtcgtttacatattccagctcgatgctcggcgacagcagctggtatacagacagcaattggcattccagcatcaggtgtgggacgtggcctttgaagaaactcaagggctttgggtgttgcaagattgccaagaagccccacttgtgctgtataggcccgtcggcgatcaatggcagagtgtgcccgagagtacggtgctgaagaaggtgtccggagtgctgcgggggaattgggcgatgttggaaggcagtgctggcgccgacgcgagcttttcctctctgtataaggctacctttgacaacgtgacatcttatctgaaaaagaaagaggagaggctccagcaacagcttgaaaaaaagcagcgtaggaggagccccccgcccggacctgatggccacgcaaagaaaatgcggccaggggaggctacactgtcctgttag

SEQ ID NO: 229019 - DNA, 1239 bp, Artificial Sequence
  derived and/or modified sequence
atggccggcagcgtgggcctggccctgtgcggccagaccctggtggtgcgggggggctctaggtttctggccacatcaatcgcgtcctccgatgatgacagcctatttatttacgattgctctgcagcagaaaaaaaaagccaggagaacaaaggtgaagacgcccctcttgatcaagggtccggagccatcctagctagtacttttagtaagagtggtagctactttgccctgaccgacgacagcaaaaggttaatcctgttccgcactaaaccctggcaatgtttgtcagtgcgcaccgttgcaaggcggtgcactgcactgacctttatagcctcagaagaaaaagtcctcgtggcagataagagcggcgacgtctatagtttttccgtcttggagccgcatggttgtggcagactcgaactcggtcatctgtctatgttactagacgtagcggtcagtccggacgataggttcattctgaccgccgatagggacgagaaaattagagtgtcatgggccgctgccccacactcaatcgaatccttctgtctgggccatactgagttcgtgtcccgaatttctgtggtgcccacccagccgggtttattgttgtcgagctccggcgacggcactctgaggttatgggaatatcgctcaggacgccaactgcattgctgtcatctcgccagtctccaggaactggttgacccacaggctccacagaaattcgccgcatctcgcatagccttttggtgccaggagaactgcgtggccttgctgtgtgacgggactcccgtggtgtatatttttcagctggacgcccgcagacagcagcttgtgtataggcagcagcttgctttccagcatcaggtgtgggacgtcgccttcgaagaaacacaggggttatgggttctacaggattgtcaggaagctcctcttgttctttacagacctgtgggcgatcaatggcagagtgtcccagagtctacagtgctgaaaaaggtttctggcgtccttaggggtaactgggccatgctggaaggtagtgcaggggccgacgccagcttctcctccctgtacaaggctacgtttgacaatgtcactagctatctcaaaaagaaagaggaacgcttgcagcaacagctggagaaaaaacagcggaggagatcacccccccctgggccggacggtcacgcaaagaaaatgaggcctggggaagccactttgtcatgctag

SEQ ID NO: 229020 - DNA, 1239 bp, Artificial Sequence
  derived and/or modified sequence
atggcagggtccgtcggacttgcactgtgtggtcaaactctggtcgtacggggtggaagtagatttttggcaacctcgattgccagtagtgacgatgattccctgttcatttatgattgcagcgctgccgaaaaaaaaagtcaggagaacaagggggaagacgcccctcttgaccagggaagtggtgccatccttgcctcaaccttctcaaagtctggaagttactttgcattgactgatgattctaaacgtctgatactgtttcgcacgaagccttggcaatgcttgtctgtgaggactgtcgcccgaaggtgtactgccctgacattcatcgctagcgaagaaaaggtcctggtggctgataagtccggggacgtttactcattcagtgtcttggagccacatggctgcggcagactggaactgggtcatctgtcaatgctgttggatgtcgcagtcagcccggacgaccgatttattctcactgcagaccgcgatgagaagatccgcgtttcctgggcagccgctccccactctatcgagagtttctgcctgggccacaccgagtttgtgtccagaatcagcgttgtcccgactcagccaggcctcttgctctcctcttccggcgacgggaccctccgtctgtgggagtatcgctccggccgtcagcttcactgctgccatctcgcgtcactccaggagcttgtggacccacaggctcctcaaaaattcgcagcatcgcgcatagcgttttggtgtcaggagaactgcgttgctctgttatgtgatggtaccccagtcgtttacatatttcagcttgacgccagacggcagcagctggtctacaggcagcagctggcctttcagcatcaagtgtgggatgtggctttcgaagaaacccaggggctgtgggtgctgcaggactgtcaggaggcccctctggtgctgtatcgccctgtgggagaccagtggcagtccgtgccggagagcacagtgctgaagaaagtaagcggtgtgctgaggggcaactgggccatgctggaagggtctgccggagccgacgcctcctttagctcgctctacaaggcaacgttcgataacgtgacttcctacctgaagaagaaggaagaacgtcttcaacaacaacttgaaaagaagcagagacgccgtagcccaccacctggcccagacgggcatgccaaaaaaatgcggcctggggaggccacactctcatgctag

SEQ ID NO: 229021 - DNA, 1239 bp, Artificial Sequence
  derived and/or modified sequence
atggcagggtccgtggggttggccctgtgtggacagacactagttgtacggggaggctcacggttcttggccacgagcatcgcatcctcagacgacgactccctcttcatctatgactgttccgcagctgagaagaagtcacaggaaaacaaaggagaagacgctccgctcgaccagggctccggtgcaatcctggcgtccacattttccaaatctggaagctattttgcgctgactgacgattctaagcgtctcatcctgttccgaacaaagccctggcagtgcctgtcggtacggactgtggctagacgttgtaccgccctgacttttatcgcatcggaagaaaaggtgttagtggctgataagtcgggggacgtctacagcttctctgtgttagaacctcacgggtgtggaagactcgagctcggacacctttcaatgctactggacgttgccgtttccccagacgaccggttcattctaactgccgaccgtgatgaaaaaattcgggtgtcctgggccgctgcaccacacagtattgaatccttttgtcttggtcacaccgaatttgtgtccaggatatctgtggtgcccacccagcccggtctcttgctcagttcctcaggggacggcaccctgaggctgtgggagtaccggagcggaagacagctgcattgctgccatctagccagtctccaagaactggtagatccccaggcccctcaaaagttcgcagcctctaggatcgccttttggtgtcaggaaaattgcgtagccctgctttgcgacggaacccccgtggtgtacattttccaattggatgccagacgccaacagctcgtttatagacagcaattggctttccaacaccaggtgtgggatgtggcatttgaggagacgcagggcctttgggtgctgcaggactgccaggaggcccctctggttctgtaccgcccagtcggcgatcagtggcagtctgttcccgagtcgacggtcctaaagaaggtgtccggggtgctgcgcggaaattgggcaatgctggaagggtctgccggtgcagacgcctccttttcatccctgtacaaggccacgttcgacaacgtgactagctacctgaaaaaaaaagaggaaagactccaacagcagctggaaaagaagcagaggcgaaggtcgcctcctcccggtccagatgggcacgccaaaaaaatgagacccggtgaggccacactaagctgttag

SEQ ID NO: 229022 - DNA, 1471 bp, Artificial Sequence
  derived and/or modified sequence
ctggcacatgtgtatggcggtgaggcgggcgggtacatggcgggctctgtgggactggcgttgtgcgggcagacgttggtggtgcggggcggcagccgattcctggccacctccatagcaagcagtgatgatgacagcctcttcatctatgactgcagtgctgcagaaaagaagtcacaagaaaataaaggggaggacgcgcccttggaccaggggagcggtgcgattctggcgtccaccttctccaagtctggcagctattttgctttaaccgatgacagtaagcgtctgattcttttccgtacaaaaccatggcaatgtctgagtgtcaggaccgtggcaaggaggtgtacagccctgactttcatagcctcggaggagaaggtcttggtggccgacaagtctggagacgtctactccttttcggtgctggagccacacgggtgtggccgtctagagctggggcacctgtctatgctgttagatgtggctgtgagtcctgatgaccgcttcatcctcactgccgaccgggacgagaagatccgagtcagctgggccgcggcgccccatagcatcgagtccttctgcttggggcacacagagtttgtgagccgtatctccgtggtgccaactcagcccgggctgcttctgtcctcctctggggacggcaccctgaggctctgggagtacaggagcggccgccagctgcactgctgtcacctggccagtctgcaggagctggtggacccccaggccccccagaagtttgccgcgtccaggattgcattctggtgccaggagaactgcgtggcgctcctgtgcgacggcactcctgtggtctacatcttccagctggacgcccgcagacagcagttggtgtacaggcagcagctggcgttccagcaccaagtgtgggacgtggctttcgaggagacccaggggctgtgggtgctccaggactgccaggaagcccccctggtgctctacaggcctgtgggcgaccagtggcagtctgttcctgagagcaccgtgttaaagaaagtctctggtgttcttcgtgggaactgggccatgctggaaggctctgccggcgcagacgccagcttcagcagtctctacaaggccacgttcgacaacgtgacctcctacctgaagaagaaagaggagagactgcagcagcagctagagaagaagcagcggcgccggagtcccccgcctgggcccgacgggcatgccaagaagatgagaccgggggaggcgacgctaagttgctgatcgtggcggtctgtttctgtcgactgtggaccacttatgtgcgatccgtggaccacttgcgtgcgatctgtcggccgacgatgagcttgttcggatgtagctccatcgtaagtcgaggagcatctgtgatttgtcctctgcttatgggatatgtttttccgctactgagtctgtgtagtaaatttttgactaggaa

SEQ ID NO: 229023 - DNA, 2122 bp, Artificial Sequence
  derived and/or modified sequence
gtgcggacaggaagaggctctgggctggcacatgtgtatggcggtgaggcgggcgggtacatggcgggctctgtgggactggcgttgtgcgggcagacgttggtggtgcggggcggcagccgattcctggccacctccatagcaagcagtgatgatgacagcctcttcatctatgactgcagtgctgcagaaaagaagtcacaagaaaataaaggggaggacgcgcccttggaccaggggagcggtgcgattctggcgtccaccttctccaagtctggcagctattttgctttaaccgatgacagtaagcgtctgattcttttccgtacaaaaccatggcaatgtctgagtgtcaggaccgtggcaaggaggtgtacagccctgactttcatagcctcggaggagaaggtcttggtggccgacaagtctggagacgtctactccttttcggtgctggagccacacgggtgtggccgtctagagctggggcacctgtctatgctgttagatgtggctgtgagtcctgatgaccgcttcatcctcactgccgaccgggacgagaagatccgagtcagctgggccgcggcgccccatagcatcgagtccttctgcttggggcacacagagtttgtgagccgtatctccgtggtgccaactcagcccgggctgcttctgtcctcctctggggacggcaccctgaggctctgggagtacaggagcggccgccagctgcactgctgtcacctggccagtctgcaggagctggtggacccccaggccccccagaagtttgccgcgtccaggattgcattctggtgccaggagaactgcgtggcgctcctgtgcgacggcactcctgtggtctacatcttccagctggacgcccgcagacagcagttggtgtacaggcagcagctggcgttccagcaccaagtgtgggacgtggctttcgaggagacccaggggctgtgggtgctccaggactgccaggaagcccccctggtgctctacaggcctgtgggcgaccagtggcagtctgttcctgagagcaccgtgttaaagaaagtctctggtgttcttcgtgggaactgggccatgctggaaggctctgccggcgcagacgccagcttcagcagtctctacaaggccacgttcgacaacgtgacctcctacctgaagaagaaagaggagagactgcagcagcagctagagaagaagcagcggcgccggagtcccccgcctgggcccgacgggcatgccaagaagatgagaccgggggaggcgacgctaagttgctgatcgtggcggtcagtggtgtctctcacctcaaattaggaaaagctttttaacttgttcccctgcatcctggcatgtcccttcaagaaggaaaaggtgacatcagttgtgaccagctcagaggatggggctgtcccctgggctctagaaagaacattctgtgtcaccagcacaggctcttgctgggtgcctgtgccccctttctggttgaagggaagccagaccagtggagtggaagctcttgaagcactttcttttcatgtcggaggctgcgtgtgagccggtggtggcggcagctgtctgtgtttctcctgttctcataccgcccttcgtgtccgctgcatcttcctctaggagcatctgtgggctgacgtttctggcatggtggatgttttcatgttgttccgccgtctcagcatccaggtgacgtgctgtcccgcagtagctgctcgccacacaggctgttgaaactcagcacgaatgcttgagcctgccccagccccagccgtagcccttgtgctcaggagctgctcctggagagtggctcccttgtgggaagtgagaaacacgtttcggagtcgcagggagctctgtctggcatcggtggcacagatggtgaacttgtttcaggaagtgtgagcacgggcctggctggcacccggtttacagggaggtgattgaggacgtcgttatgatttgatttgaccttggcacacactgcagagccacagggatgttgctgaatttcaatcaccgatcagcaaggatgaaccttctcaacttcctaggaatgtttagcagcaaccgaatataccaggcaaaactc

SEQ ID NO: 229024 - protein, 367 aa, Artificial Sequence
  derived and/or modified sequence
MASLSQLSGHLNYTCGAENSTGASQARPHAYYALSYCALILAIVFGNGLVCMAVLKERALQTTTNYLVVSLAVADLLVATLVMPWVVYLEVTGGVWNFSRICCDVFVTLDVMMCTASILNLCAISIDRYTAVVMPVHYQHGTGQSSCRRVALMITAVWVLAFAVSCPLLFGFNTTGDPTVCSISNPDFVIYSSVVSFYLPFGVTVLVYARIYVVLKQRRRKRILTRQNSQCNSVRPGFPQQTLSPDPAHLELKRYYSICQDTALGGPGFQERGGELKREEKTRNSLMPLREKKATQMVAIVLGAFIVCWLPFFLTHVLNTHCQTCHVSPELYSATTWLGYVNSALNPVIYTTFNIEFRKAFLKILSC

SEQ ID NO: 229025 - DNA, 1104 bp, Artificial Sequence
  derived and/or modified sequence
atggcaagcttatctcaactgagcgggcacctgaattatacctgcggcgccgagaacagtaccggggctagccaggcccgtcctcatgcttattacgccttaagttattgcgcccttatactcgctattgtctttgggaacggtctggtctgtatggctgtattgaaggaacgcgccctgcagacaaccaccaattatctggttgtatccctagcagttgctgatctgctggtcgcaactttagtgatgccctgggtggtctatttggaggttacaggtggcgtctggaacttcagccgaatctgttgcgatgtattcgtgacactcgatgtgatgatgtgcactgcctccatcctgaatctgtgtgccatctccatcgacaggtatactgctgtggtcatgcctgtgcattaccagcatggaactggccagtcctcatgtcgtagggtggctctgatgatcacagccgtttgggttctggcttttgccgttagctgtccactgctgtttgggttcaacactacgggtgaccctacagtttgttctatctctaacccggatttcgtgatatatagttccgttgtctctttttacctgccatttggcgtaaccgtgttggtgtacgctcgtatctacgtggtcctgaagcagcgccgccggaaacggatccttacaagacagaacagccaatgtaactcagtcaggccagggttcccccaacagaccctgtccccagatcctgctcaccttgagcttaagagatactattcaatttgtcaggacacggccctcggcggccctgggtttcaggagaggggaggagagctgaagagagaagagaagactcggaatagcttgatgcctctgagagagaagaaggcgacacagatggttgccatagtcctcggagcgttcattgtatgttggctcccattcttccttactcacgtactcaatacacattgccagacatgtcatgtgtcccccgagttatattctgctactacttggctgggttacgtcaattctgccctgaatcctgtgatttacaccacttttaatatcgagtttcgcaaagcctttctcaagatcctatcctgctag

SEQ ID NO: 229026 - DNA, 1104 bp, Artificial Sequence
  derived and/or modified sequence
atggccagcctgagccagctgagcggccacctgaactacacctgtggggctgagaacagcactggagccagccaggcccggccccacgcctactatgccctgagctactgtgccctgatcctggccatcgtgtttggaaatggcctggtgtgcatggctgtgctgaaggagcgggccctgcagaccaccaccaactacctggtggtgtccctggccgtggccgacctgctggtggccaccctggtgatgccctgggtggtgtacctggaggtgactggaggagtgtggaacttcagccgcatctgctgtgatgtgtttgtgaccctggatgtgatgatgtgcacagccagcatcctgaacctgtgtgccatcagcattgaccgctacacagctgtggtgatgcctgtgcactaccagcacggcaccggccagagcagctgccggcgggtggccctgatgatcacagctgtgtgggtgctggcctttgctgtgtcctgccccctgctgtttggcttcaacaccactggagaccccaccgtgtgcagcatcagcaacccagactttgtgatctacagctctgtggtgtccttctacctgccctttggagtgacagtgctggtgtatgcccgcatctacgtggtgctgaagcagaggaggaggaagaggatcctgacccggcagaacagccagtgcaacagcgtgcggcccggcttcccccagcagaccctgagcccagaccctgcccacctggagctgaagcgctactacagcatctgccaggacacagccctgggcggccctggcttccaggagcggggcggggagctgaagcgggaggagaagaccaggaacagcctgatgcccctgcgggagaagaaggccacccagatggtggccatcgtgctgggcgccttcatcgtgtgctggctgcccttcttcctgacccacgtgctgaacacccactgccagacctgccacgtgtccccagagctgtacagcgccaccacctggctgggctacgtgaacagcgccctgaaccctgtgatctacaccaccttcaacatcgagttcaggaaggccttcctgaagatcctgagctgctag

SEQ ID NO: 229027 - DNA, 1104 bp, Artificial Sequence
  derived and/or modified sequence
atggccagcctgagccagctgagcggccacctgaactacacctgcggagctgagaacagcaccggtgcttcacaggcccggccacacgcctattatgccctctcctactgcgcactcatcttagccattgtcttcggcaacggactggtgtgtatggccgtcttaaaggaacgggccttgcaaacgacaaccaactacctggtagtaagcctggcggttgccgatctgctggtggcgacactggtgatgccatgggtcgtgtatttggaggtcacagggggtgtgtggaacttctctaggatctgttgtgatgtatttgtgactctagatgtaatgatgtgcaccgcatcgattttgaatctgtgcgcaatcagcatcgaccgctacaccgctgtggtgatgcccgtgcattatcaacatggaaccgggcagtcctcttgccgaagggtggctcttatgatcacagccgtgtgggtcttagccttcgccgtgtcctgcccactcttgttcggttttaacaccacgggcgatccaactgtgtgctccatctccaaccccgactttgtgatttattcatccgttgtctccttttacctgccattcggggttaccgttttggtatacgctcgaatttacgtcgtcctgaaacagcgcagaagaaaacgcatccttacaagacagaatagtcagtgcaattccgtgcgacccggctttccccagcagactctcagccccgaccccgcgcacctggaattgaagcgctactacagcatatgccaggacaccgctctgggcggcccaggtttccaggagaggggaggcgagctgaaaagagaggagaagacacgcaatagtctgatgcccctgagggaaaagaaggcaacacagatggtcgcaattgtgctgggtgcttttattgtctgctggttacctttttttctgacacatgtgttaaatactcattgccagacctgccatgtgtcgccagaactctactccgcaactacctggctcggctacgtgaacagcgcacttaatccagtgatctacacgacattcaacatcgaatttcgaaaggcatttctcaagattcttagctgctag

SEQ ID NO: 229028 - DNA, 1104 bp, Artificial Sequence
  derived and/or modified sequence
atggcttcactgtcccagctgtcggggcatctgaactatacttgtggcgcagagaactccaccggagcatcccaggctcgaccccatgcatattatgcattatcctattgcgcactgatccttgccatcgtgttcgggaatggtttagtgtgcatggcagtccttaaagagcgagcattacagaccaccacaaactacctggtagtgtcgttggcggtggcagaccttctagtggctacattagtgatgccctgggttgtatacttagaagtgaccggaggtgtatggaatttcagccgcatttgttgtgacgtgtttgtgactcttgacgttatgatgtgtactgcaagcatcctcaatctctgcgctatatccatcgacaggtatacagcagtcgtcatgcccgtccattaccaacatggaaccgggcagtccagttgccgacgagtcgccttaatgatcaccgccgtatgggttctggcctttgccgtatcttgcccactcttgtttggattcaacaccaccggggatcctaccgtctgctctataagtaatccagatttcgtgatctattcttctgtagtgtcattctatttgccttttggtgtcactgtgcttgtttacgctcgtatctacgtggtccttaaacagagaagacggaaacgcatcctcacacgacagaatagccaatgcaatagcgtacggcctggattcccccagcagacactgtctccagacccagctcatctggagctaaaacggtattatagcatttgtcaggacacagccttaggtggacctggcttccaggagagggggggagagttaaagcgggaggaaaagacccgaaatagcctcatgcctcttcgggagaaaaaggcaacgcagatggtggcaattgtcttaggcgcattcatagtctgctggctcccattcttccttacgcatgtgttgaacacgcactgccagacctgccatgtttctcccgaattatatagcgccacgacttggctgggatatgttaactccgccctgaacccagttatatatacaacattcaacatcgagttccgtaaggcatttcttaaaatacttagctgttag

SEQ ID NO: 229029 - DNA, 1104 bp, Artificial Sequence
  derived and/or modified sequence
atggccagcctgagccagctgagcggccacctgaactacacctgcggcgccgagaacagcaccggcgccagccaggccagaccccacgcctactacgccctgagctactgcgccctgatcctggccatcgtgttcggcaacggcctggtgtgcatggccgtgctgaaggagagagccctgcagaccaccaccaactacctggtggtgagcctggccgtggccgacctgctggtggccaccctggtgatgccctgggtggtgtacctggaggtgaccggcggcgtgtggaacttcagcagaatctgctgcgacgtgttcgtgaccctggacgtgatgatgtgcaccgccagcatcctgaacctgtgcgccatcagcatcgacagatacaccgccgtggtgatgcccgtgcactaccagcacggcaccggccagagcagctgcagaagagtggccctgatgatcaccgccgtgtgggtgctggccttcgccgtgagctgccccctgctgttcggcttcaacaccaccggcgaccccaccgtgtgcagcatcagcaaccccgacttcgtgatctacagcagcgtggtgagcttctacctgcccttcggcgtgaccgtgctggtgtacgccagaatctacgtggtgctgaagcagagaagaagaaagagaatcctgaccagacagaacagccagtgcaacagcgtgagacccggcttcccccagcagaccctgagccccgaccccgcccacctggagctgaagagatactacagcatctgccaggacaccgccctgggcggccccggcttccaggagagaggcggcgagctgaagagagaggagaagaccagaaacagcctgatgcccctgagagagaagaaggccacccagatggtggccatcgtgctgggcgccttcatcgtgtgctggctgcccttcttcctgacccacgtgctgaacacccactgccagacctgccacgtgagccccgagctgtacagcgccaccacctggctgggctacgtgaacagcgccctgaaccccgtgatctacaccaccttcaacatcgagttcagaaaggccttcctgaagatcctgagctgctag

SEQ ID NO: 229030 - DNA, 1535 bp, Artificial Sequence
  derived and/or modified sequence
gatagagagacaaagaggaaaagagagcgaggtagaaaacggatactgcctatgcctactccatccctctttcagcaccaaggacagaacctctgagcggctgacccaagcaacgctcagtttagggtccctcccaaatcctctaaagaaaacggatacattcgaaagcagctatgaaacatgcactaaggtctaatagggaagctggaaaagcagcactcaagtaatttcaccttagaggcaaaaatgggtgatttctttctgttcatttcatagtttctgagtcctgagaaaggcaaagtttgctttgcttgggtatgtctgctgtcagtaaatggctgcaggagccgaagtggtaaactcctcggtctccagaaatcagaagaaaattttagggaagccccttggcatcacgcacctccctctgggctatggcatctctgagccagctgagtggccacctgaactacacctgtggggcagagaactccacaggtgccagccaggcccgcccacatgcctactatgccctctcctactgcgcgctcatcctggccatcgtcttcggcaatggcctggtgtgcatggctgtgctgaaggagcgggccctgcagactaccaccaactacttagtagtgagcctggctgtggcagacttgctggtggccaccttggtgatgccctgggtggtatacctggaggtgacaggtggagtctggaatttcagccgcatttgctgtgatgtttttgtcaccctggatgtcatgatgtgtacagccagcatccttaatctctgtgccatcagcatagacaggtacactgcagtggtcatgcccgttcactaccagcatggcacgggacagagctcctgtcggcgcgtggccctcatgatcacggccgtctgggtactggcctttgctgtgtcctgccctcttctgtttggctttaataccacaggggaccccactgtctgctccatctccaaccctgattttgtcatctactcttcagtggtgtccttctacctgccctttggagtgactgtccttgtctatgccagaatctatgtggtgctgaaacaaaggagacggaaaaggatcctcactcgacagaacagtcagtgcaacagtgtcaggcctggcttcccccagcaaaccctctctcctgacccggcacatctggagctgaagcgttactacagcatctgccaggacactgccttgggtggaccaggcttccaagaaagaggaggagagttgaaaagagaggagaagactcggaattccctgatgccacttcgggagaagaaggcaacccaaatggtggccattgtgcttggggccttcattgtctgctggctgcccttcttcttgacccatgttctcaatacccactgccagacatgccacgtgtccccagagctttacagtgccacgacatggctgggctacgtgaatagcgccctcaaccctgtgatctataccaccttcaatatcgagttccggaaagccttcctcaagatcctgtcttgctga

SEQ ID NO: 229031 - protein, 801 aa, Artificial Sequence
  derived and/or modified sequence
MNLQPIFWIGLISSVCCVFAQTDENRCLKANAKSCGECIQAGPNCGWCTNSTFLQEGMPTSARCDDLEALKKKGCPPDDIENPRGSKDIKKNKNVTNRSKGTAEKLKPEDITQIQPQQLVLRLRSGEPQTFTLKFKRAEDYPIDLYYLMDLSYSMKDDLENVKSLGTDLMNEMRRITSDFRIGFGSFVEKTVMPYISTTPAKLRNPCTSEQNCTSPFSYKNVLSLTNKGEVFNELVGKQRISGNLDSPEGGFDAIMQVAVCGSLIGWRNVTRLLVFSTDAGFHFAGDGKLGGIVLPNDGQCHLENNMYTMSHYYDYPSIAHLVQKLSENNIQTIFAVTEEFQPVYKELKNLIPKSAVGTLSANSSNVIQLIIDAYNSLSSEVILENGKLSEGVTISYKSYCKNGVNGTGENGRKCSNISIGDEVQFEISITSNKCPKKDSDSFKIRPLGFTEEVEVILQYICECECQSEGIPESPKCHEGNGTFECGACRCNEGRVGRHCECSTDEVNSEDMDAYCRKENSSEICSNNGECVCGQCVCRKRDNTNEIYSGKFCECDNFNCDRSNGLICGGNGVCKCRVCECNPNYTGSACDCSLDTSTCEASNGQICNGRGICECGVCKCTDPKFQGQTCEMCQTCLGVCAEHKECVQCRAFNKGEKKDTCTQECSYFNITKVESRDKLPQPVQPDPVSHCKEKDVDDCWFYFTYSVNGNNEVMVHVVENPECPTGPDIIPIVAGVVAGIVLIGLALLLIWKLLMIIHDRREFAKFEKEKMNAKWDTQENPIYKSPINNFKNPNYGRKAGL

SEQ ID NO: 229032 - DNA, 2478 bp, Artificial Sequence
  derived and/or modified sequence
atgaacctgcagcccatcttctggatcggcctgatcagcagcgtgtgctgcgtgttcgcccagaccgacgagaacagatgcctgaaggccaacgccaagagctgcggcgagtgcatccaggccggccccaactgcggctggtgcaccaacagcaccttcctgcaggagggcatgcccaccagcgccagatgcgacgacctggaggccctgaagaagaagggctgcccccccgacgacatcgagaaccccagaggcagcaaggacatcaagaagaacaagaacgtgaccaacagaagcaagggcaccgccgagaagctgaagcccgaggacatcacccagatccagccccagcagctggtgctgagactgagaagcggcgagccccagaccttcaccctgaagttcaagagagccgaggactaccccatcgacctgtactacctgatggacctgagctacagcatgaaggacgacctggagaacgtgaagagcctgggcaccgacctgatgaacgagatgagaagaatcaccagcgacttcagaatcggcttcggcagcttcgtggagaagaccgtgatgccctacatcagcaccacccccgccaagctgagaaacccctgcaccagcgagcagaactgcaccagccccttcagctacaagaacgtgctgagcctgaccaacaagggcgaggtgttcaacgagctggtgggcaagcagagaatcagcggcaacctggacagccccgagggcggcttcgacgccatcatgcaggtggccgtgtgcggcagcctgatcggctggagaaacgtgaccagactgctggtgttcagcaccgacgccggcttccacttcgccggcgacggcaagctgggcggcatcgtgctgcccaacgacggccagtgccacctggagaacaacatgtacaccatgagccactactacgactaccccagcatcgcccacctggtgcagaagctgagcgagaacaacatccagaccatcttcgccgtgaccgaggagttccagcccgtgtacaaggagctgaagaacctgatccccaagagcgccgtgggcaccctgagcgccaacagcagcaacgtgatccagctgatcatcgacgcctacaacagcctgagcagcgaggtgatcctggagaacggcaagctgagcgagggcgtgaccatcagctacaagagctactgcaagaacggcgtgaacggcaccggcgagaacggcagaaagtgcagcaacatcagcatcggcgacgaggtgcagttcgagatcagcatcaccagcaacaagtgccccaagaaggacagcgacagcttcaagatcagacccctgggcttcaccgaggaggtggaggtgatcctgcagtacatctgcgagtgcgagtgccagagcgagggcatccccgagagccccaagtgccacgagggcaacggcaccttcgagtgcggcgcctgcagatgcaacgagggcagagtgggcagacactgcgagtgcagcaccgacgaggtgaacagcgaggacatggacgcctactgcagaaaggagaacagcagcgagatctgcagcaacaacggcgagtgcgtgtgcggccagtgcgtgtgcagaaagagagacaacaccaacgagatctacagcggcaagttctgcgagtgcgacaacttcaactgcgacagaagcaacggcctgatctgcggcggcaacggcgtgtgcaagtgcagagtgtgcgagtgcaaccccaactacaccggcagcgcctgcgactgcagcctggacaccagcacctgcgaggccagcaacggccagatctgcaacggcagaggcatctgcgagtgcggcgtgtgcaagtgcaccgaccccaagttccagggccagacctgcgagatgtgccagacctgcctgggcgtgtgcgccgagcacaaggagtgcgtgcagtgcagagccttcaacaagggcgagaagaaggacacctgcacccaggagtgcagctacttcaacatcaccaaggtggagagcagagacaagctgccccagcccgtgcagcccgaccccgtgagccactgcaaggagaaggacgtggacgactgctggttctacttcacctacagcgtgaacggcaacaacgaggtgatggtgcacgtggtggagaaccccgagtgccccaccggccccgacatcatccccatcgtggccggcgtggtggccggcatcgtgctgatcggcctggccctgctgctgatctggaagctgctgatgatcatccacgacagaagagagttcgccaagttcgagaaggagaagatgaacgccaagtgggacaccagcctgagcgtggcccagcccggcgtgcagtggtgcgacatcagcagcctgcagcccctgaccagcagattccagcagttcagctgcctgagcctgcccagcacctgggactacagagtgaagatcctgttcatcagagtgccctag

SEQ ID NO: 229033 - DNA, 2406 bp, Artificial Sequence
  derived and/or modified sequence
atgaacctgcagcccatcttctggatcggcctgatcagcagcgtgtgctgcgtgttcgcccagaccgacgagaacagatgcctgaaggccaacgccaagagctgcggcgagtgcatccaggccggccccaactgcggctggtgcaccaacagcaccttcctgcaggagggcatgcccaccagcgccagatgcgacgacctggaggccctgaagaagaagggctgcccccccgacgacatcgagaaccccagaggcagcaaggacatcaagaagaacaagaacgtgaccaacagaagcaagggcaccgccgagaagctgaagcccgaggacatcacccagatccagccccagcagctggtgctgagactgagaagcggcgagccccagaccttcaccctgaagttcaagagagccgaggactaccccatcgacctgtactacctgatggacctgagctacagcatgaaggacgacctggagaacgtgaagagcctgggcaccgacctgatgaacgagatgagaagaatcaccagcgacttcagaatcggcttcggcagcttcgtggagaagaccgtgatgccctacatcagcaccacccccgccaagctgagaaacccctgcaccagcgagcagaactgcaccagccccttcagctacaagaacgtgctgagcctgaccaacaagggcgaggtgttcaacgagctggtgggcaagcagagaatcagcggcaacctggacagccccgagggcggcttcgacgccatcatgcaggtggccgtgtgcggcagcctgatcggctggagaaacgtgaccagactgctggtgttcagcaccgacgccggcttccacttcgccggcgacggcaagctgggcggcatcgtgctgcccaacgacggccagtgccacctggagaacaacatgtacaccatgagccactactacgactaccccagcatcgcccacctggtgcagaagctgagcgagaacaacatccagaccatcttcgccgtgaccgaggagttccagcccgtgtacaaggagctgaagaacctgatccccaagagcgccgtgggcaccctgagcgccaacagcagcaacgtgatccagctgatcatcgacgcctacaacagcctgagcagcgaggtgatcctggagaacggcaagctgagcgagggcgtgaccatcagctacaagagctactgcaagaacggcgtgaacggcaccggcgagaacggcagaaagtgcagcaacatcagcatcggcgacgaggtgcagttcgagatcagcatcaccagcaacaagtgccccaagaaggacagcgacagcttcaagatcagacccctgggcttcaccgaggaggtggaggtgatcctgcagtacatctgcgagtgcgagtgccagagcgagggcatccccgagagccccaagtgccacgagggcaacggcaccttcgagtgcggcgcctgcagatgcaacgagggcagagtgggcagacactgcgagtgcagcaccgacgaggtgaacagcgaggacatggacgcctactgcagaaaggagaacagcagcgagatctgcagcaacaacggcgagtgcgtgtgcggccagtgcgtgtgcagaaagagagacaacaccaacgagatctacagcggcaagttctgcgagtgcgacaacttcaactgcgacagaagcaacggcctgatctgcggcggcaacggcgtgtgcaagtgcagagtgtgcgagtgcaaccccaactacaccggcagcgcctgcgactgcagcctggacaccagcacctgcgaggccagcaacggccagatctgcaacggcagaggcatctgcgagtgcggcgtgtgcaagtgcaccgaccccaagttccagggccagacctgcgagatgtgccagacctgcctgggcgtgtgcgccgagcacaaggagtgcgtgcagtgcagagccttcaacaagggcgagaagaaggacacctgcacccaggagtgcagctacttcaacatcaccaaggtggagagcagagacaagctgccccagcccgtgcagcccgaccccgtgagccactgcaaggagaaggacgtggacgactgctggttctacttcacctacagcgtgaacggcaacaacgaggtgatggtgcacgtggtggagaaccccgagtgccccaccggccccgacatcatccccatcgtggccggcgtggtggccggcatcgtgctgatcggcctggccctgctgctgatctggaagctgctgatgatcatccacgacagaagagagttcgccaagttcgagaaggagaagatgaacgccaagtgggacacccaggagaaccccatctacaagagccccatcaacaacttcaagaaccccaactacggcagaaaggccggcctgtag

SEQ ID NO: 229034 - DNA, 2478 bp, Artificial Sequence
  derived and/or modified sequence
atgaacctgcagccaattttttggataggtctgataagcagcgtgtgttgcgtttttgcccaaaccgatgagaatcggtgcctcaaggctaacgcaaagagttgtggggaatgcatccaggccggaccaaattgtggctggtgtaccaacagcaccttcctccaagagggtatgcctacatcagccaggtgcgacgacctggaggccctcaaaaaaaaaggctgcccacccgatgacatcgaaaaccctaggggatctaaggatattaagaaaaacaagaacgtgacaaaccgctctaaaggtaccgccgaaaaacttaaacccgaggacataacccagatacagcctcagcagctggtcttgaggctgcgcagcggggaaccccaaacctttacgctgaaatttaaacgggcagaggattatccaatcgatctgtactatttgatggacctatcttattccatgaaggacgacctcgagaatgtgaaatcactaggcaccgaccttatgaacgagatgcgccggattacgtctgacttcagaatcgggttcggcagcttcgtagaaaagacggtgatgccttacatctccacaactcctgctaagctgcgcaatccctgcacctcagagcaaaattgtacgtctccatttagctacaaaaacgttctttctctcaccaacaaaggcgaggtgtttaatgaactggtcggtaagcagcgcatctcaggcaacctcgactccccagaaggcggatttgatgccataatgcaagttgccgtgtgcggtagtctcattggatggcgcaacgtgacgcggctgttggtcttttccacggacgcaggatttcactttgcgggggacggcaaactggggggcattgtcttgcctaacgatggtcagtgccaccttgaaaacaatatgtacactatgtcacactattacgactatcccagtatagcccacttggtacagaagctgtccgagaataacatccagaccatttttgcagtgacagaagaattccagccggtgtataaggagttgaagaatctgatccccaagagcgccgtaggcacactttcggcaaactcatccaacgtgatccagctcatcatcgacgcctacaacagcctgtcatcagaggtcatactggaaaatggaaaactctccgaaggggtgactatttcctacaagagctactgcaaaaacggcgtaaatggtaccggggagaacggccggaagtgtagcaatatctcaattggcgatgaggtgcaatttgagattagcatcacttctaataagtgcccgaagaaagactcagacagttttaaaatccgcccgctggggtttactgaagaggtggaagtcatcttgcaatatatctgtgagtgtgagtgtcagtctgagggcatccccgaatcaccaaagtgccacgagggtaacgggacgtttgagtgcggggcctgcaggtgtaacgaaggcagagttggccgacactgtgaatgctctacagatgaggttaactccgaggatatggacgcgtattgccgaaaagagaattccagcgagatatgcagcaataacggagagtgtgtgtgtggccagtgcgtctgccgtaagagggataacactaacgaaatctactctgggaagttctgtgaatgcgacaactttaactgcgacaggagcaatgggctgatatgcggagggaacggcgtgtgcaaatgccgagtgtgcgagtgcaatcctaattatactggcagtgcttgcgactgttcattggacacgtcaacgtgtgaggcgagcaatgggcaaatctgcaatgggcgcggcatttgcgagtgtggcgtctgtaagtgtacagaccccaagttccaaggccagacttgtgaaatgtgccagacttgtctcggcgtatgtgccgagcataaagagtgcgttcagtgccgcgccttcaataagggtgagaaaaaggatacatgcacacaggagtgttcctactttaatatcactaaagttgagagtagggataaactccctcagcctgtgcagcctgaccctgtgtctcactgcaaagaaaaagatgtcgatgattgctggttctacttcacctatagtgtgaatggaaataacgaggtcatggtccacgtggtggagaaccccgagtgcccaactgggcctgacattattcccattgtggctggagtggtcgctggcatcgtacttattggcctcgctttactcttgatctggaagttgctgatgattattcacgatagaagagaattcgcaaaatttgagaaggagaaaatgaacgccaagtgggatacttcactcagcgtggctcagccgggcgttcagtggtgtgacatttctagtctccagccgctgacctcaagatttcagcaattcagctgcctcagccttccttcgacctgggactacagagtgaagatactgttcatcagggttccctag

SEQ ID NO: 229035 - DNA, 2406 bp, Artificial Sequence
  derived and/or modified sequence
atgaatctccaacccattttttggatcggtcttatatccagcgtgtgttgcgtctttgcccagaccgacgaaaaccgctgcctgaaggctaatgccaagagttgtggcgaatgtatccaggctggccccaattgcggttggtgcaccaacagtaccttcctgcaggaaggcatgcccacatccgctagatgcgacgatctcgaggccctgaagaaaaagggatgtccccctgacgacatcgaaaatcctcgcggatccaaagatattaaaaaaaataagaacgtcactaataggtcaaaaggcactgccgaaaaactgaagccagaggatatcacccaaatccaaccacaacagttggtgctaaggctccggagcggggaacctcagacattcacactgaagtttaaacgggctgaagattatccaatagacctttattacctcatggacctgtcctatagcatgaaggacgatctggagaacgtgaagagcttgggcaccgacctcatgaacgagatgcggcgcataactagcgacttcaggatcggcttcggctccttcgtggagaagacagtcatgccttacatatctaccacacccgccaaacttcgcaacccttgcacttccgagcaaaactgtaccagtccatttagttacaagaacgtgctatccctgaccaataaaggagaagtgtttaacgagctggttggtaagcagcgcatctcgggaaatctggattccccggaggggggttttgatgccatcatgcaggttgctgtatgtggctcattgatcggttggcggaatgtgacacgacttttagttttttctaccgacgccggcttccacttcgccggcgacggtaaactcggaggcatagtgctcccaaatgacggacagtgccacctggagaacaacatgtacacaatgagtcactattatgattacccatcgattgcacacctcgtgcagaaattatccgagaataatattcaaacaatcttcgcagtcacagaggagttccagcccgtatacaaagaactgaagaacctaatacctaaaagtgcggtgggaactctatccgccaattcaagcaacgtcattcagcttataatagatgcttacaatagcctttcaagcgaggtgatcctggaaaatgggaaactctctgagggtgttaccatcagttacaagtcttactgcaagaatggcgtgaacgggacaggcgaaaacggcaggaaatgctccaatatttcgattggcgacgaggttcagtttgagatctctatcacaagcaacaaatgtcctaaaaaggatagcgattcattcaagatacgaccactgggtttcacagaggaagtcgaggtcattcttcagtacatatgtgaatgtgagtgccagtcagaaggaataccggaatcaccgaagtgtcatgaagggaatgggaccttcgagtgcggggcatgtaggtgcaatgaaggaagggtgggaagacactgcgaatgctccaccgacgaggtgaacagcgaggatatggacgcttattgtagaaaagagaattcttccgagatctgtagtaacaacggggaatgcgtgtgtggccagtgtgtatgccgcaaaagagataatacaaacgagatctatagtggcaagttctgtgagtgtgacaatttcaattgcgaccggagcaatggccttatttgcggcggcaacggagtgtgtaagtgtcgggtttgcgaatgcaatccgaactacaccgggagtgcctgcgactgctccttagatacttctacatgtgaggcatctaacggacagatttgcaacgggaggggaatttgcgagtgtggagtgtgcaagtgcacagatcctaagtttcagggacagacgtgcgagatgtgccagacttgtctgggcgtctgtgctgagcacaaggagtgtgtccagtgcagagccttcaataaaggcgaaaaaaaagatacgtgcacccaggagtgcagctattttaacatcacaaaggtggagtccagagacaaactccctcagcccgtgcagcccgacccagtgtctcattgtaaagaaaaggatgtcgacgattgttggttttacttcacatactccgtaaacggcaataacgaggtgatggttcacgtagtcgagaatcctgagtgtcctaccggaccagacattatcccaatcgtcgccggagtcgtggcaggtatcgtgctcattggcctcgccctcctgcttatctggaagctgctgatgatcattcatgaccgtagagagttcgccaaatttgagaaagaaaagatgaacgcaaaatgggatactcaggaaaacccaatttataagagtcctatcaataactttaagaacccgaactacggaaggaaggccggcctttag

SEQ ID NO: 229036 - DNA, 2478 bp, Artificial Sequence
  derived and/or modified sequence
atgaacctgcagcccatcttctggattggcctcatcagctctgtgtgctgcgtgtttgcccagacagatgagaaccgctgcctgaaggccaatgccaagagctgtggggagtgcatccaggccggccccaactgtggctggtgcaccaacagcaccttcctgcaggagggcatgcccaccagcgcccgctgtgatgacctggaggccctgaagaagaagggctgccccccagatgacatcgagaacccccggggcagcaaggacatcaagaagaacaagaatgtgaccaacagaagcaagggcacagctgagaagctgaagccagaggacatcacccagatccagccccagcagctggtgctgcggctgcggtctggagagccccagaccttcaccctgaagttcaagagagctgaggactaccccatcgacctgtactacctgatggacctgagctacagcatgaaggatgacctggagaatgtgaagagcctgggcacagacctgatgaatgagatgaggcgcatcaccagtgacttccgcatcggcttcggcagctttgtggagaagacagtgatgccctacatcagcaccaccccagccaagctgaggaacccctgcaccagcgagcagaactgcaccagccccttctcctacaagaatgtgctgagcctgaccaacaagggggaggtgttcaatgagctggtgggcaagcagaggatcagcggcaacctggacagccctgagggcggctttgatgccatcatgcaggtggccgtgtgtggcagcctgattggctggagaaatgtgacccggctgctggtgttcagcacagatgctggcttccactttgctggagatggcaagctgggcggcatcgtgctgcccaatgatggccagtgccacctggagaacaacatgtacaccatgagccactactatgactaccccagcatcgcccacctggtgcagaagctgtctgagaacaacatccagaccatctttgctgtgacagaggagttccagcctgtgtacaaggagctgaagaacctgatccccaagtctgctgtgggcaccctgagcgccaacagcagcaatgtcatccagctgatcattgatgcctacaacagcctgagcagcgaggtgatcctggagaatggcaagctgtctgagggcgtgaccatctcctacaagagctactgcaagaatggagtgaatggcaccggggagaatggaaggaagtgcagcaacatcagcattggagatgaggtgcagtttgagatcagcatcaccagcaacaagtgccccaagaaggacagcgacagcttcaagatccggcccctgggcttcacagaggaggtggaggtgatcctgcagtacatctgtgaatgtgagtgccagagcgagggcatccctgagagccccaagtgccacgagggcaatggcacctttgaatgtggggcctgccgctgcaatgaaggccgggtgggccgccactgtgaatgttccacagatgaggtgaacagcgaggacatggatgcctactgcaggaaagaaaacagcagcgagatctgcagcaacaacggggagtgtgtgtgtggccagtgtgtgtgcaggaagagggacaacaccaatgagatctacagcggcaagttctgtgaatgtgacaacttcaactgtgacaggagcaatggcctcatctgtggcggcaatggagtgtgcaagtgccgggtgtgtgagtgcaaccccaactacacaggcagcgcctgtgactgcagcctggacaccagcacctgtgaggccagcaatggccagatctgcaatggccggggcatctgtgaatgtggggtgtgcaagtgcacagaccccaagttccagggccagacctgtgagatgtgccagacctgcctgggcgtgtgtgccgagcacaaggaatgtgtgcagtgccgggccttcaacaagggggagaagaaggacacctgcacccaggagtgcagctacttcaacatcaccaaggtggagagccgggacaagctgccccagcctgtgcagcctgaccctgtgagccactgcaaggagaaggatgtggatgactgctggttctacttcacctacagcgtgaatggaaataatgaggtgatggtgcacgtggtggagaaccctgagtgccccactggaccagacatcatccccatcgtggccggcgtggtggccggcatcgtgctgattggcctggccctgctgctgatctggaagctgctgatgatcatccatgaccggcgggagtttgccaagtttgagaaggagaagatgaatgccaagtgggacaccagcctgtctgtggcccagcccggggtgcagtggtgtgacatcagcagcctgcagcccctgaccagccgcttccagcagttcagctgcctgagcctgcccagcacctgggactacagagtgaagatcctcttcatccgggtgccctag

SEQ ID NO: 229037 - DNA, 2406 bp, Artificial Sequence
  derived and/or modified sequence
atgaacctgcagcccatcttctggattggcctcatcagctctgtgtgctgcgtgtttgcccagacagatgagaaccgctgcctgaaggccaatgccaagagctgtggggagtgcatccaggccggccccaactgtggctggtgcaccaacagcaccttcctgcaggagggcatgcccaccagcgcccgctgtgatgacctggaggccctgaagaagaagggctgccccccagatgacatcgagaacccccggggcagcaaggacatcaagaagaacaagaatgtgaccaacagaagcaagggcacagctgagaagctgaagccagaggacatcacccagatccagccccagcagctggtgctgcggctgcggtctggagagccccagaccttcaccctgaagttcaagagagctgaggactaccccatcgacctgtactacctgatggacctgagctacagcatgaaggatgacctggagaatgtgaagagcctgggcacagacctgatgaatgagatgaggcgcatcaccagtgacttccgcatcggcttcggcagctttgtggagaagacagtgatgccctacatcagcaccaccccagccaagctgaggaacccctgcaccagcgagcagaactgcaccagccccttctcctacaagaatgtgctgagcctgaccaacaagggggaggtgttcaatgagctggtgggcaagcagaggatcagcggcaacctggacagccctgagggcggctttgatgccatcatgcaggtggccgtgtgtggcagcctgattggctggagaaatgtgacccggctgctggtgttcagcacagatgctggcttccactttgctggagatggcaagctgggcggcatcgtgctgcccaatgatggccagtgccacctggagaacaacatgtacaccatgagccactactatgactaccccagcatcgcccacctggtgcagaagctgtctgagaacaacatccagaccatctttgctgtgacagaggagttccagcctgtgtacaaggagctgaagaacctgatccccaagtctgctgtgggcaccctgagcgccaacagcagcaatgtcatccagctgatcattgatgcctacaacagcctgagcagcgaggtgatcctggagaatggcaagctgtctgagggcgtgaccatctcctacaagagctactgcaagaatggagtgaatggcaccggggagaatggaaggaagtgcagcaacatcagcattggagatgaggtgcagtttgagatcagcatcaccagcaacaagtgccccaagaaggacagcgacagcttcaagatccggcccctgggcttcacagaggaggtggaggtgatcctgcagtacatctgtgaatgtgagtgccagagcgagggcatccctgagagccccaagtgccacgagggcaatggcacctttgaatgtggggcctgccgctgcaatgaaggccgggtgggccgccactgtgaatgttccacagatgaggtgaacagcgaggacatggatgcctactgcaggaaagaaaacagcagcgagatctgcagcaacaacggggagtgtgtgtgtggccagtgtgtgtgcaggaagagggacaacaccaatgagatctacagcggcaagttctgtgaatgtgacaacttcaactgtgacaggagcaatggcctcatctgtggcggcaatggagtgtgcaagtgccgggtgtgtgagtgcaaccccaactacacaggcagcgcctgtgactgcagcctggacaccagcacctgtgaggccagcaatggccagatctgcaatggccggggcatctgtgaatgtggggtgtgcaagtgcacagaccccaagttccagggccagacctgtgagatgtgccagacctgcctgggcgtgtgtgccgagcacaaggaatgtgtgcagtgccgggccttcaacaagggggagaagaaggacacctgcacccaggagtgcagctacttcaacatcaccaaggtggagagccgggacaagctgccccagcctgtgcagcctgaccctgtgagccactgcaaggagaaggatgtggatgactgctggttctacttcacctacagcgtgaatggaaataatgaggtgatggtgcacgtggtggagaaccctgagtgccccactggaccagacatcatccccatcgtggccggcgtggtggccggcatcgtgctgattggcctggccctgctgctgatctggaagctgctgatgatcatccatgaccggcgggagtttgccaagtttgagaaggagaagatgaatgccaagtgggacacccaggagaaccccatctacaagagccccatcaacaacttcaagaaccccaactacggcaggaaggccggcctgtag

SEQ ID NO: 229038 - DNA, 3758 bp, Artificial Sequence
  derived and/or modified sequence
ggagaggcccagcgggagtcgcggaacagcaggcccgagcccaccgcgccgggccccggacgccgcgcggaaaagatgaatttacaaccaattttctggattggactgatcagttcagtttgctgtgtgtttgctcaaacagatgaaaatagatgtttaaaagcaaatgccaaatcatgtggagaatgtatacaagcagggccaaattgtgggtggtgcacaaattcaacatttttacaggaaggaatgcctacttctgcacgatgtgatgatttagaagccttaaaaaagaagggttgccctccagatgacatagaaaatcccagaggctccaaagatataaagaaaaataaaaatgtaaccaaccgtagcaaaggaacagcagagaagctcaagccagaggatattactcagatccaaccacagcagttggttttgcgattaagatcaggggagccacagacatttacattaaaattcaagagagctgaagactatcccattgacctctactaccttatggacctgtcttactcaatgaaagacgatttggagaatgtaaaaagtcttggaacagatctgatgaatgaaatgaggaggattacttcggacttcagaattggatttggctcatttgtggaaaagactgtgatgccttacattagcacaacaccagctaagctcaggaacccttgcacaagtgaacagaactgcaccagcccatttagctacaaaaatgtgctcagtcttactaataaaggagaagtatttaatgaacttgttggaaaacagcgcatatctggaaatttggattctccagaaggtggtttcgatgccatcatgcaagttgcagtttgtggatcactgattggctggaggaatgttacacggctgctggtgttttccacagatgccgggtttcactttgctggagatgggaaacttggtggcattgttttaccaaatgatggacaatgtcacctggaaaataatatgtacacaatgagccattattatgattatccttctattgctcaccttgtccagaaactgagtgaaaataatattcagacaatttttgcagttactgaagaatttcagcctgtttacaaggagctgaaaaacttgatccctaagtcagcagtaggaacattatctgcaaattctagcaatgtaattcagttgatcattgatgcatacaattccctttcctcagaagtcattttggaaaacggcaaattgtcagaaggcgtaacaataagttacaaatcttactgcaagaacggggtgaatggaacaggggaaaatggaagaaaatgttccaatatttccattggagatgaggttcaatttgaaattagcataacttcaaataagtgtccaaaaaaggattctgacagctttaaaattaggcctctgggctttacggaggaagtagaggttattcttcagtacatctgtgaatgtgaatgccaaagcgaaggcatccctgaaagtcccaagtgtcatgaaggaaatgggacatttgagtgtggcgcgtgcaggtgcaatgaagggcgtgttggtagacattgtgaatgcagcacagatgaagttaacagtgaagacatggatgcttactgcaggaaagaaaacagttcagaaatctgcagtaacaatggagagtgcgtctgcggacagtgtgtttgtaggaagagggataatacaaatgaaatttattctggcaaattctgcgagtgtgataatttcaactgtgatagatccaatggcttaatttgtggaggaaatggtgtttgcaagtgtcgtgtgtgtgagtgcaaccccaactacactggcagtgcatgtgactgttctttggatactagtacttgtgaagccagcaacggacagatctgcaatggccggggcatctgcgagtgtggtgtctgtaagtgtacagatccgaagtttcaagggcaaacgtgtgagatgtgtcagacctgccttggtgtctgtgctgagcataaagaatgtgttcagtgcagagccttcaataaaggagaaaagaaagacacatgcacacaggaatgttcctattttaacattaccaaggtagaaagtcgggacaaattaccccagccggtccaacctgatcctgtgtcccattgtaaggagaaggatgttgacgactgttggttctattttacgtattcagtgaatgggaacaacgaggtcatggttcatgttgtggagaatccagagtgtcccactggtccagacatcattccaattgtagctggtgtggttgctggaattgttcttattggccttgcattactgctgatatggaagcttttaatgataattcatgacagaagggagtttgctaaatttgaaaaggagaaaatgaatgccaaatgggacacgtctctctctgtcgcccagcctggagtgcagtggtgtgatatcagctcactgcaacctctgacttccagattccagcaattctcctgcctcagcctcccgagtacctgggattacagggtgaaaatcctatttataagagtgccgtaacaactgtggtcaatccgaagtatgagggaaaatgagtactgcccgtgcaaatcccacaacactgaatgcaaagtagcaatttccatagtcacagttaggtagctttagggcaatattgccatggttttactcatgtgcaggttttgaaaatgtacaatatgtataatttttaaaatgttttattattttgaaaataatgttgtaattcatgccagggactgacaaaagacttgagacaggatggttactcttgtcagctaaggtcacattgtgcctttttgaccttttcttcctggactattgaaatcaagcttattggattaagtgatatttctatagcgattgaaagggcaatagttaaagtaatgagcatgatgagagtttctgttaatcatgtattaaaactgatttttagctttacaaatatgtcagtttgcagttatgcagaatccaaagtaaatgtcctgctagctagttaaggattgttttaaatctgttattttgctatttgcctgttagacatgactgatgacatatctgaaagacaagtatgttgagagttgctggtgtaaaatacgtttgaaatagttgatctacaaaggccatgggaaaaattcagagagttaggaaggaaaaaccaatagctttaaaacctgtgtgccattttaagagttacttaatgtttggtaacttttatgccttcactttacaaattcaagccttagataaaagaaccgagcaattttctgctaaaaagtccttgatttagcactatttacatacaggccatactttacaaagtatttgctgaatggggaccttttgagttgaatttattttattatttttattttgtttaatgtctggtgctttctgtcacctcttctaatcttttaatgtatttgtttgcaattttggggtaagactttttttatgagtactttttctttgaagttttagcggtcaatttgcctttttaatgaacatgtgaagttatactgtggctatgcaacagctctcacctacgcgagtcttactttgagttagtgccataacagaccactgtatgtttacttctcaccatttgagttgcccatcttgtttcacactagtcacattcttgttttaagtgcctttagttttaacagttcactttttacagtgctatttactgaagttatttattaaatatgcctaaaatactt

SEQ ID NO: 229039 - DNA, 3729 bp, Artificial Sequence
  derived and/or modified sequence
atgaatttacaaccaattttctggattggactgatcagttcagtttgctgtgtgtttgctcaaacagatgaaaatagatgtttaaaagcaaatgccaaatcatgtggagaatgtatacaagcagggccaaattgtgggtggtgcacaaattcaacatttttacaggaaggaatgcctacttctgcacgatgtgatgatttagaagccttaaaaaagaagggttgccctccagatgacatagaaaatcccagaggctccaaagatataaagaaaaataaaaatgtaaccaaccgtagcaaaggaacagcagagaagctcaagccagaggatattactcagatccaaccacagcagttggttttgcgattaagatcaggggagccacagacatttacattaaaattcaagagagctgaagactatcccattgacctctactaccttatggacctgtcttactcaatgaaagacgatttggagaatgtaaaaagtcttggaacagatctgatgaatgaaatgaggaggattacttcggacttcagaattggatttggctcatttgtggaaaagactgtgatgccttacattagcacaacaccagctaagctcaggaacccttgcacaagtgaacagaactgcaccagcccatttagctacaaaaatgtgctcagtcttactaataaaggagaagtatttaatgaacttgttggaaaacagcgcatatctggaaatttggattctccagaaggtggtttcgatgccatcatgcaagttgcagtttgtggatcactgattggctggaggaatgttacacggctgctggtgttttccacagatgccgggtttcactttgctggagatgggaaacttggtggcattgttttaccaaatgatggacaatgtcacctggaaaataatatgtacacaatgagccattattatgattatccttctattgctcaccttgtccagaaactgagtgaaaataatattcagacaatttttgcagttactgaagaatttcagcctgtttacaaggagctgaaaaacttgatccctaagtcagcagtaggaacattatctgcaaattctagcaatgtaattcagttgatcattgatgcatacaattccctttcctcagaagtcattttggaaaacggcaaattgtcagaaggcgtaacaataagttacaaatcttactgcaagaacggggtgaatggaacaggggaaaatggaagaaaatgttccaatatttccattggagatgaggttcaatttgaaattagcataacttcaaataagtgtccaaaaaaggattctgacagctttaaaattaggcctctgggctttacggaggaagtagaggttattcttcagtacatctgtgaatgtgaatgccaaagcgaaggcatccctgaaagtcccaagtgtcatgaaggaaatgggacatttgagtgtggcgcgtgcaggtgcaatgaagggcgtgttggtagacattgtgaatgcagcacagatgaagttaacagtgaagacatggatgcttactgcaggaaagaaaacagttcagaaatctgcagtaacaatggagagtgcgtctgcggacagtgtgtttgtaggaagagggataatacaaatgaaatttattctggcaaattctgcgagtgtgataatttcaactgtgatagatccaatggcttaatttgtggaggaaatggtgtttgcaagtgtcgtgtgtgtgagtgcaaccccaactacactggcagtgcatgtgactgttctttggatactagtacttgtgaagccagcaacggacagatctgcaatggccggggcatctgcgagtgtggtgtctgtaagtgtacagatccgaagtttcaagggcaaacgtgtgagatgtgtcagacctgccttggtgtctgtgctgagcataaagaatgtgttcagtgcagagccttcaataaaggagaaaagaaagacacatgcacacaggaatgttcctattttaacattaccaaggtagaaagtcgggacaaattaccccagccggtccaacctgatcctgtgtcccattgtaaggagaaggatgttgacgactgttggttctattttacgtattcagtgaatgggaacaacgaggtcatggttcatgttgtggagaatccagagtgtcccactggtccagacatcattccaattgtagctggtgtggttgctggaattgttcttattggccttgcattactgctgatatggaagcttttaatgataattcatgacagaagggagtttgctaaatttgaaaaggagaaaatgaatgccaaatgggacacgcaagaaaatccgatttacaagagtcctattaataatttcaagaatccaaactacggacgtaaagctggtctctaaattgccggtgaaaatcctatttataagagtgccgtaacaactgtggtcaatccgaagtatgagggaaaatgagtactgcccgtgcaaatcccacaacactgaatgcaaagtagcaatttccatagtcacagttaggtagctttagggcaatattgccatggttttactcatgtgcaggttttgaaaatgtacaatatgtataatttttaaaatgttttattattttgaaaataatgttgtaattcatgccagggactgacaaaagacttgagacaggatggttactcttgtcagctaaggtcacattgtgcctttttgaccttttcttcctggactattgaaatcaagcttattggattaagtgatatttctatagcgattgaaagggcaatagttaaagtaatgagcatgatgagagtttctgttaatcatgtattaaaactgatttttagctttacaaatatgtcagtttgcagttatgcagaatccaaagtaaatgtcctgctagctagttaaggattgttttaaatctgttattttgctatttgcctgttagacatgactgatgacatatctgaaagacaagtatgttgagagttgctggtgtaaaatacgtttgaaatagttgatctacaaaggccatgggaaaaattcagagagttaggaaggaaaaaccaatagctttaaaacctgtgtgccattttaagagttacttaatgtttggtaacttttatgccttcactttacaaattcaagccttagataaaagaaccgagcaattttctgctaaaaagtccttgatttagcactatttacatacaggccatactttacaaagtatttgctgaatggggaccttttgagttgaatttattttattatttttattttgtttaatgtctggtgctttctgtcacctcttctaatcttttaatgtatttgtttgcaattttggggtaagactttttttatgagtactttttctttgaagttttagcggtcaatttgcctttttaatgaacatgtgaagttatactgtggctatgcaacagctctcacctacgcgagtcttactttgagttagtgccataacagaccactgtatgtttacttctcaccatttgagttgcccatcttgtttcacactagtcacattcttgttttaagtgcctttagttttaacagttcactttttacagtgctatttactgaagttatttattaaatatgcctaaaatacttaaatcggatgtcttgactctgatgtattttatcaggttgtgtgcatgaaatttttatagattaaagaagttgaggaaaagc

SEQ ID NO: 229040 - DNA, 2478 bp, Artificial Sequence
  derived and/or modified sequence
atgaacctgcagcccatcttctggatcggcctgatcagcagcgtgtgttgcgtatttgcacagacggacgagaatcgctgcctgaaagctaacgccaagtcctgcggggagtgtatacaggcaggcccgaactgcggatggtgtaccaattcgaccttcttacaggaaggcatgccaactagcgcccgctgcgacgatctcgaggctctgaagaagaaaggctgtccacccgatgacattgaaaacccaagggggagcaaggatataaaaaagaacaaaaatgtcacaaaccgatccaagggtaccgctgaaaaactcaagcccgaagatattacacagatccagcctcagcagttggtccttcgcttgagatcgggagagccgcagactttcacccttaaattcaaaagagctgaggattatcctattgacctgtattacctgatggatctgtcttatagcatgaaggacgatctggagaatgtcaagagtcttgggaccgaccttatgaatgagatgcggagaattacgagtgattttcgtatcgggttcggatcgtttgtggagaaaacagtgatgccttacatctccacaacccctgcaaaattgagaaacccatgtacctcggaacagaactgcactagccctttcagttacaagaacgtgctgagtctgactaataaaggcgaagtcttcaatgagctggttggtaagcagcgtatctcaggcaaccttgattcccccgagggaggctttgacgcaatcatgcaggtcgcagtctgtggctccctgatcgggtggagaaatgtgactcgcttgttggtattctccacagatgcgggattccatttcgctggcgacggaaagctcgggggtatcgtcctgcccaacgacgggcagtgccatctggagaacaacatgtatacaatgtcgcactactatgactacccttccattgctcatctggtgcaaaaacttagcgagaacaatatccagacaatattcgctgttaccgaagagtttcagcctgtatacaaggagttgaagaatctgatacccaagtccgcagtgggaacgttaagtgctaattccagcaacgttattcaactgataattgatgcatacaacagtttgagttctgaggttatactggaaaacgggaaactaagcgagggggtgacaatttcatacaaatcatattgcaagaatggtgttaatgggacaggcgaaaatggccggaaatgctccaatatttctattggggatgaggtccaattcgaaatctccatcaccagcaataagtgtccaaagaaagacagcgattcttttaagatccgccctttgggatttaccgaggaggtcgaggttatcctccagtacatttgtgagtgcgagtgtcaatcggaaggcatccctgagagcccgaagtgtcacgaggggaatggtacctttgagtgcggggcgtgccgatgcaacgaaggcagggttggtcgacattgcgaatgttctacagacgaggtgaattctgaggatatggatgcctattgcaggaaggagaacagtagcgaaatctgtagtaataacggcgaatgtgtgtgcggtcagtgcgtgtgtcgcaagcgcgacaatactaatgagatctattctggcaagttttgcgaatgtgacaacttcaattgtgacaggtcaaacggcctgatttgtggggggaacggagtctgtaagtgtagggtgtgcgagtgcaatcccaattatacaggctcagcctgcgactgctccctggatacctctacgtgcgaagcttccaatgggcagatctgcaacgggcggggtatttgcgagtgcggtgtctgcaaatgtactgatcctaagtttcagggccagacctgcgagatgtgtcagacctgtctgggagtgtgcgcagaacataaggagtgtgtccaatgcagggctttcaataagggggaaaaaaaagatacctgtacccaggagtgttcctattttaacatcactaaggtggagagtagggacaaacttccacagcctgtgcagcccgatccagtatcccattgtaaggagaaagacgtggatgattgctggttctatttcacctactctgtaaacgggaataacgaagttatggtgcacgtagtggagaaccccgagtgtccaactggccctgacataattccaattgtagctggggttgtggctggaatcgtattaatcgggttggcccttttgctaatctggaagctgttaatgattatccacgaccggagggagtttgcgaaattcgagaaggaaaaaatgaacgccaagtgggacacttcattatcagtggcgcagccaggggtccagtggtgtgacatcagctccttgcagccactcacttcccgattccaacaattctcttgcctgtctctgccgtccacttgggattatagagtgaagatactctttattagggtgccctag

SEQ ID NO: 229041 - DNA, 2406 bp, Artificial Sequence
  derived and/or modified sequence
atgaacctgcagcccatcttctggatcggcctgatcagcagcgtgtgttgtgtcttcgctcaaacagacgagaatcgttgtcttaaggccaacgccaaaagctgcggtgagtgcattcaggcagggccgaactgcgggtggtgtaccaacagcactttcctccaggaagggatgccaacctcagctaggtgtgacgacttggaggctttaaagaagaaggggtgcccaccagacgacatagagaacccaagaggtagtaaggacatcaagaagaacaagaacgttacaaaccggtctaagggtactgccgaaaaactgaagccagaggatattactcagattcaaccgcaacaactggtcctaagactgaggtcaggagagcctcaaaccttcaccctgaagtttaagcgcgcagaagactatcctattgatctgtactatctgatggacctatcctattcaatgaaggacgacttagaaaacgtcaaatccttaggcacagacctaatgaacgagatgcgaaggatcacatctgactttagaatcggctttggctcctttgtggaaaaaaccgtaatgccttatatttccactacccctgctaaactccgtaatccctgtacctctgaacaaaactgcactagtcctttcagctacaagaatgtcctgtctctaaccaacaagggggaagtctttaatgagctcgtcgggaagcagcggatatctggcaacctggactcacctgagggaggattcgatgcgattatgcaggtggccgtgtgcgggtcactcatcggttggcgaaatgtaaccagactgttagtgttttcgactgacgcgggcttccacttcgctggagatggaaagctcggcgggattgtgctcccaaatgatggccaatgccacctagagaacaatatgtatacgatgagtcattactacgattatccttcaatcgctcatctcgttcagaagttgtcagagaataatattcagacaatctttgcagtgaccgaagagtttcagcctgtgtacaaggagctcaagaatctgatccccaaatccgcggtgggcacgttgtctgctaactcttccaatgtgatacagctgatcatcgatgcctacaacagcctgtcatccgaggtaattttggagaatggaaagctaagcgagggggtcaccatttcatataagagctactgtaagaacggagtaaacggaaccggagagaacgggagaaaatgctccaatattagcatcggagacgaggtgcagttcgaaatctcaattacgagcaataaatgtcccaagaaagattctgattccttcaagatccgacctttagggtttaccgaggaggttgaagtgattctccagtacatctgcgagtgcgagtgtcagtcagagggaatcccagagtctccaaagtgccatgaggggaacgggacatttgaatgcggcgcttgccggtgcaatgaaggaagggtcggacgccactgtgaatgctcaacagacgaggttaatagtgaagacatggatgcttactgccggaaagagaatagcagcgagatctgttccaacaacggagagtgcgtttgcggccagtgtgtttgtcgcaagcgggataacaccaacgaaatctattccggtaaattctgtgaatgtgacaatttcaattgtgaccggtccaatggcctgatttgcggaggcaatggcgtctgtaagtgccgtgtgtgcgagtgtaatcctaattataccggcagcgcatgcgactgtagcctggacacttctacctgcgaagcatctaatggccaaatatgtaacggacgaggcatctgcgaatgtggagtgtgtaagtgcacagatcccaagttccagggccaaacctgcgagatgtgccagacctgcttaggcgtctgtgccgagcacaaggagtgtgtgcaatgtagggctttcaacaagggagagaagaaagatacctgcacacaagaatgttcttatttcaatatcacaaaggtggagtcaagggacaagcttccacagccggtacaacctgaccccgtgtcacactgcaaagagaaggacgtcgatgactgctggttctatttcacttattctgtcaacggtaacaatgaagttatggtacacgtagtcgaaaaccctgagtgcccaaccgggcctgatattataccaatcgttgcaggtgtcgtggcagggatagtactaatcggactcgctttactgctgatttggaagctcctcatgatcattcacgataggagagagtttgccaaattcgagaaggagaagatgaatgccaaatgggatactcaggaaaacccaatatataaatcacctatcaacaattttaagaaccccaactatgggcggaaggcagggctgtag

SEQ ID NO: 229042 - DNA, 2478 bp, Artificial Sequence
  derived and/or modified sequence
atgaatctccagcccatcttttggattggactcatctcctccgtctgttgcgtttttgcccagaccgacgaaaatcggtgtttgaaagccaacgcaaaaagttgcggcgaatgtattcaagctggtccaaactgtggttggtgcacaaattctaccttcttgcaggagggaatgcccacttccgccaggtgcgacgacctggaggcgttgaagaaaaaggggtgtcctcctgatgatatcgagaacccaaggggttctaaggatatcaagaagaacaaaaacgtgacgaaccgcagcaaaggtacagcagagaaactgaaacccgaggatatcacccagatccaaccacagcagcttgtcctgagactgcgatctggggagcctcagacctttacactgaagtttaaacgtgcggaagactatcccatagatttgtattacctgatggatctgtcttattcaatgaaggacgacttagaaaatgtcaaaagtcttggcactgaccttatgaatgaaatgagacgaataacgagcgattttcgcatcggtttcgggagcttcgtagaaaagacggttatgccttacatctccactaccccagcaaagctccggaatccttgcacctcagagcagaattgtactagcccttttagttacaagaacgtgctcagtttgacaaataaaggagaggtctttaacgaactggttggaaagcagagaatttccgggaacttggattcccccgagggcggattcgatgccatcatgcaagtcgcagtctgtgggtccttaattggctggcgtaatgtaacacgcctgctcgtgttctctactgacgccggttttcactttgctggggatgggaaacttggaggtatcgtgttaccaaatgacggacagtgtcacctggagaacaacatgtatacaatgagtcactactacgactatcccagcatcgcccacctggtccagaagctttctgagaacaacattcagactatcttcgccgtcaccgaggagtttcagccagtctataaggagttgaaaaatctcattccaaagtcagcagtgggcacgctttcggctaattcctctaatgtgatacagctaattatcgacgcttataattccctgtccagtgaggtgatactggagaatggcaagctttccgaaggggtaaccatttcgtataaatcatactgcaaaaacggagtgaacggaactggagagaacggtagaaagtgttccaatatcagtatcggggatgaggtccaattcgaaatctcaattacgtccaataaatgccccaaaaaggactctgactcatttaaaatccggcctttgggtttcaccgaggaggtggaagttatattgcagtatatttgtgaatgtgagtgccagagtgagggcattcctgagagtccaaagtgtcacgagggaaacggcactttcgagtgtggagcctgtcgctgcaacgagggacgggttggtaggcactgtgagtgctctaccgacgaagtcaattcagaagatatggatgcttactgtcgcaaggagaatagtagtgaaatttgctccaacaacggggaatgcgtgtgcggacagtgtgtgtgtcggaagagggacaataccaacgagatctacagcggcaagttttgtgagtgcgacaactttaactgcgacaggtctaacgggctgatctgcggtggcaatggcgtctgtaagtgtcgggtgtgcgaatgcaatccaaactacacaggctcggcctgtgactgctcccttgacacctctacatgcgaagcaagcaatgggcagatttgtaatggtagaggcatctgcgaatgtggtgtatgtaaatgcacagatcctaaattccaaggacaaacgtgcgaaatgtgccagacttgcttgggagtgtgcgcagaacataaagagtgtgtccagtgccgcgcatttaataagggcgagaagaaggacacgtgcacccaagagtgcagttacttcaacataaccaaggtggagagccgagacaagcttccgcagccagtacagcctgaccccgtgagccactgcaaggaaaaggacgttgacgattgttggttctatttcacgtattcagtgaacggcaataatgaagtgatggtccatgtcgtcgaaaatcctgagtgtcccacgggaccagacattatacccatcgtagccggagtggtcgcagggatcgtcctcatcggcctggcactcctcctgatttggaagttactgatgattattcacgataggagggaatttgcaaagtttgaaaaggagaagatgaatgccaaatgggacacctccctgtccgtcgcccaacccggtgtgcagtggtgcgatatcagcagtctgcagcctctgacgtcacgcttccagcagttctcctgcctgagtctgccgagtacttgggactaccgggtaaaaatactgttcattagagttccttag

SEQ ID NO: 229043 - DNA, 2406 bp, Artificial Sequence
  derived and/or modified sequence
atgaatctacaaccaatcttctggataggattgattagctctgtgtgctgcgtgttcgcacaaacggatgagaatcggtgcctgaaggcgaacgcaaaatcttgcggggagtgtatccaggctggacccaattgtggctggtgcacaaacagcacctttcttcaggaaggcatgcccactagcgctaggtgcgacgatctggaagcacttaagaagaagggatgtccccctgacgatatcgaaaatccgaggggttccaaagacatcaaaaaaaataagaacgtcacaaatagaagcaagggaacagcagagaaactgaaaccggaggatataactcagatccagcctcaacaactggtcctgcggctgaggagcggagagccacaaaccttcacccttaaatttaaacgggcagaggattatccaattgatttatactacctgatggatctttcttactcaatgaaagacgacctcgagaacgtgaaatcacttggcaccgatcttatgaacgagatgagaaggattactagtgattttagaataggcttcgggtctttcgtcgagaagactgtcatgccatacatttccactacacctgcaaaactgcggaatccatgtacttctgaacagaactgcacatcaccattctcatataagaatgtgctgtctctaactaacaaaggtgaggtgttcaacgagcttgtcgggaaacagcggatctctgggaaccttgacagccccgaaggcggttttgacgcaatcatgcaggtcgcagtctgtggcagcctcattggctggagaaacgtgacccgacttctggtgttctcaaccgacgccggattccacttcgctggggacggtaaattgggaggtattgttctacccaacgacgggcaatgtcaccttgaaaataacatgtataccatgtctcattactatgattaccccagcatcgcacatttggtgcaaaaacttagtgaaaacaatatccagacaatattcgcagtgaccgaggagttccagcctgtatacaaagagcttaaaaacctgattcccaagtctgcggtaggaaccctttccgccaatagctccaatgtgatccagttgatcattgatgcctacaattccctctcttcagaggtgatcctggaaaacgggaagctgtcagaaggcgtgaccatctcttataaaagctactgtaagaacggagtcaacgggaccggagagaatggcagaaaatgcagtaatatttcaatcggtgacgaggtccagttcgaaatctctatcacttcaaacaagtgtcccaagaaagactccgactccttcaaaattcgcccattgggtttcacagaagaggtcgaagtgatactccaatacatctgcgaatgtgagtgccagtcggagggcatccctgaatctcccaaatgccacgagggaaatggcaccttcgagtgcggggcttgtaggtgcaacgaaggcagggtggggcgacattgtgagtgttctactgacgaggtgaactccgaggacatggatgcatactgcaggaaggagaacagcagcgagatctgctccaataatggtgagtgtgtgtgcggacagtgcgtctgccgtaaacgggataacaccaacgaaatctattcaggcaagttctgtgagtgcgacaattttaactgcgatcgaagtaatggccttatttgcggcggaaatggcgtgtgtaagtgtcgagtgtgcgaatgcaatcctaactacaccggatccgcttgcgactgtagtcttgacacttccacgtgtgaggcatctaatgggcagatatgcaacggcagggggatatgtgagtgcggcgtttgtaagtgcaccgacccaaaattccaaggacagacgtgtgagatgtgccagacttgcctcggggtgtgcgccgagcataaggaatgtgtccaatgccgagccttcaataagggtgagaagaaagacacttgtacgcaagaatgctcgtattttaatatcacaaaggtggaatccagggataaactgccgcagcccgttcaacctgaccctgttagtcattgtaaagagaaggatgttgatgattgctggttctattttacatattcagtaaacggcaataacgaagttatggtccatgtggtggaaaaccctgaatgtcctaccggccctgatattattcctattgtcgcaggagtcgtggccggtatcgtcctcatcgggttggctctgctgctgatctggaagctgttgatgatcattcatgataggcgcgaattcgcaaaatttgagaaagagaagatgaacgctaaatgggatacccaggagaacccaatttataaaagcccgatcaataactttaaaaatcccaactacgggagaaaagctgggctgtag

SEQ ID NO: 229044 - DNA, 2478 bp, Artificial Sequence
  derived and/or modified sequence
atgaatctgcaaccaatattctggatcggcctaatctcctctgtatgctgcgtctttgctcagacagacgagaacaggtgcctgaaagcaaacgccaagtcatgtggcgaatgtattcaagccgggccaaattgcggttggtgtacgaactctaccttcctgcaagagggtatgcctacttctgcacgctgcgatgacctggaggccctaaaaaaaaaaggatgtccccctgacgacatcgagaacccaagagggagcaaagatattaagaagaataagaacgtgactaatagatcaaagggaacagcggagaaactgaaacccgaggacattactcaaatccagccacagcaactcgttttacggctcaggtccggggagccgcaaacctttacattaaaatttaaaagggcagaagactatccaatcgatctgtattacctgatggacctgtcctattccatgaaggacgatctggaaaacgtaaaaagtctcggaaccgacctgatgaatgaaatgcgtagaatcacctccgacttccgaattggattcggatcctttgtggaaaagacggttatgccctacatcagcacgaccccagctaagctccggaacccatgcacttcggagcaaaattgtacaagtcctttctcatacaagaacgtgttatccttgaccaataaaggggaagtgttcaatgagctggtcggtaagcagagaattagcggcaatttggattctccagagggcggatttgatgctatcatgcaggtcgccgtctgcggaagtctgattggttggcggaatgtgacgcgactcttagtgtttagtaccgatgctggattccatttcgctggggacgggaagcttggcggaatagtgcttcccaacgatgggcaatgtcatcttgagaacaatatgtataccatgtctcattattatgattatccatcaattgcacacttggtacaaaagctctctgagaacaacatacagaccatcttcgccgtgactgaagagtttcagcccgtttataaggaactaaagaacttgattcctaagtccgccgtcgggacactctccgccaattccagcaacgtgattcaactaattatcgacgcctataactcattatcttcagaagtgatcctggaaaacgggaagctttcagaaggcgtgactatctcatacaagtcatattgcaaaaatggtgtaaatggcaccggagaaaacgggcgaaagtgctccaatatcagtattggggatgaggttcagtttgagatttcaattaccagcaacaaatgccccaaaaaggattcagacagcttcaagatcagacctttaggattcactgaagaggtggaagtcattctgcagtacatctgcgagtgcgaatgtcagagcgaagggattcctgagtcccccaagtgccatgaaggtaacggcacttttgagtgcggcgcgtgtcggtgcaatgaggggcgcgtggggaggcactgtgagtgttcaacagatgaggtgaattccgaggacatggatgcttattgcaggaaggagaactcatccgagatctgttctaataacggggagtgcgtctgtggacagtgcgtttgcaggaaaagagacaataccaacgaaatctacagtggcaagttctgcgagtgcgacaatttcaattgcgataggagcaacgggttgatttgtggaggtaacggtgtatgcaagtgtagagtatgtgaatgcaatcccaattataccggatccgcctgtgactgtagcctcgatacaagtacttgtgaagcatccaatgggcagatctgcaacgggcgagggatctgtgagtgcggcgtgtgtaagtgcacagaccccaagttccaggggcaaacctgcgaaatgtgtcaaacgtgtctgggtgtatgtgccgaacataaggaatgcgttcagtgtagagcgttcaataagggggagaaaaaggacacctgcacgcaagaatgtagctattttaacatcactaaagtagagagcagagacaaacttcctcagcccgtccaaccggaccctgtaagtcattgcaaagagaaggacgtggacgattgttggttctactttacctattcagtgaacggtaataacgaggtcatggtacatgttgtcgagaatcctgaatgtcccaccggccctgatatcatccctatcgtggcaggtgtcgtggccggcatcgtcttaataggcctggccctgctgctgatctggaaattattgatgatcattcacgatcgtcgagaattcgccaaattcgagaaggagaagatgaacgccaagtgggacacctccctgagcgttgcgcagcccggtgtgcagtggtgcgacatcagtagcctccagccactgacatcccgatttcaacagttctcctgcttatcacttccatctacatgggactatcgcgtgaagattctgttcatacgtgtgccatag

SEQ ID NO: 229045 - DNA, 2406 bp, Artificial Sequence
  derived and/or modified sequence
atgaacctccagcctatcttttggatcggactcatatcatccgtgtgctgtgtttttgctcaaaccgacgagaaccgttgccttaaagcaaacgcaaagtcatgcggcgagtgtatacaggcaggtcccaactgcggatggtgcacgaacagtacatttctgcaggagggcatgccaaccagcgctagatgtgatgatttagaagccctgaagaagaaggggtgcccaccagatgacatcgagaatcccagggggtccaaggatattaagaaaaataaaaacgttaccaatcggtctaagggcactgctgaaaaactgaagccagaggacatcacccagatccaaccacagcaactcgtactgcgcttgcggtcaggtgagcctcagaccttcacattaaaattcaagcgagcagaagattacccgatcgatttatactacctgatggatctaagttattcaatgaaagacgacttagagaatgtgaaaagtctgggtactgacctgatgaatgagatgagaagaattacatctgacttcaggattggttttggctccttcgtggaaaaaacagtgatgccctacataagtacgaccccggccaagctcagaaacccttgtacgagcgaacagaactgtaccagccccttctcatacaaaaatgtcctgtctttgacaaacaagggagaagtgtttaatgaactcgtcggaaaacagcgtatatcggggaatctagactcccccgaaggcggctttgatgcaattatgcaagtggcagtctgcggaagcctgattggctggagaaatgtgactcgcctcttggttttctcaactgatgccggctttcattttgcaggggacggcaagttgggcggcattgtcctgcctaacgacggccagtgtcatctggagaacaatatgtacaccatgtctcattattatgactatcccagcatcgcccacctggtgcaaaaactgtccgaaaataacatacaaacgatcttcgcagtgactgaggaatttcagcccgtctacaaagagctaaagaatctcatacccaaaagtgccgtcgggaccctgagtgcaaacagctcaaacgtgatccaacttattattgatgcttacaactcgctgagcagcgaagtaatcctcgagaacggcaaactctccgagggagtcaccatttcgtataagtcttactgcaaaaatggtgtcaatggcacaggggagaatggaagaaaatgctcaaacatcagtatcggtgatgaggtgcagttcgagatctccattacatcaaacaaatgccccaagaaagattcagacagttttaagatccggccgcttgggttcacggaggaggtggaggtgatcctccaatacatctgcgagtgtgaatgtcagtcagaaggaatccctgaatctcccaagtgccacgagggcaatggcacctttgaatgcggtgcttgccgctgcaatgaaggacgagtcggccggcattgtgagtgcagtacagatgaagtaaactcagaggatatggatgcttattgtcgtaaggagaattcttccgagatatgttccaacaacggagaatgtgtctgtggtcagtgcgtctgccgcaagcgagacaatacaaacgaaatctactccggaaagttttgcgagtgcgataatttcaactgtgatcgaagtaatggtttaatatgcggtggtaatggcgtctgtaagtgccgagtctgcgagtgtaacccaaactataccggatcagcctgtgactgtagcctggatacatccacttgtgaggcgagcaacggtcagatctgtaatggtaggggcatctgcgaatgcggggtatgcaaatgtaccgatccaaagtttcagggccagacatgtgaaatgtgtcaaacttgtttaggagtctgcgcggagcataaagagtgtgtccaatgccgtgccttcaacaagggggaaaaaaaagatacatgcacccaggagtgttcttacttcaacataactaaagtcgagtccagggacaaacttccgcaacccgtacagcccgaccctgttagccattgtaaagaaaaggacgtcgacgactgctggttttattttacgtacagcgtcaatggcaacaacgaagtcatggtccacgttgtggaaaatccagagtgtcccactggacccgatatcatccccattgtggctggtgtggtcgccggaatagttcttatcggcctagcccttctattaatttggaagctgctgatgatcatacacgataggcgggagttcgctaagtttgagaaagaaaaaatgaatgccaagtgggatacacaggaaaatccaatttacaagagtccaataaataactttaagaacccaaattatggccgcaaagccggactatag

SEQ ID NO: 229046 - DNA, 2478 bp, Artificial Sequence
  derived and/or modified sequence
atgaatcttcaacctatattttggatcggactgatcagctctgtgtgctgtgtatttgcccaaaccgatgagaataggtgtttaaaggctaatgcgaagagttgcggagaatgtattcaggcaggcccaaactgcggatggtgcacaaactccacattcctgcaagaaggaatgcctacttcagctagatgtgacgaccttgaagctctgaagaaaaagggatgtccccctgatgatattgagaacccgcggggcagtaaggatattaagaagaacaagaacgtcacaaaccgctctaagggtaccgccgagaaactgaagccggaggatattacacaaatccagccacaacagttagtactgagattaagatccggcgaaccacaaacatttactttgaagtttaaaagagccgaggattatcccatagacctgtactaccttatggatcttagctactcgatgaaagatgatttggagaatgttaaatcactgggcacagacctaatgaatgagatgaggcggattacaagcgactttaggataggctttggcagcttcgtggagaagaccgtgatgccatacatatctaccactcctgccaagctgagaaatccgtgcacctctgagcagaattgtacctcacctttttcttataagaatgtgctgagcctaaccaataagggagaagtgtttaatgagctggtgggcaagcaacggattagcggtaatttagattcacccgaggggggatttgatgccattatgcaagtagccgtgtgtggatccctgatcggctggcgtaatgtaacaagacttctagtgttctcaacagacgcaggcttccatttcgccggcgatggaaaactcggaggcattgttttgcctaacgatggacaatgtcatcttgagaacaatatgtataccatgtctcattattatgattatccatcaattgcacacttggtacaaaagctctctgagaacaacatacagaccatcttcgccgtgactgaagagtttcagcccgtttataaggaactaaagaacttgattcctaagtccgccgtcgggacactctccgccaattccagcaacgtgattcaactaattatcgacgcctataactcattatcttcagaagtgatcctggaaaacgggaagctttcagaaggcgtgactatctcatacaagtcatattgtaaaaatggggtgaatggaactggggagaacggccgtaaatgtagcaatattagcattggagacgaggttcaatttgagatctcaatcacttcaaataagtgccccaagaaggattcagatagttttaagattagaccacttggatttaccgaagaagtggaggtcattctgcaatatatctgcgaatgtgagtgccagtcagaaggaatacctgagtcccccaagtgccacgagggaaacggaactttcgagtgcggagcttgtagatgtaatgaagggcgagtgggcagacactgcgaatgtagtactgacgaggtgaattccgaggacatggatgcctattgccgaaaggaaaactctagtgaaatttgtagcaataatggagagtgtgtgtgtggccagtgcgtgtgcagaaaacgagataatacaaatgaaatctactccggcaaattctgtgagtgtgataacttcaactgtgacagaagtaacggcctgatttgtggaggtaatggcgtgtgtaagtgcagggtttgcgagtgtaatccgaactacaccgggagtgcctgtgactgctccttagacacatctacctgcgaagcaagcaatggacagatttgcaatgggcgaggaatatgtgaatgtggagtgtgtaagtgtaccgatccaaaattccagggccagacatgtgaaatgtgtcagacatgcttaggcgtgtgtgctgagcacaaggagtgcgtgcaatgcagggcttttaacaaaggtgagaagaaggatacatgcacccaggagtgttcatacttcaatattacaaaggtggagtcaagagataagttgccgcaacccgtccagcccgatcccgtctcccactgtaaggagaaagatgtggacgactgctggttttatttcacatattcagtcaacgggaacaatgaggtcatggtacacgtggtcgagaatcctgagtgtccaacaggacctgatataataccaattgtagcgggagtggtcgcagggatcgtcctgatcggcctagcactgctcctaatctggaaactgctgatgattattcacgaccgaagagaattcgcaaaattcgaaaaggaaaagatgaatgctaaatgggacacctctttatccgttgcacaacctggagtacagtggtgtgatataagttccctccaaccattgacaagtcggttccagcagttctcttgcctttccttacctagcacctgggactaccgagttaagatcctatttatccgcgtgccttag

SEQ ID NO: 229047 - DNA, 2406 bp, Artificial Sequence
  derived and/or modified sequence
atgaacctccaaccaatcttctggatcggcctgatttcttcagtgtgttgcgtctttgcccaaacagacgagaatcggtgtctcaaagccaacgctaagagctgcggagagtgtatccaggctggtcctaattgcggatggtgcacgaactcaacctttcttcaggaaggaatgcctacttcagcccgatgtgatgacctagaagctttaaaaaagaagggctgccccccagacgacattgaaaatccccgaggatctaaggacatcaagaagaacaaaaatgtgaccaataggtcgaagggaacagccgaaaagcttaagcctgaggatataacccagattcaaccccaacagcttgtgctgcgcctgaggagcggagaaccccagaccttcaccctaaagtttaaacgcgctgaggattacccaattgatctttattatcttatggacttgagttactctatgaaggacgacctggaaaacgtcaagagcctgggaacggacctgatgaatgagatgcgccgcattacttccgacttcagaattgggttcggttcattcgtggagaaaaccgttatgccctacatcagcactacaccagctaagcttaggaacccatgcacaagtgaacagaactgtacaagcccttttagctataagaatgttctatctctgaccaacaagggagaggtctttaacgaactggtcggcaagcagcgtatctcaggcaatcttgattcccctgaaggcggatttgacgccattatgcaagtcgctgtgtgtggctcacttatcggatggcgtaatgtgacccgactgctggtgttcagtacagatgccggttttcacttcgctggcgatgggaaacttggaggaatcgtgctccctaacgacgggcagtgtcacctggagaacaatatgtacaccatgtcacactactatgactatccctctatagcccatcttgtgcagaaattgagcgaaaacaatattcagacaatcttcgctgttacagaagaatttcagcctgtgtataaggaattaaaaaaccttatccccaagagtgccgtaggaaccctcagcgcaaacagttcaaacgttattcaacttattattgatgcatataattcactctcctctgaagtcatactcgagaacggaaaactgagcgaaggagtgaccattagctataaaagctactgcaagaacggagtgaacggaacaggcgagaatggccgcaagtgctccaacataagcataggcgacgaggtacaattcgagattagcataacttctaacaagtgtcctaaaaaggactccgactctttcaaaatcagacctcttggcttcaccgaagaagtcgaagtaatactacagtacatttgcgagtgcgaatgccagagcgaaggtatcccggagtcaccaaaatgtcacgagggaaacggaacgtttgaatgtggggcctgccgttgcaatgagggacgagtgggaagacactgtgaatgtagcacagatgaagtgaattctgaagacatggatgcatactgcaggaaggaaaactctagcgaaatctgtagtaacaacggcgaatgcgtgtgtggacaatgtgtctgtagaaaaagggacaatacaaatgagatttatagcggaaaattttgcgaatgcgataactttaactgcgatcgctcaaatggcctgatctgcggcggcaatggcgtatgcaagtgcagagtttgcgaatgtaacccaaactacaccgggtccgcgtgcgactgctcactcgacaccagcacctgcgaagcttccaatggacagatctgcaacggtaggggaatctgcgagtgcggagtgtgcaaatgcacagatccaaaattccaagggcaaacctgcgagatgtgtcaaacctgcttaggagtgtgtgccgagcataaggagtgcgtacaatgtagagccttcaataaaggtgaaaagaaagacacttgtacccaagaatgctcatattttaacattaccaaggtagaaagtagggataaactaccacaacctgttcaacctgaccccgtgtctcactgtaaagaaaaggacgtggatgactgctggttttacttcacctatagcgttaatgggaacaatgaggtaatggtccacgtagtagaaaacccagagtgtccaacaggcccagatatcatccccattgtggcaggcgtggtggccggtatagttctgatcggcttggcccttttacttatttggaaacttctgatgattatccacgaccgccgggaatttgcaaagtttgagaaagagaagatgaatgctaagtgggacactcaagaaaatcctatctataagtccccgattaacaatttcaaaaaccccaattacggaagaaaagcaggactgtag

SEQ ID NO: 229048 - RNA, 2478 nt, Artificial Sequence
  derived and/or modified sequence
augaaucugcaaccaauauucuggaucggccuaaucuccucuguaugcugcgucuuugcucagacagacgagaacaggugccugaaagcaaacgccaagucauguggcgaauguauucaagccgggccaaauugcgguugguguacgaacucuaccuuccugcaagaggguaugccuacuucugcacgcugcgaugaccuggaggcccuaaaaaaaaaaggaugucccccugacgacaucgagaacccaagagggagcaaagauauuaagaagaauaagaacgugacuaauagaucaaagggaacagcggagaaacugaaacccgaggacauuacucaaauccagccacagcaacucguuuuacggcucagguccggggagccgcaaaccuuuacauuaaaauuuaaaagggcagaagacuauccaaucgaucuguauuaccugauggaccuguccuauuccaugaaggacgaucuggaaaacguaaaaagucucggaaccgaccugaugaaugaaaugcguagaaucaccuccgacuuccgaauuggauucggauccuuuguggaaaagacgguuaugcccuacaucagcacgaccccagcuaagcuccggaacccaugcacuucggagcaaaauuguacaaguccuuucucauacaagaacguguuauccuugaccaauaaaggggaaguguucaaugagcuggucgguaagcagagaauuagcggcaauuuggauucuccagagggcggauuugaugcuaucaugcaggucgccgucugcggaagucugauugguuggcggaaugugacgcgacucuuaguguuuaguaccgaugcuggauuccauuucgcuggggacgggaagcuuggcggaauagugcuucccaacgaugggcaaugucaucuugagaacaauauguauaccaugucucauuauuaugauuauccaucaauugcacacuugguacaaaagcucucugagaacaacauacagaccaucuucgccgugacugaagaguuucagcccguuuauaaggaacuaaagaacuugauuccuaaguccgccgucgggacacucuccgccaauuccagcaacgugauucaacuaauuaucgacgccuauaacucauuaucuucagaagugauccuggaaaacgggaagcuuucagaaggcgugacuaucucauacaagucauauugcaaaaaugguguaaauggcaccggagaaaacgggcgaaagugcuccaauaucaguauuggggaugagguucaguuugagauuucaauuaccagcaacaaaugccccaaaaaggauucagacagcuucaagaucagaccuuuaggauucacugaagagguggaagucauucugcaguacaucugcgagugcgaaugucagagcgaagggauuccugagucccccaagugccaugaagguaacggcacuuuugagugcggcgcgugucggugcaaugaggggcgcguggggaggcacugugaguguucaacagaugaggugaauuccgaggacauggaugcuuauugcaggaaggagaacucauccgagaucuguucuaauaacggggagugcgucuguggacagugcguuugcaggaaaagagacaauaccaacgaaaucuacaguggcaaguucugcgagugcgacaauuucaauugcgauaggagcaacggguugauuuguggagguaacgguguaugcaaguguagaguaugugaaugcaaucccaauuauaccggauccgccugugacuguagccucgauacaaguacuugugaagcauccaaugggcagaucugcaacgggcgagggaucugugagugcggcguguguaagugcacagaccccaaguuccaggggcaaaccugcgaaaugugucaaacgugucuggguguaugugccgaacauaaggaaugcguucaguguagagcguucaauaagggggagaaaaaggacaccugcacgcaagaauguagcuauuuuaacaucacuaaaguagagagcagagacaaacuuccucagcccguccaaccggacccuguaagucauugcaaagagaaggacguggacgauuguugguucuacuuuaccuauucagugaacgguaauaacgaggucaugguacauguugucgagaauccugaaugucccaccggcccugauaucaucccuaucguggcaggugucguggccggcaucgucuuaauaggccuggcccugcugcugaucuggaaauuauugaugaucauucacgaucgucgagaauucgccaaauucgagaaggagaagaugaacgccaagugggacaccucccugagcguugcgcagcccggugugcaguggugcgacaucaguagccuccagccacugacaucccgauuucaacaguucuccugcuuaucacuuccaucuacaugggacuaucgcgugaagauucuguucauacgugugccauag

SEQ ID NO: 229049 - RNA, 2406 nt, Artificial Sequence
  derived and/or modified sequence
augaaccuccagccuaucuuuuggaucggacucauaucauccgugugcuguguuuuugcucaaaccgacgagaaccguugccuuaaagcaaacgcaaagucaugcggcgaguguauacaggcaggucccaacugcggauggugcacgaacaguacauuucugcaggagggcaugccaaccagcgcuagaugugaugauuuagaagcccugaagaagaaggggugcccaccagaugacaucgagaaucccaggggguccaaggauauuaagaaaaauaaaaacguuaccaaucggucuaagggcacugcugaaaaacugaagccagaggacaucacccagauccaaccacagcaacucguacugcgcuugcggucaggugagccucagaccuucacauuaaaauucaagcgagcagaagauuacccgaucgauuuauacuaccugauggaucuaaguuauucaaugaaagacgacuuagagaaugugaaaagucuggguacugaccugaugaaugagaugagaagaauuacaucugacuucaggauugguuuuggcuccuucguggaaaaaacagugaugcccuacauaaguacgaccccggccaagcucagaaacccuuguacgagcgaacagaacuguaccagccccuucucauacaaaaauguccugucuuugacaaacaagggagaaguguuuaaugaacucgucggaaaacagcguauaucggggaaucuagacucccccgaaggcggcuuugaugcaauuaugcaaguggcagucugcggaagccugauuggcuggagaaaugugacucgccucuugguuuucucaacugaugccggcuuucauuuugcaggggacggcaaguugggcggcauuguccugccuaacgacggccagugucaucuggagaacaauauguacaccaugucucauuauuaugacuaucccagcaucgcccaccuggugcaaaaacuguccgaaaauaacauacaaacgaucuucgcagugacugaggaauuucagcccgucuacaaagagcuaaagaaucucauacccaaaagugccgucgggacccugagugcaaacagcucaaacgugauccaacuuauuauugaugcuuacaacucgcugagcagcgaaguaauccucgagaacggcaaacucuccgagggagucaccauuucguauaagucuuacugcaaaaauggugucaauggcacaggggagaauggaagaaaaugcucaaacaucaguaucggugaugaggugcaguucgagaucuccauuacaucaaacaaaugccccaagaaagauucagacaguuuuaagauccggccgcuuggguucacggaggagguggaggugauccuccaauacaucugcgagugugaaugucagucagaaggaaucccugaaucucccaagugccacgagggcaauggcaccuuugaaugcggugcuugccgcugcaaugaaggacgagucggccggcauugugagugcaguacagaugaaguaaacucagaggauauggaugcuuauugucguaaggagaauucuuccgagauauguuccaacaacggagaaugugucuguggucagugcgucugccgcaagcgagacaauacaaacgaaaucuacuccggaaaguuuugcgagugcgauaauuucaacugugaucgaaguaaugguuuaauaugcggugguaauggcgucuguaagugccgagucugcgaguguaacccaaacuauaccggaucagccugugacuguagccuggauacauccacuugugaggcgagcaacggucagaucuguaaugguaggggcaucugcgaaugcgggguaugcaaauguaccgauccaaaguuucagggccagacaugugaaaugugucaaacuuguuuaggagucugcgcggagcauaaagaguguguccaaugccgugccuucaacaagggggaaaaaaaagauacaugcacccaggaguguucuuacuucaacauaacuaaagucgaguccagggacaaacuuccgcaacccguacagcccgacccuguuagccauuguaaagaaaaggacgucgacgacugcugguuuuauuuuacguacagcgucaauggcaacaacgaagucaugguccacguuguggaaaauccagagugucccacuggacccgauaucauccccauuguggcugguguggucgccggaauaguucuuaucggccuagcccuucuauuaauuuggaagcugcugaugaucauacacgauaggcgggaguucgcuaaguuugagaaagaaaaaaugaaugccaagugggauacacaggaaaauccaauuuacaagaguccaauaaauaacuuuaagaacccaaauuauggccgcaaagccggacuauag

SEQ ID NO: 229050 - RNA, 2478 nt, Artificial Sequence
  derived and/or modified sequence
augaaucuucaaccuauauuuuggaucggacugaucagcucugugugcuguguauuugcccaaaccgaugagaauagguguuuaaaggcuaaugcgaagaguugcggagaauguauucaggcaggcccaaacugcggauggugcacaaacuccacauuccugcaagaaggaaugccuacuucagcuagaugugacgaccuugaagcucugaagaaaaagggaugucccccugaugauauugagaacccgcggggcaguaaggauauuaagaagaacaagaacgucacaaaccgcucuaaggguaccgccgagaaacugaagccggaggauauuacacaaauccagccacaacaguuaguacugagauuaagauccggcgaaccacaaacauuuacuuugaaguuuaaaagagccgaggauuaucccauagaccuguacuaccuuauggaucuuagcuacucgaugaaagaugauuuggagaauguuaaaucacugggcacagaccuaaugaaugagaugaggcggauuacaagcgacuuuaggauaggcuuuggcagcuucguggagaagaccgugaugccauacauaucuaccacuccugccaagcugagaaauccgugcaccucugagcagaauuguaccucaccuuuuucuuauaagaaugugcugagccuaaccaauaagggagaaguguuuaaugagcuggugggcaagcaacggauuagcgguaauuuagauucacccgaggggggauuugaugccauuaugcaaguagccguguguggaucccugaucggcuggcguaauguaacaagacuucuaguguucucaacagacgcaggcuuccauuucgccggcgauggaaaacucggaggcauuguuuugccuaacgauggacaaugucaucuugagaacaauauguauaccaugucucauuauuaugauuauccaucaauugcacacuugguacaaaagcucucugagaacaacauacagaccaucuucgccgugacugaagaguuucagcccguuuauaaggaacuaaagaacuugauuccuaaguccgccgucgggacacucuccgccaauuccagcaacgugauucaacuaauuaucgacgccuauaacucauuaucuucagaagugauccuggaaaacgggaagcuuucagaaggcgugacuaucucauacaagucauauuguaaaaauggggugaauggaacuggggagaacggccguaaauguagcaauauuagcauuggagacgagguucaauuugagaucucaaucacuucaaauaagugccccaagaaggauucagauaguuuuaagauuagaccacuuggauuuaccgaagaaguggaggucauucugcaauauaucugcgaaugugagugccagucagaaggaauaccugagucccccaagugccacgagggaaacggaacuuucgagugcggagcuuguagauguaaugaagggcgagugggcagacacugcgaauguaguacugacgaggugaauuccgaggacauggaugccuauugccgaaaggaaaacucuagugaaauuuguagcaauaauggagaguguguguguggccagugcgugugcagaaaacgagauaauacaaaugaaaucuacuccggcaaauucugugagugugauaacuucaacugugacagaaguaacggccugauuuguggagguaauggcguguguaagugcaggguuugcgaguguaauccgaacuacaccgggagugccugugacugcuccuuagacacaucuaccugcgaagcaagcaauggacagauuugcaaugggcgaggaauaugugaauguggaguguguaaguguaccgauccaaaauuccagggccagacaugugaaaugugucagacaugcuuaggcgugugugcugagcacaaggagugcgugcaaugcagggcuuuuaacaaaggugagaagaaggauacaugcacccaggaguguucauacuucaauauuacaaagguggagucaagagauaaguugccgcaacccguccagcccgaucccgucucccacuguaaggagaaagauguggacgacugcugguuuuauuucacauauucagucaacgggaacaaugaggucaugguacacguggucgagaauccugaguguccaacaggaccugauauaauaccaauuguagcgggaguggucgcagggaucguccugaucggccuagcacugcuccuaaucuggaaacugcugaugauuauucacgaccgaagagaauucgcaaaauucgaaaaggaaaagaugaaugcuaaaugggacaccucuuuauccguugcacaaccuggaguacaguggugugauauaaguucccuccaaccauugacaagucgguuccagcaguucucuugccuuuccuuaccuagcaccugggacuaccgaguuaagauccuauuuauccgcgugccuuag

SEQ ID NO: 229051 - RNA, 2406 nt, Artificial Sequence
  derived and/or modified sequence
augaaccuccaaccaaucuucuggaucggccugauuucuucaguguguugcgucuuugcccaaacagacgagaaucggugucucaaagccaacgcuaagagcugcggagaguguauccaggcugguccuaauugcggauggugcacgaacucaaccuuucuucaggaaggaaugccuacuucagcccgaugugaugaccuagaagcuuuaaaaaagaagggcugccccccagacgacauugaaaauccccgaggaucuaaggacaucaagaagaacaaaaaugugaccaauaggucgaagggaacagccgaaaagcuuaagccugaggauauaacccagauucaaccccaacagcuugugcugcgccugaggagcggagaaccccagaccuucacccuaaaguuuaaacgcgcugaggauuacccaauugaucuuuauuaucuuauggacuugaguuacucuaugaaggacgaccuggaaaacgucaagagccugggaacggaccugaugaaugagaugcgccgcauuacuuccgacuucagaauuggguucgguucauucguggagaaaaccguuaugcccuacaucagcacuacaccagcuaagcuuaggaacccaugcacaagugaacagaacuguacaagcccuuuuagcuauaagaauguucuaucucugaccaacaagggagaggucuuuaacgaacuggucggcaagcagcguaucucaggcaaucuugauuccccugaaggcggauuugacgccauuaugcaagucgcuguguguggcucacuuaucggauggcguaaugugacccgacugcugguguucaguacagaugccgguuuucacuucgcuggcgaugggaaacuuggaggaaucgugcucccuaacgacgggcagugucaccuggagaacaauauguacaccaugucacacuacuaugacuaucccucuauagcccaucuugugcagaaauugagcgaaaacaauauucagacaaucuucgcuguuacagaagaauuucagccuguguauaaggaauuaaaaaaccuuauccccaagagugccguaggaacccucagcgcaaacaguucaaacguuauucaacuuauuauugaugcauauaauucacucuccucugaagucauacucgagaacggaaaacugagcgaaggagugaccauuagcuauaaaagcuacugcaagaacggagugaacggaacaggcgagaauggccgcaagugcuccaacauaagcauaggcgacgagguacaauucgagauuagcauaacuucuaacaaguguccuaaaaaggacuccgacucuuucaaaaucagaccucuuggcuucaccgaagaagucgaaguaauacuacaguacauuugcgagugcgaaugccagagcgaagguaucccggagucaccaaaaugucacgagggaaacggaacguuugaauguggggccugccguugcaaugagggacgagugggaagacacugugaauguagcacagaugaagugaauucugaagacauggaugcauacugcaggaaggaaaacucuagcgaaaucuguaguaacaacggcgaaugcguguguggacaaugugucuguagaaaaagggacaauacaaaugagauuuauagcggaaaauuuugcgaaugcgauaacuuuaacugcgaucgcucaaauggccugaucugcggcggcaauggcguaugcaagugcagaguuugcgaauguaacccaaacuacaccggguccgcgugcgacugcucacucgacaccagcaccugcgaagcuuccaauggacagaucugcaacgguaggggaaucugcgagugcggagugugcaaaugcacagauccaaaauuccaagggcaaaccugcgagaugugucaaaccugcuuaggagugugugccgagcauaaggagugcguacaauguagagccuucaauaaaggugaaaagaaagacacuuguacccaagaaugcucauauuuuaacauuaccaagguagaaaguagggauaaacuaccacaaccuguucaaccugaccccgugucucacuguaaagaaaaggacguggaugacugcugguuuuacuucaccuauagcguuaaugggaacaaugagguaaugguccacguaguagaaaacccagaguguccaacaggcccagauaucauccccauuguggcaggcgugguggccgguauaguucugaucggcuuggcccuuuuacuuauuuggaaacuucugaugauuauccacgaccgccgggaauuugcaaaguuugagaaagagaagaugaaugcuaagugggacacucaagaaaauccuaucuauaaguccccgauuaacaauuucaaaaaccccaauuacggaagaaaagcaggacuguag

SEQ ID NO: 229052 - protein, 291 aa, Artificial Sequence
  derived and/or modified sequence
MLLPLPPQSSKPVPKKSQSSKIVPSHHDPSEKTGENCQTKISPSSLQESPSSLQGALKKRSAFEDLTNVSFEMTHETLYLAVKLVDLYLMKAVCKKDKLQLLGATAFMIAAKFEEHNSPRVDDFVYICDDNYQRSEVLSMEINILNVLKCDINIPIAYHFLRRYARCIHTNMKTLTLSRYICEMTLQEYHYVQEKASKLAAASLLLALYMKKLGYWVPFLEHYSGYSISELHPLVRQLNKLLTFSSYDSLKAVYYKYSHPVFFEVAKIPALDMLKLEEILNCDCEAQGLVL

SEQ ID NO: 229053 - DNA, 876 bp, Artificial Sequence
  derived and/or modified sequence
atgctgctgcccctgcccccccagagcagcaagcccgtgcccaagaagagccagagcagcaagatcgtgcccagccaccacgaccccagcgagaagaccggcgagaactgccagaccaagatcagccccagcagcctgcaggagagccccagcagcctgcagggcgccctgaagaagagaagcgccttcgaggacctgaccaacgtgagcttcgagatgacccacgagaccctgtacctggccgtgaagctggtggacctgtacctgatgaaggccgtgtgcaagaaggacaagctgcagctgctgggcgccaccgccttcatgatcgccgccaagttcgaggagcacaacagccccagagtggacgacttcgtgtacatctgcgacgacaactaccagagaagcgaggtgctgagcatggagatcaacatcctgaacgtgctgaagtgcgacatcaacatccccatcgcctaccacttcctgagaagatacgccagatgcatccacaccaacatgaagaccctgaccctgagcagatacatctgcgagatgaccctgcaggagtaccactacgtgcaggagaaggccagcaagctggccgccgccagcctgctgctggccctgtacatgaagaagctgggctactgggtgcccttcctggagcactacagcggctacagcatcagcgagctgcaccccctggtgagacagctgaacaagctgctgaccttcagcagctacgacagcctgaaggccgtgtactacaagtacagccaccccgtgttcttcgaggtggccaagatccccgccctggacatgctgaagctggaggagatcctgaactgcgactgcgaggcccagggcctggtgctgtag

SEQ ID NO: 229054 - DNA, 1201 bp, Artificial Sequence
  derived and/or modified sequence
ttccaggtgtctggaactggattacagtttcttctgattgaacgcagcctttgaatactgcctggcctatcgcgaatacatccctgccttggacaagacgcagctgaatctctaagtgatgctactgccactaccaccccagagctccaaacctgtgcctaagaaatctcagtccagcaaaattgtgcccagtcatcatgacccatctgaaaagacgggggagaattgccaaacgaagatatctccatcttcacttcaggagtctccatcttcacttcagggagcactcaaaaagagatcagcttttgaagatctcactaatgtgtcctttgagatgacccatgagaccctgtacttggcagtgaagctggtggatctctacctaatgaaggcagtatgcaagaaggataagttacaactccttggtgccactgcctttatgattgcagcaaaatttgaggagcacaactcacctcgtgtggatgactttgtgtacatctgtgatgataattatcagcgatctgaggtactcagcatggaaatcaacatcctgaacgtcctcaaatgtgacattaacattcccatcgcctaccattttctgcgcagatatgctaggtgtatccacaccaacatgaagacactgaccttgtcccgctacatctgcgagatgaccctgcaggaataccactatgtccaggagaaggcttccaagctagctgctgcctccttactcctggccctctacatgaagaagctcggatactgggttcccttcctggagcattacagtggctacagtatctctgagcttcaccccttggtcagacagctgaacaaactgctgactttcagttcttacgatagtctcaaggctgtgtattacaagtattctcacccggtcttctttgaagtcgccaaaatccctgccttggatatgttgaagctggaggagattttgaactgtgattgtgaggctcagggcctggtactctagcagcagccacagggctaagcatgcatgttaacagggtatatttattctatgttcgaatttgtcttttgatcgcttttattcatttttcctttctttgtcttttcccaaactgataatgttataaatatttatgttgcttgtttttatgaaagaaaaaatattgtcatatttgactacaaatttaataaaaaattaatggttattgtt

SEQ ID NO: 229055 - DNA, 1201 bp, Artificial Sequence
  derived and/or modified sequence
ttaaaggtgtctggaactggattacagtttcttctgattgaacgcagcctttgaatactgcctggcctatcgcgaatacatccctgccttggacaagacgcagctgaatctctaagtgatgctactgccactaccaccccagagctccaaacctgtgcctaagaaatctcagtccagcaaaattgtgcccagtcatcatgacccatctgaaaagacgggggagaattgccaaacgaagatatctccatcttcacttcaggagtctccatcttcacttcagggagcactcaaaaagagatcagcttttgaagatctcactaatgtgtcctttgagatgacccatgagaccctgtacttggcagtgaagctggtggatctctacctaatgaaggcagtatgcaagaaggataagttacaactccttggtgccactgcctttatgattgcagcaaaatttgaggagcacaactcacctcgtgtggatgactttgtgtacatctgtgatgataattatcagcgatctgaggtactcagcatggaaatcaacatcctgaacgtcctcaaatgtgacattaacattcccatcgcctaccattttctgcgcagatatgctaggtgtatccacaccaacatgaagacactgaccttgtcccgctacatctgcgagatgaccctgcaggaataccactatgtccaggagaaggcttccaagctagctgctgcctccttactcctggccctctacatgaagaagctcggatactgggttcccttcctggagcattacagtggctacagtatctctgagcttcaccccttggtcagacagctgaacaaactgctgactttcagttcttacgatagtctcaaggctgtgtattacaagtattctcacccggtcttctttgaagtcgccaaaatccctgccttggatatgttgaagctggaggagattttgaactgtgattgtgaggctcagggcctggtactctagcagcagccacagggctaagcatgcatgttaacagggtatatttattctatgttcgaatttgtcttttgatcgcttttattcatttttcctttctttgtcttttcccaaactgataatgttataaatatttatgttgcttgtttttatgaaagaaaaaatattgtcatatttgactacaaatttaataaaaaattaatggttattgtt

SEQ ID NO: 229056 - DNA, 876 bp, Artificial Sequence
  derived and/or modified sequence
atgctgttgccacttcctccccagtcgtctaaacctgtcccaaaaaagtcacagagctcgaagatagtcccctcccatcacgacccgtccgaaaaaacgggcgagaattgccaaacgaaaataagcccatcttccctccaagaaagtccatcttccctccaaggtgccctgaagaagcggagcgcattcgaggacctcacaaatgtaagttttgaaatgacccatgagacactctatctggcagtgaagctggtggacctctatttaatgaaagctgtctgtaaaaaagataaactacagctcttgggagcgacagcctttatgatagccgcgaaattcgaagaacacaactcaccccgggttgatgatttcgtttacatttgcgatgacaattaccagcgttccgaagttctgtccatggagatcaacatactcaatgttctgaaatgcgatataaacatcccaatcgcgtatcactttctgcgtaggtacgcacggtgtatccacaccaacatgaaaacgctgacactctccagatatatttgcgagatgactttgcaagaataccactatgtccaagagaaggccagcaaacttgcagccgcgtctctgctgttggccctttatatgaagaagttagggtattgggtcccatttttagagcattactcgggctacagcatttcagaattacaccccttggttcgccaactgaacaagctactaactttcagctcatacgactctttgaaagccgtgtactacaagtattctcatcccgtgttctttgaggtcgctaagatccccgctctcgacatgctgaaactcgaggagatcctgaactgcgattgcgaggcccagggactggtgttgtag

SEQ ID NO: 229057 - DNA, 876 bp, Artificial Sequence
  derived and/or modified sequence
atgctcctcccactccctccgcaatcatccaagcccgtgccaaaaaagagccagtccagcaaaattgtaccgtcccaccacgacccatccgagaagacaggagagaactgtcaaaccaaaatttcacccagttcgctacaggagtccccctcgagtcttcaaggcgccctgaaaaaaaggtccgcttttgaggatctcacaaacgtttcttttgagatgacacacgagaccctctacctggccgttaaactggtggacttgtacctaatgaaggccgtctgtaagaaggacaaacttcaattgttgggagcgaccgccttcatgattgccgccaagtttgaggaacataacagtcctcgagtcgacgacttcgtctacatttgtgatgacaactaccagaggtccgaggtcctgtctatggaaattaacatcctcaatgttcttaagtgcgacatcaacattcccattgcatatcactttctccgccggtatgcccgatgcatccatacaaacatgaaaactctaaccctgagtcgctacatctgcgagatgaccctccaggaatatcattatgtccaggaaaaagcttctaagctggctgctgccagtctgctgctggcgctgtatatgaagaagctggggtattgggtccctttcctggagcattactcagggtatagcatctccgagcttcacccactcgtgcgtcaactcaataaactgcttacgttctcctcatatgattctttgaaggcagtgtattataagtatagccatccagtcttcttcgaagtggctaagattcccgcattggatatgttgaagctagaggagatcttaaactgcgattgtgaggcccaagggttggttctgtag

SEQ ID NO: 229058 - DNA, 876 bp, Artificial Sequence
  derived and/or modified sequence
atgcttcttccgctccctccacaaagcagcaagccagtgcccaagaagagccagtccagtaagattgtgccttcccaccatgaccccagtgagaagacaggggaaaactgccagacaaaaatatctccctcaagcctacaagagagcccctcatccttacaaggagctttgaagaaacggagcgcctttgaggaccttacgaacgtgagtttcgagatgacacacgagacattgtatctggcagtcaagctggtcgatctgtacctaatgaaagccgtctgcaaaaaagacaagctgcaactgctgggagctacggctttcatgatcgcggctaagtttgaggaacataactccccaagagtcgacgatttcgtgtacatttgcgatgacaattaccagaggtccgaagtactatcgatggagattaatatactcaacgttctcaaatgtgatattaacatccctattgcctatcatttcctccgcagatacgccagatgtatccacactaatatgaagacactgacactgagccgctatatctgcgagatgacccttcaggagtaccactatgtccaagagaaagcaagtaagctggcagcagcgtcccttctgctcgccttgtacatgaaaaaactggggtattgggttcctttcctcgagcactattcaggctattccattagcgagcttcatcctctggtgcggcagctcaacaaacttttgactttcagttcctacgactccctcaaggctgtgtactacaaatactcccatcctgtattcttcgaggtcgctaagattcccgctctagacatgttaaagctggaagaaatcctcaattgcgactgtgaggcccagggactggtcctgtag

SEQ ID NO: 229059 - DNA, 876 bp, Artificial Sequence
  derived and/or modified sequence
atgcttctgcctctgcccccccagtcaagcaagccagtccccaagaaatctcaatctagcaaaattgtcccttcgcatcacgacccatcagagaaaactggcgagaactgccagactaagatctcgccctcctcccttcaagagtcaccttcctcactgcaaggggccttgaaaaaaagaagcgcgttcgaggatctgacaaacgtgagcttcgaaatgacccatgaaaccctgtacctggctgttaaactagtggatttgtaccttatgaaagccgtgtgcaagaaagacaagcttcaattgctgggagctacagcgttcatgatagctgctaaattcgaagagcacaactcaccacgcgtcgacgacttcgtgtatatctgtgatgacaactatcagagaagcgaagtgctgtccatggagatcaacattttaaatgtgttaaaatgcgatatcaatatcccaatcgcctatcacttcctgaggagatacgccagatgcatacatacgaatatgaaaaccttgacactcagtcgctatatctgcgagatgaccctccaggaatatcattacgtgcaggaaaaagcatccaaattggccgcggcttctttgcttctagcgctgtacatgaaaaagctgggctattgggtccctttcttagaacattactcaggttatagtatctccgagttgcacccccttgtgagacagttgaataaactgttgacgtttagctcgtacgatagcctgaaggccgtgtattacaaatacagccatccggtattctttgaagtagccaaaattccagctctggacatgcttaaactggaggaaattttgaattgcgattgcgaggcgcaggggctggtgttgtag

SEQ ID NO: 229060 - DNA, 876 bp, Artificial Sequence
  derived and/or modified sequence
atgctgctgcccctgcccccccagagcagcaagcctgtgcccaagaagagccagagcagcaagatcgtgcccagccaccacgaccccagcgagaagacaggagagaactgccagaccaagatcagccccagcagcctgcaggagagccccagcagcctgcagggcgccctgaagaagaggtctgcctttgaggacctgaccaacgtgtcctttgagatgacccatgagaccctgtacctggccgtgaagctggtggacctgtacctgatgaaggctgtgtgcaagaaggacaagctgcagctgctgggcgccacagccttcatgattgctgccaagtttgaggagcacaacagcccccgggtggatgactttgtgtacatctgtgatgacaactaccagaggtctgaggtgctgtccatggagatcaacatcctgaatgtgctgaagtgtgacatcaacatccccatcgcctaccacttcctgcggcgctatgcccgctgcatccacaccaacatgaagaccctgaccctgagccgctacatctgtgagatgaccctgcaggagtaccactacgtgcaggagaaggccagcaagctggccgccgccagcctgctgctggccctgtacatgaagaagctgggctactgggtgcccttcctggagcactacagcggctacagcatcagcgagctgcaccccctggtgcggcagctgaacaagctgctgaccttcagcagctatgacagcctgaaggctgtgtactacaagtacagccaccctgtgttctttgaggtggccaagatcccagccctggacatgctgaagctggaggagatcctgaactgtgactgtgaggcccagggcctggtgctgtag

SEQ ID NO: 229061 - DNA, 876 bp, Artificial Sequence
  derived and/or modified sequence
atgctgctgcccctgcccccccagagcagcaagcccgtgcccaagaagagtcagtccagcaagatcgtcccatcgcatcatgatcccagtgaaaaaaccggcgagaattgccaaaccaagattagtcctagtagtcttcaggagagcccaagctcgctgcaaggggcgctgaaaaagaggtccgccttcgaggatctaacaaacgtgtcatttgaaatgactcacgaaacactgtacctggccgtgaagttagttgatctctacctgatgaaggcagtgtgcaagaaagacaagctgcagttattaggggccaccgcttttatgatcgcagcaaagtttgaggagcataatagccctagagtggacgatttcgtttatatctgtgatgataactatcagcgaagcgaagtgctctcgatggaaataaatatactgaacgtgctgaagtgtgatatcaatatacccatcgcgtatcacttccttaggaggtacgctcgctgcatccatacaaatatgaagaccctcactttgtcaaggtacatctgcgagatgacacttcaagagtatcattatgttcaggagaaagcttccaaattagccgccgcttccttgctgctggccctctatatgaaaaagttgggctactgggtgcctttccttgaacactattctgggtactctatctccgaactccaccccctggtccgtcagttgaataagctcctgaccttctctagttacgattccctcaaggctgtgtactacaagtactctcatccagtattcttcgaagttgccaaaatcccagctcttgacatgctgaaactggaagagatacttaattgcgactgcgaagcccaggggctggttctttag

SEQ ID NO: 229062 - DNA, 876 bp, Artificial Sequence
  derived and/or modified sequence
atgctgctgcccctgcccccccagagcagcaagcccgtgcccaagaagtcccagtctagcaaaatcgtccctagtcatcacgacccttctgaaaagacaggtgagaattgccagaccaagatctctcctagtagcttacaagagtctccgtcttccctgcagggagcacttaagaaacgctccgcatttgaggatttgacaaatgtcagtttcgagatgactcacgaaaccctgtatctggccgtcaagcttgtggacttgtacctgatgaaagccgtttgcaaaaaagataaattgcagctcctgggagcaactgccttcatgatagctgctaagttcgaagagcataattctcctcgcgtggacgactttgtctatatctgtgacgacaactaccagagatctgaggtcctgtctatggagatcaacattctgaatgtcctgaagtgtgatatcaatatccccattgcatatcacttcctgcggcgttatgccaggtgtatacatactaacatgaagaccctgacattgtcccgctacatctgtgagatgacacttcaggaataccactacgtccaggagaaggcttctaaattagcggccgcttctctcctgctcgccctgtatatgaaaaaattggggtactgggtgccctttttggaacactacagtggctactcaattagcgagcttcatcccctggtgcgtcagctgaataagctgctgaccttctccagctatgattcactgaaagctgtctactacaagtactcgcacccagtcttcttcgaagtggccaagattccagcactggacatgcttaaactcgaggaaatactgaactgcgactgcgaggcccaggggttagtattatag

SEQ ID NO: 229063 - DNA, 876 bp, Artificial Sequence
  derived and/or modified sequence
atgctgctgcccctgcccccccagagcagcaagcccgtgcccaagaaatctcagagctctaaaattgttccatctcatcacgacccgtcggaaaagactggggaaaattgccagaccaaaatcagtcctagttccctgcaagagagtccatctagcttgcagggcgctttgaagaagagaagcgcttttgaagatttaaccaatgtttcttttgagatgacccacgaaacactgtacttggccgtgaagctggtggatctatatctgatgaaagctgtttgtaagaaggacaagctccagttgcttggggctacagctttcatgatcgctgcaaagtttgaagaacataactctccgcgggttgacgacttcgtctacatttgcgacgacaactaccagagaagtgaagtactctccatggaaataaacatccttaacgttttgaaatgtgatatcaatataccaatagcttatcactttctcagaaggtatgcacggtgcatccataccaatatgaagactttaactctatcacggtacatatgcgaaatgactctgcaggagtatcactacgtgcaggaaaaagcctcaaagctggctgccgcctcactactgttagccctttacatgaagaagctagggtactgggtgccctttctcgagcattattctggctacagtatctctgagctacatcctcttgttcggcagctaaataagctactgacctttagcagctatgatagtctcaaagctgtctactacaagtactcacaccccgtattcttcgaagttgccaagatacctgctttagatatgcttaaactcgaagagatactgaactgcgattgtgaggcccaaggactcgtactctag

SEQ ID NO: 229064 - DNA, 876 bp, Artificial Sequence
  derived and/or modified sequence
atgctgctgcccctgcccccccagagcagcaagcccgtgcccaagaagtctcagtcttccaaaatagtgccatcacatcacgaccccagcgaaaagaccggtgaaaactgccaaacaaaaataagccccagctctctccaggaatccccttcatcattgcagggcgccctgaagaagcgctcagctttcgaggacttgaccaacgtttcctttgagatgacccacgagaccctttacctggcagttaaactggtggatctgtatcttatgaaagcagtgtgcaagaaggacaagcttcagctgctcggcgccactgcctttatgatcgccgcgaagttcgaagaacataactcaccaagagtggacgatttcgtgtatatctgcgacgataattatcagaggtcagaagtgttgtctatggaaatcaacatcctgaacgtgcttaagtgtgacatcaacattcctatagcttaccattttctgcgccgctatgcaagatgcatacatactaacatgaaaactctgacactttcaagatatatctgcgagatgactcttcaagagtatcattacgtgcaagaaaaggccagcaagctcgcggctgcttccctgttgttggccttatacatgaaaaagctgggctattgggtgccattcctggagcattacagcgggtattctatttctgaactgcaccccctcgtccgacaattgaataagctgttgactttcagcagctacgattcactgaaggcagtgtactataaatatagtcacccagtgttcttcgaagtagcgaaaattcctgctttagatatgctgaaactcgaagagattctgaattgcgactgcgaagcccagggactggtgctgtag

SEQ ID NO: 229065 - DNA, 876 bp, Artificial Sequence
  derived and/or modified sequence
atgctgctcccccttcctccacagagctctaagccggtgcctaagaaaagtcaatcctccaaaatcgtgccctcccaccatgatccctctgagaagaccggggagaattgtcagactaagatctccccgtcctccctccaggagtctcccagcagcctgcaaggggcactcaaaaagaggagtgcatttgaagatttgaccaacgttagtttcgagatgactcacgagaccctctacttggctgttaagttagtggacttatatcttatgaaagcagtgtgcaagaaagataagcttcagctcctgggggctacagcatttatgattgcggcaaagtttgaagaacataacagtccgagggtggacgactttgtgtacatatgtgacgataattaccagcggtctgaggtgctctctatggagatcaatatactgaacgtgcttaaatgcgatattaatattcctatcgcctaccactttctgagacggtacgccaggtgtatccatacaaacatgaagactttaaccctatcgcggtacatctgcgagatgaccttacaggagtaccattatgttcaagaaaaggcatcaaagcttgccgcagcctcattgctgttagcactttacatgaagaaactgggatactgggtgcccttcctcgaacattactcaggctactcaattagcgagctgcatccccttgtgcgccagttaaacaaactgctaacatttagtagctatgattccctcaaggctgtctactataaatatagccaccccgtcttcttcgaggtggccaagatcccggctttggacatgttgaagcttgaggaaatattgaactgcgattgcgaggctcagggtttggtcctctag

SEQ ID NO: 229066 - DNA, 876 bp, Artificial Sequence
  derived and/or modified sequence
atgctgttacccctgcctccgcagagctccaagcctgtgccaaagaaatcacagagttccaaaatcgtgccatctcatcacgatccctctgagaagactggagaaaactgtcaaactaagatttccccatctagccttcaagaatcaccttcttccctgcagggcgctctgaaaaagcggagcgcttttgaggatctgaccaatgtgtctttcgagatgacccatgagactctatacctagctgtaaaactggtagacctatatctgatgaaagctgtgtgcaagaaggataaactccaactgctgggcgctacggccttcatgattgccgctaaattcgaagagcacaacagccctcgagtcgacgattttgtttacatttgtgacgataattatcaaagaagtgaggtattgtcgatggaaattaacatattaaacgtcctgaagtgcgacatcaatattcccattgcttatcactttctgagacggtacgcacgatgcattcataccaatatgaagacccttaccctcagtaggtacatatgtgaaatgacgctgcaggagtatcattacgttcaggagaaggcgagtaagctcgctgccgcaagtctcctgcttgctctgtatatgaagaagctggggtactgggtgcccttcttggaacactatagtggctatagcatttccgaactccaccctcttgtgaggcagttaaataaactgttaaccttcagcagctatgactctcttaaagccgtatattataagtactcccaccctgtttttttcgaggtggctaagattcccgctctggacatgttgaagttggaggagattttgaactgcgactgcgaagctcagggtcttgtgctgtag

SEQ ID NO: 229067 - DNA, 876 bp, Artificial Sequence
  derived and/or modified sequence
atgctactgccactcccacctcagtcctcgaagccggtcccaaagaagagtcagagtagtaagattgttccttctcaccacgatccaagtgagaaaacaggggaaaactgtcaaacaaaaatatcaccctcatcactccaagagtccccatctagcctgcagggggcactgaagaagagatcagccttcgaagaccttacgaatgtttccttcgagatgacacatgagactctctatctggccgtgaagcttgtagacctctacctcatgaaagcagtgtgtaaaaaagataagttacagttgctcggggcaacagctttcatgatcgccgctaagttcgaagagcacaacagccccagagttgacgattttgtgtatatctgcgacgacaactaccagagatcggaggtcctgagcatggagattaacatactgaatgttctcaagtgtgatatcaacatacccatcgcttatcactttcttagaaggtacgcacggtgtatccacaccaatatgaagaccttgaccctgtccaggtatatttgcgaaatgaccctccaggagtaccactacgtccaggaaaaggctagcaagctagctgccgcttcattacttctagctctgtacatgaagaaactaggctattgggtcccgttcttggagcactattccggctactccatttctgagctacaccctttagtccgtcaactgaataaactactcacgtttagttcgtatgattcactgaaggcagtatactacaagtattcacaccccgtgttctttgaggtggcaaagatccccgcactcgatatgttgaagctcgaggagatactgaactgtgactgcgaggcccaagggctggtgctttag

SEQ ID NO: 229068 - DNA, 876 bp, Artificial Sequence
  derived and/or modified sequence
atgttgctgcccctaccacctcagagctccaagccagtcccaaaaaagtcacagtcctccaagatcgtcccttcacaccacgatccatcagaaaaaactggcgagaactgtcagactaagatttctccttcatctctacaggaatcgccgagcagtctgcaaggtgctttaaagaaaaggagcgcctttgaggacctgactaacgtctccttcgagatgacccacgagactttgtatctagccgtcaaattggtggatttataccttatgaaggcagtgtgtaagaaagacaagcttcagctgctgggcgctaccgcctttatgattgccgcaaagtttgaggagcataattcccctcgagttgatgatttcgtatatatctgcgacgacaactaccagcggtctgaagtgctttccatggagatcaacattcttaacgttctcaagtgtgacatcaatattccgattgcttatcacttccttagacgttatgctagatgtattcacaccaatatgaagacactgaccttatctcggtacatctgcgagatgactctgcaggaataccactatgttcaagaaaaagccagtaagctcgccgctgccagcctcctgctggctctgtacatgaaaaagctgggttactgggtgcccttcttggaacactattccggatactcaattagcgagttgcatcctctggtgagacagctcaacaagctactgacattcagctcctacgattccctgaaggcagtttactacaaatacagccatccggtgttcttcgaagtggctaaaattcctgcccttgatatgctgaagcttgaagagatcctgaattgcgactgcgaagcacaaggccttgtcctctag

SEQ ID NO: 229069 - DNA, 876 bp, Artificial Sequence
  derived and/or modified sequence
atgttgttacctctgccacctcagtccagcaaaccggtaccgaagaaatctcaatcatctaaaatcgtaccgagccaccacgatcctagcgagaaaacaggcgagaactgtcagactaaaatctccccaagtagcctacaggaatccccatcttctcttcagggcgcccttaaaaagaggtctgcattcgaggatttaacaaatgtctcctttgaaatgacacacgaaaccctgtacctggcagtcaagctggttgacttgtacctgatgaaagcagtgtgcaagaaggacaagcttcaacttttaggggcgaccgcttttatgatagcagcaaagtttgaagagcacaacagccctcgggtggatgacttcgtttacatttgcgatgacaactaccagcggtccgaagtattgtcaatggagatcaatattctgaacgtgctgaaatgcgacataaatatcccaatcgcctatcatttcctacgccggtatgctcggtgtattcatacgaatatgaaaacgttgaccctgtcccggtatatctgcgaaatgaccctgcaggaataccactatgtgcaggaaaaggcctcaaagttggcggctgcctccttactgcttgcactctacatgaaaaagctgggttactgggtccccttccttgagcattactcaggctatagtatctccgaactgcaccccttagtgcgacagttaaataaactactgacattctcttcatatgactccctgaaggcggtatattataagtactcccatcctgtctttttcgaggtagcaaagatacccgcccttgatatgctaaaattagaagagattttgaactgtgactgcgaggcccaaggcctggttttgtag

SEQ ID NO: 229070 - DNA, 876 bp, Artificial Sequence
  derived and/or modified sequence
atgttactcccgctgcccccccagtccagtaagccggtgcctaagaagtcccaaagctccaaaattgttccatcccatcatgaccctagcgaaaagactggtgagaattgccagactaagattagcccttccagtctgcaggaatccccttcctccctgcaaggcgctctgaagaaacgatccgctttcgaagacctgactaatgtgagctttgagatgactcatgagacactgtacttagccgtgaagctggttgatctttacttgatgaaagctgtctgcaaaaaggacaaactccagcttctgggtgctaccgccttcatgatcgccgcgaaattcgaggagcacaattcacccagggttgatgactttgtttacatttgcgatgataattaccagcggtcggaagtcctgtccatggagatcaacatactaaacgttctgaagtgcgacataaatattcccatcgcataccatttcctgaggaggtatgcccgctgcattcacactaacatgaagactctgactctgagtcgctatatttgcgaaatgacactgcaagaataccactatgttcaggagaaagcttctaaactggcagcggctagcctgctcttggcgttatacatgaagaaactcggttactgggttccttttttggaacactactctgggtactctatctcagagctgcaccccctggtccgccagctgaataagttactcaccttctcatcgtacgattcactgaaagccgtgtactacaaatattcacacccggttttttttgaggtcgcaaagatccctgccttggatatgttaaagttagaagaaattctcaattgcgattgtgaagcacagggactggtcctctag

SEQ ID NO: 229071 - DNA, 876 bp, Artificial Sequence
  derived and/or modified sequence
atgctgctgcccctgcccccccagagcagcaagcccgtgcccaagaagtcccaaagcagcaaaatagtcccttctcaccatgatcccagcgagaagaccggggagaactgtcagaccaagattagcccctcttcactccaggaatctccaagttctctgcaaggagcactcaagaagagaagcgcattcgaagacctcaccaatgtttccttcgaaatgactcatgagaccctttacttagccgttaaacttgttgacctttacctgatgaaagccgtgtgtaagaaagacaagctccagctgctgggggcaactgcgttcatgatcgccgctaagtttgaagagcacaactcccctagagtggacgacttcgtctacatctgcgacgataactatcagagaagcgaagtgctgtctatggagatcaacatcctgaacgtgctaaaatgcgacatcaatattcccatagcctaccacttcctccggcggtacgcgcgttgcattcacaccaatatgaagacgctgaccctctcgaggtacatctgcgaaatgaccctgcaagagtatcattacgtgcaggaaaaggcatccaagttggcggcagcgtctctgttgctggcactttacatgaagaagctcggctattgggtcccttttcttgagcattacagcggctactctatctctgagctgcaccccttggtgcggcagttaaacaaactgctgaccttctcaagctacgatagcctgaaggccgtgtattataagtatagtcaccccgttttcttcgaggtggcaaagatcccagctctggacatgctcaagttagaggagattctcaactgcgactgcgaggctcaaggactggtgctgtag

SEQ ID NO: 229072 - DNA, 876 bp, Artificial Sequence
  derived and/or modified sequence
atgctgctgcccctgcccccccagagcagcaagcccgtgcccaagaagtcccagtcctcaaagattgtgccctcccaccacgacccttcggagaaaactggtgagaactgccagaccaagatctctccaagcagtttacaggagtctccgtccagccttcaaggcgctttgaaaaagcgatccgccttcgaagatctgactaatgtaagttttgaaatgacacacgagactctatatctggccgtgaaacttgttgatctctacctcatgaaagccgtatgtaaaaaggataagttgcagctgctgggtgcaaccgcattcatgatcgctgccaagttcgaggagcataacagtccccgagtggatgacttcgtgtatatctgtgacgataactatcagcggtctgaggtgctgagcatggagataaatattctcaatgtgcttaagtgtgacattaacatcccgatcgcataccattttctgcgccgctatgccaggtgtattcacactaacatgaagaccttaactttgagcaggtacatctgcgagatgactctccaggaataccattacgtccaggaaaaagcgagcaaactagcggcagcctcccttttactggcattgtacatgaaaaaactcgggtattgggtcccattcctagagcattacagtggctattcaatttccgagttgcatcccctggtccgacagttgaataagctgttgaccttttcctcttacgattcactcaaggccgtttattacaaatacagccaccctgtgtttttcgaagttgctaagatacctgctctcgatatgctcaagctcgaagaaatcctcaattgcgattgtgaggcccagggactggttttgtag

SEQ ID NO: 229073 - DNA, 876 bp, Artificial Sequence
  derived and/or modified sequence
atgctgttgcccctgccacctcaatcttcaaagccagttcctaagaaatcgcaaagtagcaagattgtcccttcacatcatgacccatctgagaagaccggagagaattgtcagactaagatctctcccagcagtctccaggagtctccatcttctctgcagggggcactcaagaagcggagcgccttcgaggacctcactaacgtttcctttgaaatgacacatgagactctatacctcgccgtgaagttggtagatctgtacctgatgaaagccgtgtgcaaaaaggataaactccagctgctgggtgcgacagctttcatgatcgctgccaagttcgaggaacacaactctcctagagtggatgactttgtgtacatttgcgatgataactatcagcggagcgaggtgcttagtatggagatcaatatcctcaacgtgcttaagtgcgacatcaacattccaattgcataccactttctcaggaggtacgcacgctgtatccatacaaacatgaagactcttactctttctcgatacatttgcgagatgaccttgcaggaataccactatgtacaggaaaaggcctcaaaactagctgccgcttctttactgttggcgctgtatatgaaaaaactgggctattgggtcccattcttggagcactattccgggtatagcatctccgagctgcaccctttagtaaggcaactaaataaattactgaccttcagttcttatgactcacttaaagctgtatactacaagtacagtcaccctgtgtttttcgaagttgcgaagatccctgcactcgacatgctgaaacttgaggagatactcaactgcgactgcgaggcccaaggactagttctatag

SEQ ID NO: 229074 - DNA, 876 bp, Artificial Sequence
  derived and/or modified sequence
atgttgttgcccttaccccctcagagcagtaagcctgtccccaaaaaatctcaaagtagcaaaatcgtgccaagccaccacgacccctccgaaaaaacaggagaaaactgtcagactaagatcagcccttccagcttgcaggagtccccatcatcgctgcagggcgctctgaaaaaaagaagcgctttcgaggacctgacaaatgtgagtttcgagatgacccatgaaacactgtatctggcggtaaaactagtggatctatacctgatgaaagctgtttgtaagaaagataaactgcagctacttggagccacagcgttcatgatcgcagccaagttcgaggaacacaactcccctcgggtcgacgacttcgtgtacatttgtgacgataactaccagcgctctgaggtgttatctatggagataaacattctgaatgtcctgaaatgtgacataaacattcccattgcttaccatttcctgcggaggtacgccagatgcatccacacaaacatgaagacactgaccttgtcacgttatatttgtgagatgactcttcaagaataccactatgtgcaggaaaaagcatccaaactggcggcagccagcctcctgctggccctctatatgaagaaactggggtactgggtgcctttcctggagcattacagcgggtattccattagcgagctccatcctttggtgcggcaattaaataagctgttaaccttctcttcctatgattccttgaaggccgtgtattataagtatagtcatcccgtcttctttgaggtggcaaagattcctgctctggatatgctgaagctggaagagattctcaattgtgattgcgaggcccaggggctggttctgtag

SEQ ID NO: 229075 - protein, 867 aa, Artificial Sequence
  derived and/or modified sequence
MEVPAAGRVPAEGAPTAAVAEVRCPGPAPLRLLEWRVAAGAAVRIGSVLAVFEAAASAQSSGASQSRVASGGCVRPARPERRLRSERAGVVRELCAQPGQVVAPGAVLVRLEGCSHPVVMKGLCAECGQDLTQLQSKNGKQQVPLSTATVSMVHSVPELMVSSEQAEQLGREDQQRLHRNRKLVLMVDLDQTLIHTTEQHCQQMSNKGIFHFQLGRGEPMLHTRLRPHCKDFLEKIAKLYELHVFTFGSRLYAHTIAGFLDPEKKLFSHRILSRDECIDPFSKTGNLRNLFPCGDSMVCIIDDREDVWKFAPNLITVKKYVYFQGTGDMNAPPGSRESQTRKKVNHSRGTEVSEPSPPVRDPEGVTQAPGVEPSNGLEKPARELNGSEAATPRDSPRPGKPDERDIWPPAQAPTSSQELAGAPEPQGSCAQGGRVAPGQRPAQGATGTDLDFDLSSDSESSSESEGTKSSSSASDGESEGKRGRQKPKAAPEGAGALAQGSSLEPGRPAAPSLPGEAEPGAHAPDKEPELGGQEEGERDGLCGLGNGCADRKEAETESQNSELSGVTAGESLDQSMEEEEEEDTDEDDHLIYLEEILVRVHTDYYAKYDRYLNKEIEEAPDIRKIVPELKSKVLADVAIIFSGLHPTNFPIEKTREHYHATALGAKILTRLVLSPDAPDRATHLIAARAGTEKVLQAQECGHLHVVNPDWLWSCLERWDKVEEQLFPLRDDHTKAQRENSPAAFPDREGVPPTALFHPMPVLPKAQPGPEVRIYDSNTGKLIRTGARGPPAPSSSLPIRQEPSSFRWTTSLEKAATTATARRGGLRSRRRSPSPGSQGPAGSGRSGHLRPARGARQGAGGPEATRGS

SEQ ID NO: 229076 - DNA, 2604 bp, Artificial Sequence
  derived and/or modified sequence
atggaagtcccggcagccggacgggtgcctgctgaaggggcgcccactgccgcagtggccgaagtacgatgtccaggccccgcccctcttcgcctactggagtggcgtgtggccgccggagccgctgtgaggatcggtagcgtgctggccgtctttgaagcagctgcctctgcccaatcgtctggagcttcacagtcccgagtcgcctcaggcggttgtgtgagacctgctaggcccgaacggagactgaggagcgagcgggccggtgtcgttcgggagctctgcgctcagccagggcaggtggttgcgcctggtgctgttctggtgaggcttgaaggatgttctcaccccgtggtgatgaagggactgtgcgccgagtgtggccaggacctaactcaactccagtctaagaatggaaagcagcaggtcccgctgtcaacagcaactgttagcatggtgcatagcgttccagaactgatggtaagttccgagcaggccgaacagctaggccgtgaagatcagcagaggctacatagaaatagaaagcttgtgctgatggtcgacttagaccagaccttgatccacacaaccgaacagcactgccagcagatgtcaaacaaaggaatcttccatttccaactgggcagaggcgagccgatgttgcacactcggctgcgaccccactgtaaggatttcctggagaagatagctaaattgtacgaactgcatgtcttcacatttgggtcgcggctgtatgcacacactattgccggattcctagaccctgaaaaaaagcttttttcccatagaattctgagtcgcgacgaatgcattgatcctttcagcaagaccggcaacctccggaacctgttcccttgtggcgacagcatggtctgcatcattgacgaccgagaggatgtatggaaatttgcgcctaatctaatcactgtcaagaaatatgtgtattttcagggaacaggagacatgaacgcacctcctgggagtagggagtcccagacaaggaaaaaagtgaatcactcacgtggaacggaggtgagtgaaccatccccccccgtgcgggacccagagggcgttacccaggctccaggtgttgagccatctaatggattggagaaacctgcacgtgaacttaatggcagtgaggctgcaacaccaagggatagtccccggccaggcaaaccggatgagcgcgatatctggcctcctgctcaggcccctacatccagccaggagctggctggggcgccagaacctcaagggtcttgcgcccagggcggacgagtggctcccggtcagagacccgctcaaggggcaacaggcacagacctagacttcgacctgtcttccgattcagaaagctcatccgaatccgagggcactaagagctcttcttccgcctcagacggagaatctgaaggcaagaggggacgacagaagcctaaggcagctccagagggggccggagcacttgcccaaggctcctccctggaacccggcaggcccgccgccccaagcctccctggggaagctgaaccaggagctcacgcgccggacaaggagcccgagctcggcggacaggaggaaggcgagagggatggactttgtggtctggggaacggctgcgccgacaggaaagaagccgagaccgagtcgcagaatagcgaactgtccggtgttacagccggcgagtctctcgaccagtccatggaagaggaagaggaggaggatacggatgaagatgatcatttaatctacctagaggagattttggtacgcgtgcacactgattattatgctaaatacgatcgttacctgaacaaggagattgaggaagcccccgacattcgtaagatcgtgcccgagttaaaaagtaaggttttggcagatgtggctatcattttctcggggctgcacccgactaattttccaatagagaagacgagagaacactatcatgctacagcactgggagcaaagattctgactaggctggtgttaagtcctgatgcgccagacagagcgacccacctaatcgccgcccgcgccgggactgagaaagtgctgcaggcccaagagtgcgggcacctacacgttgttaacccagactggctctggtcatgtctggagcgctgggacaaggtagaagaacaactgtttcctctcagagacgatcacactaaggcacagagggaaaattcaccagctgcttttcctgatcgggaaggggtgcctcccaccgccctgttccatcccatgcccgtactccctaaggcccaacctgggccagaggtgagaatctacgactccaacacaggtaagcttattagaaccggggctagaggacccccagcgccctcctcttctctgcccatccgccaggaaccctcaagctttcggtggaccactagtcttgagaaggcagccacaacagcaaccgcccggaggggtggcctccgcagtaggcggaggagtcccagcccgggtagtcagggtcctgccggcagcggacgatctggacaccttcgacccgccagaggtgcgcgacaaggcgccgggggccctgaagccactagaggctcatag

SEQ ID NO: 229077 - DNA, 2604 bp, Artificial Sequence
  derived and/or modified sequence
atggaggtgcctgctgctggccgggtgcctgctgagggcgcccccacagctgctgtggccgaggtgcgctgccccggccctgcccccctgcggctgctggagtggagggtggccgccggggctgctgtgagaattggctctgtgctggccgtgtttgaggccgccgccagcgcccagagcagcggggccagccagagccgggtggccagcggcggctgtgtgcggcctgcccggcctgagcggcggctgcggtctgagcgggccggcgtggtgcgggagctgtgtgcccagcccggccaggtggtggcccctggagctgtgctggtgcggctggagggctgcagccaccctgtggtgatgaagggcctgtgtgccgagtgtggccaggacctgacccagctgcagagcaagaatggcaagcagcaggtgcccctgagcacagccaccgtgtccatggtgcacagcgtgcctgagctgatggtgtcctctgagcaggccgagcagctgggccgggaggaccagcagaggctgcacaggaacaggaagctggtgctgatggtggacctggaccagaccctcatccacaccacagagcagcactgccagcagatgagcaacaagggcatcttccacttccagctgggccgcggggagcccatgctgcacacccggctgcggccccactgcaaggacttcctggagaagatcgccaagctgtatgagctgcacgtgttcaccttcggcagccggctgtatgcccacaccatcgccggcttcctggaccctgagaagaagctgttcagccaccgcatcctgagcagagatgagtgcatcgaccccttcagcaagacaggcaacctgaggaacctcttcccctgtggggacagcatggtgtgcatcattgatgacagagaagatgtgtggaagtttgcccccaacctgatcaccgtgaagaagtatgtgtacttccagggcaccggggacatgaatgcccctcctggcagccgggagagccagaccaggaagaaggtgaaccacagccggggcacagaggtgtctgagcccagcccccctgtgcgggaccctgagggcgtgacccaggcccctggggtggagcccagcaatggcctggagaagccagcccgggagctgaatggaagtgaagctgccaccccccgggacagccccaggcctgggaagccagatgagcgggacatctggcccccagcccaggcccccaccagcagccaggagctggccggggcccctgagccccagggcagctgtgcccagggcggccgggtggcccctggccagaggcctgcccagggcgccaccggcacagacctggactttgacctgagcagtgacagcgagagcagcagcgagagcgagggcaccaagagcagcagcagcgccagtgatggagagagcgagggcaagaggggccggcagaagcccaaggccgcccctgagggcgctggggccctggcccagggcagcagcctggagcccggccggcctgctgcccccagcctgcccggggaggccgagcccggggcccacgccccagacaaggagcctgagctgggcggccaggaggagggggagagagatggcctgtgtggcctgggcaatggctgtgccgacaggaaggaggccgagacagagagccagaacagcgagctgagcggcgtgacagctggggagagcctggaccagagcatggaggaggaggaggaggaggacacagatgaagatgaccacctgatctacctggaggagatcctggtgcgggtgcacacagactactatgccaagtatgaccgctacctgaacaaggagattgaggaggccccagacatcaggaagatcgtgcctgagctgaagagcaaggtgctggctgatgtggccatcatcttcagcggcctgcaccccaccaacttccccatcgagaagacccgggagcactaccacgccacagccctgggcgccaagatcctgacccggctggtgctgagcccagatgccccagaccgggccacccacctgattgctgcccgggccggcacagagaaggtgctgcaggcccaggagtgtggccacctgcacgtggtgaacccagactggctgtggagctgcctggagcgctgggacaaggtggaggagcagctgttccccctgagagatgaccacaccaaggcccagcgggagaacagccctgctgccttcccagaccgggagggcgtgcccccaacagccctcttccaccccatgcctgtgctgcccaaggcccagcccggccctgaggtgcgcatctatgacagcaacacaggcaagctgatcagaactggagcccggggccccccagcccccagcagcagcctgcccatccggcaggagcccagcagcttccgctggaccaccagcctggagaaggccgccaccacagccacagccaggagaggaggcctgcggagcagaagaagaagccccagccctggcagccagggccctgctggcagcggccgcagcggccacctgcggcctgcccggggggcccggcagggcgctgggggccctgaggccacccggggcagctag

SEQ ID NO: 229078 - DNA, 2604 bp, Artificial Sequence
  derived and/or modified sequence
atggaggtgcccgccgccggccgggtgcccgccgagggcgcccccacagccgcagtggccgaagtgaggtgcccaggtccagccccgctgagattactggagtggagagtggcggcgggtgctgcggttcggattgggtccgtcctggccgtgtttgaagccgctgcaagcgcccagtcttcaggcgcgagtcaatcgcgtgtggcctccgggggctgcgtcagaccagcccggcccgaacgccgtctgcggtccgaaagagccggagtggtgcgcgaactctgtgctcagcctggccaggtggttgcacctggggccgtgctggtccgcctcgaaggctgctcccatcctgtggtcatgaagggtctgtgtgcagagtgtggtcaggatcttacccaattgcaaagtaaaaatgggaagcagcaggtgcccctgagcacagccacagtaagcatggtgcacagcgtcccagaattaatggtctcatccgaacaggctgaacagctgggccgagaggatcaacagaggctacatcgtaaccgtaagctggtgctcatggtcgatctcgaccaaaccctcatccatacgactgaacagcactgtcaacagatgagcaataagggcatctttcatttccaactggggaggggcgagccaatgctacatactcgtctgcggccgcattgcaaggactttctcgaaaagatcgccaaactttacgaattacacgtgttcacctttggctcccggctgtacgcccacacaatagccgggttcctcgatcctgaaaaaaaactgttctcgcacaggatcctatcccgcgacgagtgtattgatccattctctaaaaccggaaatctgagaaatctgtttccatgcggagattccatggtttgcattattgatgaccgggaagacgtgtggaagtttgctccaaatctcattaccgtaaagaagtatgtgtactttcagggtaccggagatatgaatgcccctcctggtagcagagaatcccagacccgcaaaaaggtgaatcactcacggggcacggaggtctccgagccctctccccccgtgagggatccagagggggtcacccaggccccgggagtggaaccctccaacgggcttgagaagcccgcacgtgaactgaacggatcagaggcggccacgccccgtgatagtccacgacccggaaagcccgacgagagagatatttggccccccgctcaggcccccaccagcagtcaagagctagccggagcccctgagcctcaaggaagctgtgcgcagggaggcagagtggctcctggtcagagacccgctcagggtgctaccggaaccgatctcgactttgatctaagcagcgacagcgaatcatcaagcgagagcgagggaacaaaaagtagtagtagcgcaagcgacggagagtcagaaggaaagcggggccggcagaaacctaaagcagctccagagggagccggggcacttgctcagggctcaagtctggagccaggacggccagcggcaccttctttgcctggagaggcagagcccggcgcacacgcgcccgacaaagaacccgaattgggaggacaggaggagggcgagcgcgatggtctgtgtggactaggcaacggctgcgccgaccgcaaagaggccgaaacagagtcacagaactccgagttatccggtgtgaccgccggggagagtcttgatcaatcaatggaagaagaggaagaagaggacacggacgaggatgaccacctgatctaccttgaagagatacttgttcgcgtgcacactgactattacgccaaatacgacaggtatttgaataaagagattgaggaggcgcctgatatcagaaagatcgtccctgaactcaaatccaaggtgctggccgacgttgcaatcatattctccggcctgcatccaacgaattttcctatcgaaaaaaccagggaacattaccacgctaccgcattgggcgccaagatcctgaccagactggtcctaagtcccgatgcccccgacagagctacccatcttatcgctgctagggccggaacagagaaggtgttacaggcccaggaatgcgggcacttacacgtggtgaacccagactggctgtggtcatgcctcgaacggtgggacaaagttgaggaacaactttttccgcttcgggacgatcatacaaaagcccagcgggaaaactcccctgccgcattccctgaccgcgagggtgtgccaccaactgccctcttccaccccatgcctgtcctcccaaaggcccagcctggaccagaagtgcgtatttatgattcaaacactggcaagctgattcgcactggggcacggggtccgcccgctcccagcagcagcctgccgattagacaagagccctcatcctttaggtggactacaagtctggagaaggccgccaccacagccacggcccgtaggggcggcttgaggagtcgaaggcgctcgcccagtcccggaagccagggccccgcaggctccggccggagcggacacttgcgccctgctagaggggcgcgacaaggcgcaggcggacccgaggctacccgcggcagctag

SEQ ID NO: 229079 - DNA, 2604 bp, Artificial Sequence
  derived and/or modified sequence
atggaagtgccggcagctgggagagtccctgctgaaggagccccaactgcagccgtggccgaggtgaggtgtcccggtcccgctccgctgcgccttctggagtggagagtcgccgcaggggcagccgtccggatcggctctgtacttgcagtttttgaggcggctgcatccgcacagtccagtggggcttcccagtcccgtgtggccagcgggggttgtgtgcggccagcccgtcccgaaagaagattgcggtcggagcgtgctggcgtggtgcgagagctctgtgcccagcccggacaagtggtggccccaggcgcagtgcttgtcaggctagagggctgcagtcatccagtcgtgatgaaggggctgtgcgccgaatgtggccaggatttgacacagctgcagagcaaaaacgggaagcagcaggtgcccttgtcaaccgctaccgtgagcatggtccattccgtgccagagctcatggtaagctcagagcaggctgagcaactcgggagagaggatcagcaacgtcttcaccggaatcgcaaactggtgctcatggtcgacctggaccagacgttgatccacacgactgaacagcattgtcagcagatgtccaataaaggaatattccacttccaactgggcagaggggagcctatgttgcatactagattacgccctcattgcaaagatttcctggaaaagatagccaagttgtacgagctgcatgtattcacattcggcagcagactgtacgcccataccattgcgggattcttggatcctgagaagaaattattcagtcacaggattctctcaagagatgaatgcatcgatcctttttccaaaacaggtaatctgcgaaacttgttcccatgtggggatagtatggtgtgcattattgatgacagggaggatgtttggaagttcgcgcctaatctaattaccgttaaaaaatatgtttactttcagggcaccggcgacatgaatgcaccaccgggtagcagggagtcacaaacccgtaaaaaggtaaaccactccagggggaccgaagtgtcagagcccagccctcccgtccgggatcccgaaggagtcactcaggccccaggagttgaaccatctaacggcctggaaaagcctgcgagagagctgaacggcagcgaggcggcaactccacgcgactctcctcgaccaggaaaacccgatgagcgggacatctggcccccagcgcaagctccaacaagctcccaggagcttgccggagcccctgagccccagggttcttgcgcacagggcggaagggtggctccgggacaacggcctgctcaaggggctacgggtaccgacctcgactttgatctgagcagcgacagcgagagctcatccgagtcagagggaacaaagtcgtcctctagtgctagtgacggggagagtgagggtaagcgaggcagacagaagccgaaggccgcaccagagggcgcaggtgcgttggcacagggcagcagtcttgagcctggaaggccggctgcgccatccctgcccggtgaggccgaacctggtgcgcacgcaccagacaaagaacctgaactggggggtcaagaggaaggcgagcgtgacggtttatgcggcctgggcaatggatgtgctgatagaaaggaggccgagaccgaaagccagaatagcgaactgagtggcgtaactgcaggggagagtctggatcagtccatggaggaggaagaagaggaggatacagacgaggatgatcaccttatttatttagaagagatcctcgtgagagtccatacagattattacgccaaatatgatcgctacttaaacaaggaaattgaagaagctcccgatattaggaagattgtgccggaactgaagtccaaggtccttgctgacgtggctattatcttctcaggactgcaccccaccaattttccaatcgagaaaacaagggagcattaccatgccaccgcactgggtgcgaagatactcaccagactggtgctgtcccctgatgcgcctgatagagccactcatctgattgcagccagagcaggaacggaaaaagttctgcaggcgcaagagtgtggtcatctgcacgttgtcaaccccgattggttgtggtcgtgtctggagagatgggataaggttgaagagcagttgttcccactgcgcgacgaccatactaaagcacagagagagaattctccagctgcattccctgatagagagggagtccctcctacagccctgtttcacccaatgcccgtcctgcccaaagcccagcccggtccagaggttcgaatctacgattccaataccgggaagttgatccggacaggtgcaaggggtcccccagcaccttcttccagtcttcctatcaggcaggagccctctagcttcaggtggactacttccttggagaaagccgctacgaccgctaccgccagaagaggagggctccggagcagacgtcgttctccgtccccgggaagccaagggcctgcaggctcaggtcgaagtggccatctgaggcccgctcggggagccaggcaaggcgctgggggtcccgaggccaccaggggaagctag

SEQ ID NO: 229080 - DNA, 2604 bp, Artificial Sequence
  derived and/or modified sequence
atggaggtacccgcggccgggagggtgcccgcggagggggcccctaccgccgcagtggccgaggttcgctgtcctggcccagctccactgcgccttctagagtggcgggttgctgccggagccgctgtgagaatcgggtccgtgttggcggtgttcgaagctgctgcaagcgcccaatccagcggcgcttctcagtctagagtggccagcggtggatgcgtccgccccgctaggccagaaaggcgattgaggagtgagcgcgccggcgtggttagggagttatgtgcccagcccggccaggtggtcgcacccggtgctgtgctcgtccgcctcgagggttgcagccaccccgtggtgatgaagggcctatgtgcagaatgcggacaagatctcacccaacttcagtccaaaaacggaaaacagcaagtgcctctgagtacggccacagttagcatggttcatagcgtgccagaactgatggttagctctgagcaggcagagcagctgggacgggaggaccagcaacgactccaccgaaatagaaagcttgtattgatggtcgacctcgatcagaccctcatccacacaacagaacagcattgccaacaaatgtccaacaagggcattttccactttcagcttggcaggggcgagcccatgctccatacacgcctccggccccactgcaaggattttctggagaaaattgcaaaactgtatgaactccatgtgttcacttttggctcaagactgtacgcacatactatcgccggcttcctcgaccccgaaaaaaagctttttagtcaccgcatactgtcgagagacgaatgcattgaccctttctcgaagacgggaaatttgaggaacctcttcccctgcggagactctatggtgtgtattattgatgatagggaggacgtgtggaaattcgcaccaaaccttattacagttaaaaagtatgtatatttccagggaaccggagacatgaacgcacctccagggtcgagggaatcacagacccggaaaaaggtgaatcactcacgggggactgaggtctcagaaccttcaccacccgtccgcgaccccgaaggtgtgactcaagctcccggcgtagaaccatctaacgggctcgagaaacctgctcgagaattaaatgggtccgaggcagccacacctagggacagtcctaggcccgggaagcccgatgagcgtgacatctggccacctgcgcaagccccaacatcgtcccaagaactggccggcgcacctgagccccaggggagctgcgcccaggggggaagagttgccccagggcagaggccagcacagggtgcgaccggcacagacttagattttgacctgtctagcgatagtgaatcctccagcgaatccgagggcactaaatctagtagttcagcctccgacggtgagagtgagggaaagcgcggtcggcagaaaccgaaggccgcccccgaaggggccggggccctggcacaaggaagcagcctggagccaggaaggccagccgcaccttccttgcctggtgaagcagagccaggagcgcacgctccagacaaggaaccagagctgggcggacaggaggagggagagagggacggcctgtgcgggcttgggaacgggtgcgcagatcgaaaggaggctgagactgagagccaaaacagcgaactcagtggagtaaccgcgggggagtctctggaccagagtatggaggaagaggaggaagaagacaccgacgaggacgatcaccttatctatttggaggaaatccttgtcagggttcacacagactattacgccaagtacgatcgatacttgaacaaagagattgaggaggctcccgacatccggaaaattgttcccgaacttaagtccaaagtgctagcagacgtcgcaataatcttcagcgggctgcatccgaccaattttcccatagaaaaaaccagagaacattatcatgcaacagctctgggcgccaaaatactaaccagactggtccttagtccagatgcccccgatcgcgccacacacctgatcgccgcgcgcgctggcactgagaaggtgctgcaggctcaagagtgcggccatttacatgttgtgaatccagattggctttggtcttgcctagagcggtgggacaaagtcgaagaacagctgtttcccctgagagacgaccacacaaaagcgcaaagagagaactctccagcagcatttcctgacagggaaggagtgcccccaaccgccctgttccatcctatgcccgtgctcccaaaagcccagccggggcctgaagttaggatctatgatagtaataccggtaagctgatccgcactggcgcccggggtccgcctgctccctcctcctctctccccataagacaggagccatctagcttcaggtggacaacttcactggagaaagcagccaccacggcaacagcacgaagaggcggtctgagaagtcggaggagatctccttcacctggttcgcagggaccagcaggatcaggacggtcaggccatttgcgccccgccaggggtgccagacaaggcgcaggcggaccagaggccaccagaggcagttag

SEQ ID NO: 229081 - DNA, 2604 bp, Artificial Sequence
  derived and/or modified sequence
atggaggtgccagccgcaggccgggtgccggcagaaggtgccccaacagccgcagtcgctgaagttaggtgtccaggtccagcccccctgaggctattggagtggcgtgttgcggcgggggcagccgtaagaatcggcagcgtactggcagtctttgaggctgcagcaagtgcccagtcatccggggcaagtcagtcaagggtagcgtctggtggatgtgtccgtcccgctaggccagaaagaagactgcgtagcgagcgcgctggcgtcgtaagggagctatgcgcacagccaggtcaggtcgtcgcccccggagcggtattggtgcgtcttgaaggctgtagtcatccagtggtgatgaagggcttgtgtgcggaatgcggacaggatctgacgcagctgcagagtaagaatgggaaacaacaggtacctctcagtactgcaaccgtttccatggtgcacagcgttcctgagctaatggtttccagcgagcaagccgagcaattaggaagggaagaccaacagcggttgcacaggaacaggaagctggtgttgatggtagacctcgaccagacactgatacatacaaccgagcaacactgccagcagatgtctaacaaaggcatctttcattttcagctcggccgcggggagcctatgctacacactagactgcggccgcattgcaaagacttcttggagaaaatcgccaagctttacgaacttcatgtattcacatttggctcacgcctttatgctcacactatagccggctttttggatcctgaaaaaaaactgttttctcaccgcatattgtcccgtgatgaatgtattgatccctttagcaaaactggaaatcttcgcaacctttttccatgcggagattcgatggtttgtattattgatgatagggaggacgtctggaagttcgcacccaacctgataaccgtgaaaaagtacgtctactttcaggggactggcgacatgaatgcccctccaggctcacgggagagtcagactagaaaaaaggtaaatcattcccgcggcacagaggtcagtgaaccaagcccccccgtgagagaccccgagggagtgacacaagcacccggcgttgaaccttccaatggactagaaaagcctgcgcgggaattgaacggatctgaagcagcaacccccagggactcccctcggccaggtaaacctgacgaaagggatatctggccccctgctcaagcgccaaccagttcacaggagcttgcgggggcacctgaaccccaaggcagctgtgcacagggcggccgtgtcgcaccaggccaaagaccggctcagggcgctaccggaaccgatctggatttcgaccttagcagtgacagcgagagttcttccgagagcgagggcacaaaatcgtcatctagcgcatcagacggggagagcgaaggtaagagaggaagacagaaacctaaagcagcacccgaaggtgccggcgctttagcgcagggatctagcttggagcccgggaggccagcagcccccagtctgcccggagaagcggagcccggagcacatgcccccgataaggagccagagctgggtgggcaggaagagggagagcgcgatggtttgtgtggacttggcaacggatgtgctgatcgaaaggaagctgagaccgaatctcagaacagcgaactgagtggagtgaccgctggggagagcctggaccagtcaatggaggaagaggaagaagaagacaccgatgaggatgaccacctaatttaccttgaggaaatactggtgagagtacacactgactattacgctaaatacgacagatatttgaataaggaaatcgaagaagcacctgacatcaggaaaattgtcccagagttgaaaagtaaagtacttgccgatgtcgcaattatcttctctggcttgcacccaactaactttcctatagaaaagactagagaacattaccacgcaaccgcccttggtgccaagatactgactcggctggtcttatctcctgatgctcctgatcgagctacacacttaatcgccgcccgcgccggcacagagaaggtcctacaggctcaggagtgcggtcacctccacgttgtgaatcctgattggctgtggtcatgccttgaaagatgggacaaagtggaagaacagctgtttcccttacgcgacgatcatacaaaagctcagagagaaaactcaccagctgcatttcctgaccgcgaaggagtgccccccaccgccctgtttcaccctatgccggttctccctaaggcacagccaggccctgaagttagaatatatgacagcaacacaggtaagctgatcagaaccggcgcaagagggccacctgcccctagcagctcactaccaattcggcaggagccgtcaagctttagatggaccacatctcttgaaaaggctgccacaactgcaacagctcgcaggggaggattacggtccaggagaagaagtcccagtcctggctctcaggggcctgcaggtagtggtaggtccgggcatttaaggccagcacggggtgcacggcagggcgccggaggccccgaagctacccgtggaagctag

SEQ ID NO: 229082 - DNA, 3538 bp, Artificial Sequence
  derived and/or modified sequence
ggaactacagcgtcgccgcctgggttgtgtcgccgcggtaggcgctgcgctctgagcgcagcgcaggccccgtaccgaccgcccgcccgccctctgtccgcgatggaggtgccggccgcgggtcgcgttcctgccgagggcgccccgacggcggctgtggccgaggtgcgctgcccggggcccgcgccgctgcgcctgctggagtggagggtggcggcgggcgcggccgtgcgcatcggctcggtgctggccgtgttcgaggccgccgcctccgcgcagtcctccggggcctctcagtcccgtgtagcctccgggggctgcgtgcgccccgcgcggccggaacgcaggctgaggtcggagcgcgcgggcgtggtgcgggagctgtgcgcgcagccgggccaggtggtcgccccaggagcggttctggtgaggttggaaggatgcagccacccggttgtcatgaaaggcctgtgtgctgaatgtggccaagacctcacccagttgcagagtaagaacgggaagcagcaggtgccgctgtccacggcgaccgtgtccatggtgcacagcgtgccggagttgatggtgagctccgagcaagctgaacagctgggaagagaagaccagcagcgactgcaccgaaaccggaagctggtgctcatggtggacttggaccagacgttgattcacacaaccgagcagcactgtcagcagatgtcgaataaaggcatctttcacttccagctgggccggggtgagcccatgctgcacacgcgcctgcgtccacactgcaaggacttcctggagaagatcgccaagctgtacgagctgcacgtcttcaccttcggcagccggctgtacgcacacaccatcgcaggctttttagaccccgagaagaagcttttttctcaccgaatattatcaagggatgaatgtattgacccattttctaaaacgggaaaccttagaaatctctttccttgtggagactcaatggtttgcattattgatgatcgagaagatgtctggaagtttgcccccaatctgataactgtgaagaaatatgtatacttccagggcacgggtgatatgaatgcgccccctgggtcccgagaatctcagacgagaaagaaagtaaatcattctcgaggcactgaggtctcagagccatctccgcccgtgagagaccctgagggggtaacgcaggcccctggagtggagcccagcaatggcctggagaagcctgcacgggagctgaacggcagcgaggccgccaccccgcgggactcaccccgccccgggaagccagacgagagggacatctggccccctgcccaggcccccaccagcagccaagagctggcaggcgctcctgagccccagggatcctgtgcgcagggtggccgggtggcaccgggacagcggcctgcccagggtgccacgggcactgacctggactttgacttatccagcgacagcgagagcagcagtgagtccgagggcacgaagtcctcctcctccgcctctgatggcgaaagcgaggggaaaagaggccggcagaagccgaaggctgccccagagggagccggggcgctggcacagggcagttccctggagccggggcggcctgcagcaccgagtctccccggagaggccgagcctggcgcgcatgccccggacaaggagcctgagctgggtgggcaggaggagggcgagcgggatggcctctgcggcctgggcaacggctgtgccgacaggaaggaggcggagaccgagtcacagaacagcgagctgtcgggggtcactgcgggtgagtccctggaccagagcatggaggaggaggaggaggaggacacggatgaggatgaccacctcatctacctggaggagatcctggtccgtgtacacactgactactatgccaagtatgaccgctacctcaacaaggagatcgaggaggcgccggacatccgcaagatcgtgccggagctcaagagcaaggtgctggcagacgtggccataattttcagtgggctacacccgacaaacttcccgatagagaagacgcgggagcattaccacgccacggcgctgggagcgaagatcctcactcggctggtgctgagccccgacgcccctgacagggccacgcacctgatcgccgcgcgagctggcacagagaaggtgctgcaggcacaggagtgcggacacctgcacgtggtcaaccctgactggctgtggagctgcctggagcgctgggacaaggtggaggagcagctcttcccgctcagggacgatcacaccaaggcacagagggagaacagccctgcggcctttcccgaccgggagggtgtgccccccaccgccttgttccacccgatgccggttcttcccaaggcccagcctggccccgaggttcggatctacgactccaacacggggaagctcatcaggacgggcgcccgggggcccccagcaccctccagctccctacccatccgccaggagccctcttccttcaggtggacgacatccttggagaaggcagcgacgacagcgacagcgagaagaggaggcctgaggagcaggaggaggagccccagccccggaagccagggacccgcagggagcggacgctcggggcacctgcgtccagcgagaggagcgcggcagggggccgggggcccagaggccacaagaggaagctgaatgaagaggacgccgccagcgagtccagcagggagtccagcaacgaggatgagggcagcagctccgaggccgacgagatggccaaggcgctggaggcggagctcaacgacctcatgtgagcgcgggcagcgggcagggactgaagcctgaccgacctccagcagcactcggacgtccccggaccagccctcagtctcggtccacgctgctttcttcccaaaggacatgtatatttgcagagctccacatacagaaacacattattttgcagaaataggtgtttttaagaagttttactacaggaatgtctacttttgtaagtgacaggtgttaaaggcccaggtgtgctgtgccaaagagctcagcagaggctcacgtggcccaggctggtgcgcccgctgtctcggtaaggggcgggttggtgtgttttccccttgtgtaccagagcacattccttaggggacggctttgggggtcccacgagacatggactaggagtttaagcaggacagtgtgcgtgcacgagctccgagcccagcacagacatgcctggaacccccgccgcctgctgctccctcctagggaacccatttccggggaacgccgtgactgtcgggcagcctggagcttcctgcagcctcctacgcagggtccacgccacgtggcctgggctgccatcctgccgtcctcccactggcatcctggcaagggggcgttgcttttcctgggcggccttttatgtcttggagacacctgatgtaaagtttctgtaaatctatttcatatctgacccaccaaacagatttctctttaataaaaatcctttttgtaa

SEQ ID NO: 229083 - DNA, 2604 bp, Artificial Sequence
  derived and/or modified sequence
atggaggtgcccgccgccggcagagtgcccgccgagggcgcccccaccgccgccgtggccgaggtgagatgccccggccccgcccccctgagactgctggagtggagagtggccgccggcgccgccgtgagaatcggcagcgtgctggccgtgttcgaggccgccgccagcgcccagagcagcggcgccagccagagcagagtggccagcggcggctgcgtgagacccgccagacccgagagaagactgagaagcgagagagccggcgtggtgagagagctgtgcgcccagcccggccaggtggtggcccccggcgccgtgctggtgagactggagggctgcagccaccccgtggtgatgaagggcctgtgcgccgagtgcggccaggacctgacccagctgcagagcaagaacggcaagcagcaggtgcccctgagcaccgccaccgtgagcatggtgcacagcgtgcccgagctgatggtgagcagcgagcaggccgagcagctgggcagagaggaccagcagagactgcacagaaacagaaagctggtgctgatggtggacctggaccagaccctgatccacaccaccgagcagcactgccagcagatgagcaacaagggcatcttccacttccagctgggcagaggcgagcccatgctgcacaccagactgagaccccactgcaaggacttcctggagaagatcgccaagctgtacgagctgcacgtgttcaccttcggcagcagactgtacgcccacaccatcgccggcttcctggaccccgagaagaagctgttcagccacagaatcctgagcagagacgagtgcatcgaccccttcagcaagaccggcaacctgagaaacctgttcccctgcggcgacagcatggtgtgcatcatcgacgacagagaggacgtgtggaagttcgcccccaacctgatcaccgtgaagaagtacgtgtacttccagggcaccggcgacatgaacgccccccccggcagcagagagagccagaccagaaagaaggtgaaccacagcagaggcaccgaggtgagcgagcccagcccccccgtgagagaccccgagggcgtgacccaggcccccggcgtggagcccagcaacggcctggagaagcccgccagagagctgaacggcagcgaggccgccacccccagagacagccccagacccggcaagcccgacgagagagacatctggccccccgcccaggcccccaccagcagccaggagctggccggcgcccccgagccccagggcagctgcgcccagggcggcagagtggcccccggccagagacccgcccagggcgccaccggcaccgacctggacttcgacctgagcagcgacagcgagagcagcagcgagagcgagggcaccaagagcagcagcagcgccagcgacggcgagagcgagggcaagagaggcagacagaagcccaaggccgcccccgagggcgccggcgccctggcccagggcagcagcctggagcccggcagacccgccgcccccagcctgcccggcgaggccgagcccggcgcccacgcccccgacaaggagcccgagctgggcggccaggaggagggcgagagagacggcctgtgcggcctgggcaacggctgcgccgacagaaaggaggccgagaccgagagccagaacagcgagctgagcggcgtgaccgccggcgagagcctggaccagagcatggaggaggaggaggaggaggacaccgacgaggacgaccacctgatctacctggaggagatcctggtgagagtgcacaccgactactacgccaagtacgacagatacctgaacaaggagatcgaggaggcccccgacatcagaaagatcgtgcccgagctgaagagcaaggtgctggccgacgtggccatcatcttcagcggcctgcaccccaccaacttccccatcgagaagaccagagagcactaccacgccaccgccctgggcgccaagatcctgaccagactggtgctgagccccgacgcccccgacagagccacccacctgatcgccgccagagccggcaccgagaaggtgctgcaggcccaggagtgcggccacctgcacgtggtgaaccccgactggctgtggagctgcctggagagatgggacaaggtggaggagcagctgttccccctgagagacgaccacaccaaggcccagagagagaacagccccgccgccttccccgacagagagggcgtgccccccaccgccctgttccaccccatgcccgtgctgcccaaggcccagcccggccccgaggtgagaatctacgacagcaacaccggcaagctgatcagaaccggcgccagaggcccccccgcccccagcagcagcctgcccatcagacaggagcccagcagcttcagatggaccaccagcctggagaaggccgccaccaccgccaccgccagaagaggcggcctgagaagcagaagaagaagccccagccccggcagccagggccccgccggcagcggcagaagcggccacctgagacccgccagaggcgccagacagggcgccggcggccccgaggccaccagaggcagctag

SEQ ID NO: 229084 - protein, 366 aa, Artificial Sequence
  derived and/or modified sequence
MSDYENDDECWSVLEGFRVTLTSVIDPSRITPYLRQCKVLNPDDEEQVLSDPNLVIRKRKVGVLLDILQRTGHKGYVAFLESLELYYPQLYKKVTGKEPARVFSMIIDASGESGLTQLLMTEVMKLQKKVQDLTALLSSKDDFIKELRVKDSLLRKHQERVQRLKEECEAGSRELKRCKEENYDLAMRLAHQSEEKGAALMRNRDLQLEIDQLKHSLMKAEDDCKVERKHTLKLRHAMEQRPSQELLWELQQEKALLQARVQELEASVQEGKLDRSSPYIQVLEEDWRQALRDHQEQANTIFSLRKDLRQGEARRLRCMEEKEMFELQCLALRKDSKMYKDRIEAILLQMEEVAIERDQSTQMEGL

SEQ ID NO: 229085 - protein, 536 aa, Artificial Sequence
  derived and/or modified sequence
MSDYENDDECWSVLEGFRVTLTSVIDPSRITPYLRQCKVLNPDDEEQVLSDPNLVIRKRKVGVLLDILQRTGHKGYVAFLESLELYYPQLYKKVTGKEPARVFSMIIDASGESGLTQLLMTEVMKLQKKVQDLTALLSSKDDFIKELRVKDSLLRKHQERVQRLKEECEAGSRELKRCKEENYDLAMRLAHQSEEKGAALMRNRDLQLEIDQLKHSLMKAEDDCKVERKHTLKLRHAMEQRPSQELLWELQQEKALLQARVQELEASVQEGKLDRSSPYIQVLEEDWRQALRDHQEQANTIFSLRKDLRQGEARRLRCMEEKEMFELQCLALRKDSKMYKDRIEAILLQMEEVAIERDQAIATREELHAQHARGLQEKDALRKQVRELGEKADELQLQVFQCEAQLLAVEGRLRRQQLETLVLSSDLEDGSPRRSQELSLPQDLEDTQLSDKGCLAGGGSPKQPFAALHQEQVLRNPHDAGLSSGEPPEKERRRLKESFENYRRKRALRKMQKGWRQGEEDRENTTGSDNTDTEGS

SEQ ID NO: 229086 - DNA, 1611 bp, Artificial Sequence
  derived and/or modified sequence
atgagcgactacgagaacgatgatgaatgctggagcgtacttgagggatttcgagtgacccttacctcggtgatagatccgagtaggatcactccttacctccggcagtgcaaggttcttaatcccgacgacgaggaacaggtgctaagcgacccaaacctggtaatccgcaaaagaaaagtcggtgtcctgctcgatattctccaacgaacagggcacaaagggtatgtagctttcctggaatcccttgagctctactatccccagctttataagaaagtgacaggtaaggagcctgcaagagtattctctatgatcatcgacgcctctggcgagagcggattgacacagctgctgatgactgaggtgatgaaacttcaaaagaaggtgcaggatctgacagcgctgctgagctctaaagatgactttatcaaggaactgagagtgaaggacagtttgctccgcaagcaccaggaacgcgtccagcgtctgaaggaagaatgcgaggctggatcaagggaactcaagaggtgcaaggaggaaaactacgacctggctatgagactggcacatcagagcgaagaaaaaggcgccgctctgatgagaaatcgggacctacaactagaaattgaccagctgaaacattcgctgatgaaggctgaggatgattgcaaggttgagcggaagcacaccctgaagttgcggcacgcaatggagcagagaccaagccaggagcttctatgggaactccagcaggaaaaggccctcttgcaggcaagagtccaagaactagaagcctccgttcaggaaggcaagctggacagaagttccccatacatacaagtgttagaagaggattggcgacaggcactccgcgaccatcaggagcaggcgaacactattttttccctgcggaaagatttgcgccagggtgaggcacgaaggttaaggtgtatggaagaaaaagagatgtttgagctgcagtgtcttgcccttcgaaaggattccaagatgtacaaggatagaatcgaagccattcttctgcagatggaggaggtcgccattgaacgggaccaggctatagccacccgggaggagctgcacgctcagcacgcccgggggctgcaagaaaaagatgccctgcggaagcaggtgcgggaactgggggagaaggcggacgaactccagttgcaagtgtttcagtgtgaggcacagctgctcgccgtggaaggtaggctgcgtcgccagcagcttgaaactctggtcctgagcagcgatctcgaggacgggtctcctcgcagatcccaggaactgagtctgccccaggaccttgaagatactcagctctccgacaaggggtgtcttgcgggaggcggtagtcccaagcagcccttcgccgccctacaccaggaacaggtgctgaggaacccccacgacgcaggattgagcagcggcgagccaccggaaaaagagcgaaggcgtctgaaggagtcgtttgaaaattatcgccggaagcgcgccctgagaaagatgcagaaaggctggaggcagggcgaggaagaccgcgaaaacaccacaggatctgataacaccgacacagaagggagttag

SEQ ID NO: 229087 - DNA, 1611 bp, Artificial Sequence
  derived and/or modified sequence
atgtctgactatgaaaatgatgatgagtgctggagcgtgctggagggcttccgggtgaccctgacctctgtgattgaccccagccgcatcaccccctacctgcggcagtgcaaggtgctgaacccagatgatgaggagcaggtgctgagtgaccccaacctggtgatcaggaagaggaaggtgggcgtgctgctggacatcctgcagaggacaggccacaagggctacgtggccttcctggagagcctggagctgtactacccccagctgtacaagaaggtgacaggcaaggagcccgcccgggtcttctccatgatcattgatgccagcggggagagcggcctgacccagctgctgatgacagaggtgatgaagctgcagaagaaggtgcaggacctgacagccctgctgagcagcaaggatgacttcatcaaggagctgcgggtgaaggacagcctgctgaggaagcaccaggagcgggtgcagaggctgaaggaggagtgtgaggccggcagccgggagctgaagcgctgcaaggaggagaactatgacctggccatgaggctggcccaccagagcgaggagaagggggccgccctgatgaggaacagagacctgcagctggagattgaccagctgaagcacagcctgatgaaggcagaagatgactgcaaggtggagaggaagcacaccctgaagctgcggcatgccatggagcagaggcccagccaggagctgctgtgggagctgcagcaggagaaggccctgctgcaggcccgggtgcaggagctggaggcctctgtgcaggagggcaagctggacaggagcagcccctacatccaggtgctggaggaggactggaggcaggccctgcgggaccaccaggagcaggccaacaccatcttcagcctgaggaaggacctgcggcagggcgaggcccggcggctgcgctgcatggaggagaaggagatgtttgagctgcagtgcctggccctgaggaaggacagcaagatgtacaaggacagaattgaggccatcctgctgcagatggaggaggtggccatcgagcgggaccaggccatcgccacccgggaggagctgcacgcccagcacgcccggggcctgcaggagaaggatgccctgaggaagcaggtgcgggagctgggggagaaggcagatgagctgcagctgcaggtgttccagtgtgaggcccagctgctggccgtggagggccgcctgcggcggcagcagctggagaccctggtgctgagcagtgacctggaggatggcagccccaggaggagccaggagctgagcctgccccaggacctggaggacacccagctgagtgacaagggctgcctggccggcggcggcagccccaagcagccctttgctgccctgcaccaggagcaggtgctgaggaacccccatgatgctggcctgagcagcggggagcccccagagaaggagcggcggcggctgaaggagagctttgagaactacagaaggaagagggccctgaggaagatgcagaagggctggaggcagggcgaggaggaccgggagaacaccaccggcagtgacaacacagacacagagggcagctag

SEQ ID NO: 229088 - DNA, 1611 bp, Artificial Sequence
  derived and/or modified sequence
atgagcgactacgagaacgacgacgagtgctggagcgtgctggagggatttagagtgacactcacttcggtgatcgatccttccagaattaccccttacctccggcaatgcaaggtactgaacccggatgacgaggagcaggtactctctgatccaaatctcgttattagaaagcgaaaagtcggagtgctgttggacattctccaaaggactggccacaaaggttacgtggcgtttctggagtccctggagctgtattacccccagttatacaagaaagtcacgggaaaagagccagcccgggtgtttagtatgattattgacgcaagcggtgaaagtgggcttacccagttactcatgactgaggtgatgaagttgcaaaagaaggttcaggatctgactgccttgttatcatcaaaggacgacttcatcaaggaactgcgagttaaggattcactgctgcgcaagcatcaagagagagtgcagcgcctgaaggaggaatgcgaggctggcagtcgggaactcaagcggtgtaaggaggaaaactacgacttagccatgagactggctcaccagagtgaagagaagggcgcggctctcatgaggaatcgcgacctccagttagaaatcgaccagctgaagcactccctaatgaaggcggaagacgattgtaaagtggagcggaaacacacattaaaattaagacatgcaatggaacagagaccctcccaggaactcctctgggagttgcagcaggaaaaggcgttgttacaggcaagagtccaggaactcgaagccagtgtgcaggagggcaaattagatagatcttccccttacatccaggtcttagaagaagactggagacaggccctcagagaccaccaggaacaagcaaatacgattttttcacttcggaaagacttacgccaaggcgaggcccgacgactgagatgcatggaagagaaagaaatgtttgagctgcagtgcctcgcactgagaaaagacagcaagatgtacaaggatcggattgaggccatcctgctgcagatggaagaggtcgctatagaaagggatcaagccatcgccactcgggaggagctccatgcgcagcatgccaggggactgcaggagaaagacgccttaaggaagcaggtgagagaacttggtgaaaaggccgatgagctccagctgcaggtttttcagtgcgaagcccaactcctggccgtagagggtcggctgagacggcagcagctcgagactctggtgttaagctctgaccttgaggatggttcaccccgtcgcagccaagaacttagcctaccgcaggaccttgaggacacacagctttctgataagggttgcctggcaggcggcggttctcctaagcagccatttgccgcactgcaccaggagcaggtcttaaggaacccacatgacgccgggttgtcctccggggaacccccggaaaaagaacgtcgccgactgaaggaatccttcgagaattatagacggaaacgggcacttaggaagatgcaaaaaggctggcggcagggtgaagaagatcgtgagaacaccactgggagtgataacacagacacagaagggtcgtag

SEQ ID NO: 229089 - DNA, 1611 bp, Artificial Sequence
  derived and/or modified sequence
atgtcagactacgaaaacgacgacgagtgctggtccgtgttggaagggttccgggtgacgttaactagcgtcattgatccatcccgaattactccatatctccgacagtgcaaggtgctgaaccccgacgatgaggaacaggtgctcagcgaccctaacctcgtgatccgcaagcgcaaggtcggcgtcttgctcgatattctacagcgcacaggccacaagggctatgtcgcttttttagagtctcttgagctgtactatccacagctctacaagaaagtgacaggaaaagagcctgctagagtattttcgatgatcatcgacgcttctggggaaagtggcctgactcaactgctcatgactgaggtgatgaaactgcagaagaaagtccaggacttgacagccttattgagctctaaggatgacttcatcaaagaacttcgggtgaaagacagcttactccggaaacatcaagagagagtgcaaagactgaaggaggaatgtgaggctgggtcgagggaactcaagaggtgcaaggaggaaaattacgatctggccatgagactagctcaccagtcagaagagaagggagcagcactgatgagaaatagggacctgcaactggagatagaccagctaaagcactctttgatgaaggctgaagacgactgtaaagtagaaaggaagcatacactgaagttacgccatgccatggagcagagaccttctcaggaactactctgggaattacaacaggaaaaagctctgctgcaggccagagtccaggaactggaggccagtgtgcaagagggtaagttagataggtcatcgccgtacatacaagtgctggaagaagattggagacaagccctgcgagatcaccaggagcaggcaaacactattttcagcttacggaaggacctccgtcaaggggaagcacggagacttcgttgtatggaagaaaaagagatgttcgaactccagtgtcttgccttacggaaagattccaagatgtacaaagaccgtatcgaagccattctgctgcagatggaggaagtggctatagagcgcgatcaggccattgctacgagagaggagctgcacgctcaacacgcaagggggcttcaggagaaggacgccctcaggaagcaggtgagagagcttggcgagaaagctgacgagttacagttacaggtgtttcagtgcgaggcccaactacttgccgtcgagggtaggctgaggcgtcagcagctggagacactcgtcctctcttctgatctcgaagacggatctccaagacgtagtcaggaactctctctgccccaagacctggaggacacccagttatcggataagggctgcctcgctggaggcggtagtccaaaacagccctttgctgccctgcatcaggagcaggtactccggaaccctcacgatgctgggctgagctctggcgaaccacctgaaaaggaacggaggagactcaaggagtcattcgagaattacagaaggaaacgtgcattgcgaaagatgcagaaaggttggagacagggggaggaggatcgagaaaatactacgggatcagacaatactgataccgagggctcttag

SEQ ID NO: 229090 - DNA, 2123 bp, Artificial Sequence
  derived and/or modified sequence
gactgtggagttaagcagaacccatcaggaagtgcacaggcgtccggcgtgctcctccctccctgcagccccgggcagcatctcccagaggctccgcggcccaggctcctggtgtgtctgcagtgcaggtggctcctggaagaccctcagcctgcctgctgaggccatgtcggactacgagaacgatgacgagtgctggagcgtcctggagggcttccgggtgacgctcacctcggtcatcgacccctcacgcatcacaccttacctgcggcagtgcaaggtcctgaaccccgatgatgaggagcaggtgctcagcgaccccaacctggtcatccgcaaacggaaagtgggtgtgctcctggacatcctgcagcggaccggccacaagggctacgtggccttcctcgagagcctggagctctactacccgcagctgtacaagaaggtcacaggcaaggagccggcccgcgtcttctccatgatcatcgacgcgtccggggagtcaggcctgactcagctgctgatgactgaggtcatgaagctgcagaagaaggtgcaggacctgaccgcgctgctgagctccaaagatgacttcatcaaggagctgcgggtgaaggacagcctgctgcgcaagcaccaggagcgtgtgcagaggctcaaggaggagtgcgaggccggcagccgcgagctcaagcgctgcaaggaggagaactacgacctggccatgcgcctggcgcaccagagtgaggagaagggcgccgcgctcatgcggaaccgtgacctgcagctggagattgaccagctcaagcacagcctcatgaaggccgaggacgactgcaaggtggagcgcaagcacacgctgaagctcaggcacgccatggagcagcggcccagccaggagctgctgtgggagctgcagcaggagaaggccctgctccaggcccgggtgcaggagctggaggcctccgtccaggaggggaagctggacaggagcagcccctacatccaggtactggaggaggactggcggcaggcgctgcgggaccaccaggagcaggccaacaccatcttctccctgcgcaaggacctccgccagggcgaggcccgacgcctccggtgcatggaggagaaggagatgttcgagctgcagtgcctggcactacgtaaggactccaagatgtacaaggaccgcatcgaggccatcctgctgcagatggaggaggtcgccattgagcgggaccaggccatagccacgcgggaggagctgcacgcacagcacgcccggggcctgcaggagaaggacgcgctgcgcaagcaggtgcgggagctgggcgagaaggcggatgagctgcagctgcaggtgttccagtgtgaggcgcagctactggccgtggagggcaggctcaggcggcagcagctggagacgctcgtcctgagctccgacctggaagatggctcacccaggaggtcccaggagctctcactcccccaggacctggaggacacccagctctcagacaaaggctgccttgccggcggggggagcccgaaacagccctttgcagctctgcaccaggagcaggttttgcggaacccccatgacgcaggcctgagcagcggggagccgcccgagaaggagcggcggcgcctcaaagagagttttgagaactaccgcaggaagcgcgccctcaggaagatgcagaaaggatggcggcagggggaggaggaccgggagaacaccacgggcagcgacaacaccgacactgagggctcctagccgcagcagcgcaggccccgaccagggcacacccaccggcccggcctcctgccacccgggggtgccgacgccctggggcgcagacttccccgagccgtcgctgacttggcctggaacgaggaatctggtgccctgaaaggcccagccggactgccgggcattggggccgtttgttaagcggcactcattttgcggaggccatgcgggtgctcaccacccccatgcacacgccatctgtgtaacttcaggatctgttctgtttcaccatgtaacacacaatacatgcatgcattgtattagtgttagaaaacacagctgcgtaaataaacagcacgggtgacccgca

SEQ ID NO: 229091 - DNA, 1611 bp, Artificial Sequence
  derived and/or modified sequence
atgagcgactacgagaacgacgacgagtgctggagcgtgctggagggcttcagagtgaccctgaccagcgtgatcgaccccagcagaatcaccccctacctgagacagtgcaaggtgctgaaccccgacgacgaggagcaggtgctgagcgaccccaacctggtgatcagaaagagaaaggtgggcgtgctgctggacatcctgcagagaaccggccacaagggctacgtggccttcctggagagcctggagctgtactacccccagctgtacaagaaggtgaccggcaaggagcccgccagagtgttcagcatgatcatcgacgccagcggcgagagcggcctgacccagctgctgatgaccgaggtgatgaagctgcagaagaaggtgcaggacctgaccgccctgctgagcagcaaggacgacttcatcaaggagctgagagtgaaggacagcctgctgagaaagcaccaggagagagtgcagagactgaaggaggagtgcgaggccggcagcagagagctgaagagatgcaaggaggagaactacgacctggccatgagactggcccaccagagcgaggagaagggcgccgccctgatgagaaacagagacctgcagctggagatcgaccagctgaagcacagcctgatgaaggccgaggacgactgcaaggtggagagaaagcacaccctgaagctgagacacgccatggagcagagacccagccaggagctgctgtgggagctgcagcaggagaaggccctgctgcaggccagagtgcaggagctggaggccagcgtgcaggagggcaagctggacagaagcagcccctacatccaggtgctggaggaggactggagacaggccctgagagaccaccaggagcaggccaacaccatcttcagcctgagaaaggacctgagacagggcgaggccagaagactgagatgcatggaggagaaggagatgttcgagctgcagtgcctggccctgagaaaggacagcaagatgtacaaggacagaatcgaggccatcctgctgcagatggaggaggtggccatcgagagagaccaggccatcgccaccagagaggagctgcacgcccagcacgccagaggcctgcaggagaaggacgccctgagaaagcaggtgagagagctgggcgagaaggccgacgagctgcagctgcaggtgttccagtgcgaggcccagctgctggccgtggagggcagactgagaagacagcagctggagaccctggtgctgagcagcgacctggaggacggcagccccagaagaagccaggagctgagcctgccccaggacctggaggacacccagctgagcgacaagggctgcctggccggcggcggcagccccaagcagcccttcgccgccctgcaccaggagcaggtgctgagaaacccccacgacgccggcctgagcagcggcgagccccccgagaaggagagaagaagactgaaggagagcttcgagaactacagaagaaagagagccctgagaaagatgcagaagggctggagacagggcgaggaggacagagagaacaccaccggcagcgacaacaccgacaccgagggcagctag

SEQ ID NO: 229092 - protein, 492 aa, Artificial Sequence
  derived and/or modified sequence
MSDYENDDECWSVLEGFRVTLTSVIDPSRITPYLRQCKVLNPDDEEQVLSDPNLVIRKRKVGVLLDILQRTGHKGYVAFLESLELYYPQLYKKVTGKEPARVFSMIIDASGESGLTQLLMTEVMKLQKKVQDLTALLSSKDDFIKELRVKDSLLRKHQERVQRLKEECEAGSRELKRCKEENYDLAMRLAHQSEEKGAALMRNRDLQLEIDQLKHSLMKAEDDCKVERKHTLKLRHAMEQRPSQELLWELQQEKALLQARVQELEASVQEGKLDRSSPYIQVLEEDWRQALRDHQEQANTIFSLRKDLRQGEARRLRCMEEKEMFELQCLALRKDSKMYKDRIEAILLQMEEVAIERDQAIATREELHAQHARGLQEKDALRKQVRELGEKADELQLQVFQCEAQLLAVEGRLRRQQLETLVLSSDLEDGSPRRSQELSLPQDLEDTQLSDKGCLAGGGSPKQPFAALHQEQVLRNPHDAGPAGLPGIGAVC

SEQ ID NO: 229093 - DNA, 1101 bp, Artificial Sequence
  derived and/or modified sequence
atgtccgactacgagaatgatgatgaatgctggtcagtcctggaaggcttcagggtaaccctgacatccgtgatagacccttcacgcattactccgtacctgagacagtgtaaggtactgaaccccgacgatgaggaacaggtattgtcagacccaaatcttgtgatccgtaagagaaaagttggcgtcctgctggacatcctgcagcgcactggccacaagggttacgtggcttttttggagagtctggaactgtattatcctcagttgtacaagaaagtgacaggtaaagagccagcccgggtgttttccatgattattgatgcatccggcgagagcggcttgacccagctgctgatgactgaagtgatgaaattgcagaaaaaggtacaagatctgaccgctctcctgtctagcaaggatgattttatcaaggagcttcgggtgaaagactctctactgaggaaacatcaagaaagggtgcagaggctgaaggaggagtgtgaggccggcagtcgagaactcaaaagatgcaaagaggagaattacgatctggccatgcgccttgcacatcagagcgaggagaaaggagcggctttgatgagaaatcgcgatctgcaattggaaattgatcagctaaagcatagcttaatgaaggcagaggacgactgtaaggtggaacggaaacacacgcttaagttgaggcacgctatggagcagagaccctctcaggagctgctgtgggaacttcagcaggaaaaggccctgctgcaagcccgcgtacaggagcttgaggcgagcgtacaggaggggaagttggataggagctctccctacatccaggttctggaggaggattggcgccaagcactcagggaccatcaggagcaagccaacacaatcttctctctgcgcaaggacttgcgccaaggcgaggcacgaagattgcggtgcatggaggagaaagagatgttcgaactccagtgtctggcgttgcggaaggatagtaaaatgtacaaggataggatcgaggctatccttctgcagatggaggaagtagcaatagaacgggaccagtccactcagatggagggcctatag

SEQ ID NO: 229094 - DNA, 1479 bp, Artificial Sequence
  derived and/or modified sequence
atgtccgactatgagaacgatgatgaatgctggagcgtgctggaggggttcagggtcaccctgacatcggtgatagacccgagtcggatcaccccttacctgaggcaatgcaaggtgctaaaccctgatgacgaagagcaagtcttaagtgaccccaacctagtgatcaggaaacgtaaggtaggtgttctgctcgacattctgcagagaaccggtcataagggctatgtggcatttttagaatccctggagctgtactaccctcaattatataagaaggtcaccggaaaggagccggcgcgggtgttcagcatgatcatcgacgcctcaggtgagtcaggcttgacccaactgttaatgacagaggtaatgaagctgcagaagaaggtccaagatcttaccgctcttctgtcctccaaggatgacttcataaaggagcttagggttaaagattccttgctccgcaagcatcaggagagggtgcagagacttaaagaagagtgcgaagcagggtctagggagctgaagagatgtaaggaagaaaattatgatctcgccatgcggctcgcccatcaatctgaagagaagggggcggcactgatgcgaaatagggatctccagctcgaaatagatcagctgaagcacagtcttatgaaagcagaggatgactgcaaggtggaacggaagcataccctcaaactccgccacgctatggagcagcggccgtcccaagagctgctctgggagctccagcaagaaaaggcgctcttgcaagcaagggtccaagagctagaggcctccgtccaggaggggaaactggacaggagtagcccctatattcaggttctggaagaagattggcgacaggccttgcgggatcaccaggaacaggcgaatactatttttagtctcaggaaggatctgcgtcagggggaagcaagacgcctgaggtgcatggaggaaaaggaaatgttcgaactgcaatgccttgcgttaaggaaagattcgaagatgtataaggacagaattgaagcaattctcctacaaatggaggaggtagcgatcgagcgggatcaggcgatcgcaacacgggaggaacttcatgcgcaacacgcacgggggttacaggagaaggacgcactgcgcaaacaggtgagggaactgggcgaaaaagccgatgaacttcagctccaggtctttcagtgtgaggcgcaacttcttgctgtagagggtagactcagaaggcagcagctcgagacactcgtgctctccagtgatctcgaagacggcagtcctagacgatctcaagagctgtctttgccacaagatttggaagatacccaactgagcgataagggttgcctcgctgggggggggtcgcctaagcagccgttcgcagccctgcatcaggagcaggtgctgagaaatccccatgatgcaggacctgccggactgcctggaataggggcagtgtgttag

SEQ ID NO: 229095 - DNA, 1101 bp, Artificial Sequence
  derived and/or modified sequence
atgtctgactatgaaaatgatgatgagtgctggagcgtgctggagggcttccgggtgaccctgacctctgtgattgaccccagccgcatcaccccctacctgcggcagtgcaaggtgctgaacccagatgatgaggagcaggtgctgagtgaccccaacctggtgatcaggaagaggaaggtgggcgtgctgctggacatcctgcagaggacaggccacaagggctacgtggccttcctggagagcctggagctgtactacccccagctgtacaagaaggtgacaggcaaggagcccgcccgggtcttctccatgatcattgatgccagcggggagagcggcctgacccagctgctgatgacagaggtgatgaagctgcagaagaaggtgcaggacctgacagccctgctgagcagcaaggatgacttcatcaaggagctgcgggtgaaggacagcctgctgaggaagcaccaggagcgggtgcagaggctgaaggaggagtgtgaggccggcagccgggagctgaagcgctgcaaggaggagaactatgacctggccatgaggctggcccaccagagcgaggagaagggggccgccctgatgaggaacagagacctgcagctggagattgaccagctgaagcacagcctgatgaaggcagaagatgactgcaaggtggagaggaagcacaccctgaagctgcggcatgccatggagcagaggcccagccaggagctgctgtgggagctgcagcaggagaaggccctgctgcaggcccgggtgcaggagctggaggcctctgtgcaggagggcaagctggacaggagcagcccctacatccaggtgctggaggaggactggaggcaggccctgcgggaccaccaggagcaggccaacaccatcttcagcctgaggaaggacctgcggcagggcgaggcccggcggctgcgctgcatggaggagaaggagatgtttgagctgcagtgcctggccctgaggaaggacagcaagatgtacaaggacagaattgaggccatcctgctgcagatggaggaggtggccatcgagcgggaccagagcacccagatggagggcctgtag

SEQ ID NO: 229096 - DNA, 1479 bp, Artificial Sequence
  derived and/or modified sequence
atgtctgactatgaaaatgatgatgagtgctggagcgtgctggagggcttccgggtgaccctgacctctgtgattgaccccagccgcatcaccccctacctgcggcagtgcaaggtgctgaacccagatgatgaggagcaggtgctgagtgaccccaacctggtgatcaggaagaggaaggtgggcgtgctgctggacatcctgcagaggacaggccacaagggctacgtggccttcctggagagcctggagctgtactacccccagctgtacaagaaggtgacaggcaaggagcccgcccgggtcttctccatgatcattgatgccagcggggagagcggcctgacccagctgctgatgacagaggtgatgaagctgcagaagaaggtgcaggacctgacagccctgctgagcagcaaggatgacttcatcaaggagctgcgggtgaaggacagcctgctgaggaagcaccaggagcgggtgcagaggctgaaggaggagtgtgaggccggcagccgggagctgaagcgctgcaaggaggagaactatgacctggccatgaggctggcccaccagagcgaggagaagggggccgccctgatgaggaacagagacctgcagctggagattgaccagctgaagcacagcctgatgaaggcagaagatgactgcaaggtggagaggaagcacaccctgaagctgcggcatgccatggagcagaggcccagccaggagctgctgtgggagctgcagcaggagaaggccctgctgcaggcccgggtgcaggagctggaggcctctgtgcaggagggcaagctggacaggagcagcccctacatccaggtgctggaggaggactggaggcaggccctgcgggaccaccaggagcaggccaacaccatcttcagcctgaggaaggacctgcggcagggcgaggcccggcggctgcgctgcatggaggagaaggagatgtttgagctgcagtgcctggccctgaggaaggacagcaagatgtacaaggacagaattgaggccatcctgctgcagatggaggaggtggccatcgagcgggaccaggccatcgccacccgggaggagctgcacgcccagcacgcccggggcctgcaggagaaggatgccctgaggaagcaggtgcgggagctgggggagaaggcagatgagctgcagctgcaggtgttccagtgtgaggcccagctgctggccgtggagggccgcctgcggcggcagcagctggagaccctggtgctgagcagtgacctggaggatggcagccccaggaggagccaggagctgagcctgccccaggacctggaggacacccagctgagtgacaagggctgcctggccggcggcggcagccccaagcagccctttgctgccctgcaccaggagcaggtgctgaggaacccccatgatgctggccctgctggcctgcccggcatcggggctgtgtgctag

SEQ ID NO: 229097 - DNA, 1101 bp, Artificial Sequence
  derived and/or modified sequence
atgagcgactacgagaacgacgacgagtgctggagcgtgctggagggctttcgagtcaccctcactagtgtgatagatccaagccgcataacaccctatctgcgacaatgtaaagtcctgaacccggacgacgaagaacaggtcttgtcggaccctaacctggtgattcgcaaacgaaaggtcggagtactcctcgacatccttcaaaggaccggccacaaaggatacgtggccttccttgagtctctggaactctattaccctcagctctataagaaagtcactgggaaagaacccgcccgtgtgtttagtatgatcatcgacgcctctggggagtccggtcttacacaactgctgatgacagaggtgatgaaattgcagaaaaaagtgcaggatctgacggctctgctttcaagcaaggatgattttataaaggagttgagagtgaaagattccttgcttagaaagcatcaggaaagagtgcaacgattgaaagaggagtgtgaggccggatctagagaactgaagaggtgcaaagaggagaattacgacctagccatgcgccttgcccatcagagtgaggagaagggagccgctctcatgaggaacagggatttacagctggagatcgatcagctgaaacactctctgatgaaagcggaagatgattgcaaagtcgagaggaagcatacccttaagctgagacacgcaatggaacagcggccgagccaggaacttttgtgggaactgcagcaggagaaggcccttctgcaagcaagggtacaggaacttgaagccagtgtgcaggaggggaaactggaccgttccagtccctacattcaggtactggaggaagattggcggcaggccctgcgggatcatcaggagcaggccaacacaatcttcagcttaaggaaagacctccgccagggagaagcccgacgccttaggtgcatggaagagaaggaaatgtttgagctgcagtgtctggcgctcaggaaagattctaagatgtacaaagatcgcatagaggcaatcctgctccagatggaagaagtcgctattgagcgcgaccagagcacacagatggaaggactttag

SEQ ID NO: 229098 - DNA, 1479 bp, Artificial Sequence
  derived and/or modified sequence
atgagcgactacgagaacgacgacgagtgctggagcgtgctggaggggttcagagttaccctcactagcgtgatcgatccaagtcggattaccccatacctgcgacaatgtaaagttctgaaccccgacgatgaggagcaggtattgagcgatcctaacctggtcatccgaaagcgaaaggttggtgtgctgctggatatactccaaaggacaggtcataagggctacgtggcctttctggagtctctggagctgtactatccccagctgtataagaaggtgaccggcaaggagccggctagagttttctcaatgattatcgatgcttcaggcgagagcgggctcactcagctgcttatgactgaggtgatgaaactccaaaaaaaggttcaggacctcacagcactgctatccagtaaggatgacttcattaaggagttacgggttaaggactcgctgctgcgcaagcatcaggagagggtgcagagactcaaggaggagtgcgaagccggtagtagggaattaaaacgatgcaaggaggaaaactatgacctcgccatgcgcctggcccaccagagcgaagagaaaggagccgcattgatgcggaacagagacctccaactcgaaatcgatcaactaaaacattctctcatgaaggctgaagacgactgtaaagtcgagcgcaagcacaccctgaaactccgacacgcgatggaacagcgcccgtcccaggaactcctatgggagcttcaacaggaaaaagccctgctgcaggcacgggtgcaggagcttgaggcctcagtgcaagagggcaaacttgaccgctcgtctccttatattcaggtgcttgaggaagactggcggcaggccctgcgggaccaccaggagcaggcaaacactatcttttccctgcggaaggatctgcgtcaaggcgaagcgaggcgtctccgttgtatggaggagaaagaaatgtttgagctccagtgccttgctctgcggaaggacagcaagatgtataaagataggatcgaagccatcctcttgcagatggaagaggttgccatagagcgggaccaagctatcgccactcgggaagaactccacgcacaacatgctcgcggattacaagaaaaggacgcactgagaaaacaagtccgggagcttggggaaaaggccgatgaactccagctgcaagtatttcagtgcgaggctcaattgctcgccgtagaaggcaggctgagaagacagcaactcgagacattggtgctgtcaagcgatctggaggacgggagccctagaagatcgcaggaattgagcttgccccaggacctggaagatacacagctctcggataagggctgcttggccggcgggggcagtcctaagcaacctttcgccgctctccaccaggaacaggtcctccggaatccgcatgatgcaggtcctgccgggctgccaggaataggagccgtgtgctag

SEQ ID NO: 229099 - DNA, 1101 bp, Artificial Sequence
  derived and/or modified sequence
atgtcagactatgaaaatgacgacgaatgttggagtgtcctagagggatttagagtgacactcacaagcgtgattgaccccagccggattaccccatacctcagacaatgtaaggttttaaatcctgatgacgaagagcaggtccttagtgaccctaatctcgtaatccggaaaagaaaagtgggagttttacttgacatcctgcagcggacggggcacaagggttacgtcgcctttctagaatcacttgagctgtattacccacaactctataaaaaagtgactggcaaggagccagcccgtgtgttttcaatgattattgacgctagcggggaatcaggtctcacacagctcttgatgaccgaggtgatgaagctgcaaaaaaaagtgcaagacctaactgctctgctctcatctaaggatgacttcattaaggaattacgcgtgaaggactcgttactgaggaagcaccaagagagagtgcagagactaaaagaagaatgtgaggctggtagtcgtgagttgaagcgttgtaaggaggaaaattatgacttggcgatgcggctcgcccatcaatccgaagagaaaggggcagcactaatgcggaacagggatctgcagctagaaatcgaccagctcaagcattccttaatgaaggccgaagatgactgcaaagtagaaagaaagcacactctgaaactgaggcacgccatggaacagcggccttcgcaggagctgctttgggagcttcagcaggagaaggccctactgcaggccagggtgcaagagttagaggctagcgtgcaggagggcaagctggacaggtcctccccatatatccaggtgctggaggaagactggcggcaggcccttagagaccatcaggaacaggccaataccatcttttccctgagaaaggacctaaggcaaggagaagctagaagacttcggtgcatggaagaaaaagaaatgtttgagctgcaatgtttagcccttcgaaaagatagcaagatgtataaggaccgcatagaggcaattctcctgcagatggaagaggtggctatcgaaagagatcagtccacccagatggaggggctctag

SEQ ID NO: 229100 - DNA, 1479 bp, Artificial Sequence
  derived and/or modified sequence
atgtccgattacgagaatgatgatgaatgctggtctgtcttggaggggttccgagttaccctgacttccgtgattgatccatcccgcataaccccttacctcagacaatgcaaagtgcttaatcctgacgacgaggagcaagtgctgtccgatcccaacctggtgattcggaaacgaaaggtgggcgtgcttttggacattttacagaggacaggccataagggctatgtcgccttcctagagtccttagagctctattaccctcagctttataagaaagtcaccggcaaggaacctgccagagtcttctccatgatcatcgacgcgtcaggcgaatccgggttaacccagctcctgatgacagaagtgatgaaactccagaaaaaagtgcaggacttgactgccctgctttctagcaaggatgactttataaaagagctgcgcgtgaaggactccctgctccgtaaacatcaggagagggtgcagcgcctgaaggaggagtgcgaggccggatctcgcgagttgaagcggtgcaaagaggagaattacgatctggctatgaggcttgctcaccaatccgaggagaaaggagccgctctgatgcgcaaccgggatctgcagctagaaattgaccagctgaaacatagcttaatgaaagccgaggacgattgcaaggtggaaaggaagcatacgctgaaacttaggcatgccatggaacaacgcccttcacaggagctgctgtgggagttgcagcaggaaaaggcactgctccaggcacgagtgcaggaactggaagcatccgtccaggaggggaaattagaccggagctcgccttacattcaggttcttgaagaagactggcggcaggcactgcgcgaccaccaggagcaggcgaacacaatcttcagcctgaggaaggacctgaggcagggcgaagcacggcgactgcgatgcatggaagaaaaggagatgtttgaactccaatgtcttgctttaaggaaagatagcaagatgtacaaagatcggattgaagccatcctcctgcagatggaagaagtggccattgaaagagaccaggctattgccacacgcgaggaactccatgcacagcatgcccgaggtctgcaggagaaggatgcactgaggaagcaggtacgggaattgggagaaaaggcggatgagcttcaactgcaggtcttccaatgcgaagcccagctccttgccgtcgaaggacgtctgagacgccagcagttggagactttagtcctgtcctccgatctggaagatggctcgccccgaaggtctcaggagttgagcttgcctcaggatctggaagacacacagctgagcgacaagggttgccttgccggtggcggatctccaaagcagcctttcgccgctctccatcaggaacaagtgcttaggaatccccacgacgccggaccggcagggctgcctggtattggcgctgtgtgctag

SEQ ID NO: 229101 - DNA, 1267 bp, Artificial Sequence
  derived and/or modified sequence
gactgtggagttaagcagaacccatcaggaagtgcacaggcgtccggcgtgctcctccctccctgcagccccgggcagcatctcccagaggctccgcggcccaggctcctggtgtgtctgcagtgcaggtggctcctggaagaccctcagcctgcctgctgaggccatgtcggactacgagaacgatgacgagtgctggagcgtcctggagggcttccgggtgacgctcacctcggtcatcgacccctcacgcatcacaccttacctgcggcagtgcaaggtcctgaaccccgatgatgaggagcaggtgctcagcgaccccaacctggtcatccgcaaacggaaagtgggtgtgctcctggacatcctgcagcggaccggccacaagggctacgtggccttcctcgagagcctggagctctactacccgcagctgtacaagaaggtcacaggcaaggagccggcccgcgtcttctccatgatcatcgacgcgtccggggagtcaggcctgactcagctgctgatgactgaggtcatgaagctgcagaagaaggtgcaggacctgaccgcgctgctgagctccaaagatgacttcatcaaggagctgcgggtgaaggacagcctgctgcgcaagcaccaggagcgtgtgcagaggctcaaggaggagtgcgaggccggcagccgcgagctcaagcgctgcaaggaggagaactacgacctggccatgcgcctggcgcaccagagtgaggagaagggcgccgcgctcatgcggaaccgtgacctgcagctggagattgaccagctcaagcacagcctcatgaaggccgaggacgactgcaaggtggagcgcaagcacacgctgaagctcaggcacgccatggagcagcggcccagccaggagctgctgtgggagctgcagcaggagaaggccctgctccaggcccgggtgcaggagctggaggcctccgtccaggaggggaagctggacaggagcagcccctacatccaggtactggaggaggactggcggcaggcgctgcgggaccaccaggagcaggccaacaccatcttctccctgcgcaaggacctccgccagggcgaggcccgacgcctccggtgcatggaggagaaggagatgttcgagctgcagtgcctggcactacgtaaggactccaagatgtacaaggaccgcatcgaggccatcctgctgcagatggaggaggtcgccattgagcgggaccagagcacacaaatggaggggctgtga

SEQ ID NO: 229102 - DNA, 1814 bp, Artificial Sequence
  derived and/or modified sequence
gactgtggagttaagcagaacccatcaggaagtgcacaggcgtccggcgtgctcctccctccctgcagccccgggcagcatctcccagaggctccgcggcccaggctcctggtgtgtctgcagtgcaggtggctcctggaagaccctcagcctgcctgctgaggccatgtcggactacgagaacgatgacgagtgctggagcgtcctggagggcttccgggtgacgctcacctcggtcatcgacccctcacgcatcacaccttacctgcggcagtgcaaggtcctgaaccccgatgatgaggagcaggtgctcagcgaccccaacctggtcatccgcaaacggaaagtgggtgtgctcctggacatcctgcagcggaccggccacaagggctacgtggccttcctcgagagcctggagctctactacccgcagctgtacaagaaggtcacaggcaaggagccggcccgcgtcttctccatgatcatcgacgcgtccggggagtcaggcctgactcagctgctgatgactgaggtcatgaagctgcagaagaaggtgcaggacctgaccgcgctgctgagctccaaagatgacttcatcaaggagctgcgggtgaaggacagcctgctgcgcaagcaccaggagcgtgtgcagaggctcaaggaggagtgcgaggccggcagccgcgagctcaagcgctgcaaggaggagaactacgacctggccatgcgcctggcgcaccagagtgaggagaagggcgccgcgctcatgcggaaccgtgacctgcagctggagattgaccagctcaagcacagcctcatgaaggccgaggacgactgcaaggtggagcgcaagcacacgctgaagctcaggcacgccatggagcagcggcccagccaggagctgctgtgggagctgcagcaggagaaggccctgctccaggcccgggtgcaggagctggaggcctccgtccaggaggggaagctggacaggagcagcccctacatccaggtactggaggaggactggcggcaggcgctgcgggaccaccaggagcaggccaacaccatcttctccctgcgcaaggacctccgccagggcgaggcccgacgcctccggtgcatggaggagaaggagatgttcgagctgcagtgcctggcactacgtaaggactccaagatgtacaaggaccgcatcgaggccatcctgctgcagatggaggaggtcgccattgagcgggaccaggccatagccacgcgggaggagctgcacgcacagcacgcccggggcctgcaggagaaggacgcgctgcgcaagcaggtgcgggagctgggcgagaaggcggatgagctgcagctgcaggtgttccagtgtgaggcgcagctactggccgtggagggcaggctcaggcggcagcagctggagacgctcgtcctgagctccgacctggaagatggctcacccaggaggtcccaggagctctcactcccccaggacctggaggacacccagctctcagacaaaggctgccttgccggcggggggagcccgaaacagccctttgcagctctgcaccaggagcaggttttgcggaacccccatgacgcaggcccagccggactgccgggcattggggccgtttgttaagcggcactcattttgcggaggccatgcgggtgctcaccacccccatgcacacgccatctgtgtaacttcaggatctgttctgtttcaccatgtaacacacaatacatgcatgcattgtattagtgttagaaaacacagctgcgtaaataaacagcacgggtgacccgca

SEQ ID NO: 229103 - DNA, 1101 bp, Artificial Sequence
  derived and/or modified sequence
atgagcgactacgagaacgacgacgagtgctggagcgtgctggagggcttcagagtgaccctgaccagcgtgatcgaccccagcagaatcaccccctacctgagacagtgcaaggtgctgaaccccgacgacgaggagcaggtgctgagcgaccccaacctggtgatcagaaagagaaaggtgggcgtgctgctggacatcctgcagagaaccggccacaagggctacgtggccttcctggagagcctggagctgtactacccccagctgtacaagaaggtgaccggcaaggagcccgccagagtgttcagcatgatcatcgacgccagcggcgagagcggcctgacccagctgctgatgaccgaggtgatgaagctgcagaagaaggtgcaggacctgaccgccctgctgagcagcaaggacgacttcatcaaggagctgagagtgaaggacagcctgctgagaaagcaccaggagagagtgcagagactgaaggaggagtgcgaggccggcagcagagagctgaagagatgcaaggaggagaactacgacctggccatgagactggcccaccagagcgaggagaagggcgccgccctgatgagaaacagagacctgcagctggagatcgaccagctgaagcacagcctgatgaaggccgaggacgactgcaaggtggagagaaagcacaccctgaagctgagacacgccatggagcagagacccagccaggagctgctgtgggagctgcagcaggagaaggccctgctgcaggccagagtgcaggagctggaggccagcgtgcaggagggcaagctggacagaagcagcccctacatccaggtgctggaggaggactggagacaggccctgagagaccaccaggagcaggccaacaccatcttcagcctgagaaaggacctgagacagggcgaggccagaagactgagatgcatggaggagaaggagatgttcgagctgcagtgcctggccctgagaaaggacagcaagatgtacaaggacagaatcgaggccatcctgctgcagatggaggaggtggccatcgagagagaccagagcacccagatggagggcctgtag

SEQ ID NO: 229104 - DNA, 1479 bp, Artificial Sequence
  derived and/or modified sequence
atgagcgactacgagaacgacgacgagtgctggagcgtgctggagggcttcagagtgaccctgaccagcgtgatcgaccccagcagaatcaccccctacctgagacagtgcaaggtgctgaaccccgacgacgaggagcaggtgctgagcgaccccaacctggtgatcagaaagagaaaggtgggcgtgctgctggacatcctgcagagaaccggccacaagggctacgtggccttcctggagagcctggagctgtactacccccagctgtacaagaaggtgaccggcaaggagcccgccagagtgttcagcatgatcatcgacgccagcggcgagagcggcctgacccagctgctgatgaccgaggtgatgaagctgcagaagaaggtgcaggacctgaccgccctgctgagcagcaaggacgacttcatcaaggagctgagagtgaaggacagcctgctgagaaagcaccaggagagagtgcagagactgaaggaggagtgcgaggccggcagcagagagctgaagagatgcaaggaggagaactacgacctggccatgagactggcccaccagagcgaggagaagggcgccgccctgatgagaaacagagacctgcagctggagatcgaccagctgaagcacagcctgatgaaggccgaggacgactgcaaggtggagagaaagcacaccctgaagctgagacacgccatggagcagagacccagccaggagctgctgtgggagctgcagcaggagaaggccctgctgcaggccagagtgcaggagctggaggccagcgtgcaggagggcaagctggacagaagcagcccctacatccaggtgctggaggaggactggagacaggccctgagagaccaccaggagcaggccaacaccatcttcagcctgagaaaggacctgagacagggcgaggccagaagactgagatgcatggaggagaaggagatgttcgagctgcagtgcctggccctgagaaaggacagcaagatgtacaaggacagaatcgaggccatcctgctgcagatggaggaggtggccatcgagagagaccaggccatcgccaccagagaggagctgcacgcccagcacgccagaggcctgcaggagaaggacgccctgagaaagcaggtgagagagctgggcgagaaggccgacgagctgcagctgcaggtgttccagtgcgaggcccagctgctggccgtggagggcagactgagaagacagcagctggagaccctggtgctgagcagcgacctggaggacggcagccccagaagaagccaggagctgagcctgccccaggacctggaggacacccagctgagcgacaagggctgcctggccggcggcggcagccccaagcagcccttcgccgccctgcaccaggagcaggtgctgagaaacccccacgacgccggccccgccggcctgcccggcatcggcgccgtgtgctag

SEQ ID NO: 229105 - protein, 705 aa, Artificial Sequence
  derived and/or modified sequence
MGESPASVVLNASGGLFSLKMETLESELTCPICLELFEDPLLLPCAHSLCFSCAHRILVSSCSSGESIEPITAFQCPTCRYVISLNHRGLDGLKRNVTLQNIIDRFQKASVSGPNSPSESRRERTYRPTTAMSSERIACQFCEQDPPRDAVKTCITCEVSYCDRCLRATHPNKKPFTSHRLVEPVPDTHLRGITCLDHENEKVNMYCVSDDQLICALCKLVGRHRDHQVASLNDRFEKLKQTLEMNLTNLVKRNSELENQMAKLIQICQQVEVNTAMHEAKLMEECDELVEIIQQRKQMIAVKIKETKVMKLRKLAQQVANCRQCLERSTVLINQAEHILKENDQARFLQSAKNIAERVAMATASSQVLIPDINFNDAFENFALDFSREKKLLEGLDYLTAPNPPSIREELCTASHDTITVHWISDDEFSISSYELQYTIFTGQANFISLYNSVDSWMIVPNIKQNHYTVHGLQSGTRYIFIVKAINQAGSRNSEPTRLKTNSQPFKLDPKMTHKKLKISNDGLQMEKDESSLKKSHTPERFSGTGCYGAAGNIFIDSGCHYWEVVMGSSTWYAIGIAYKSAPKNEWIGKNASSWVFSRCNSNFVVRHNNKEMLVDVPPHLKRLGVLLDYDNNMLSFYDPANSLHLHTFDVTFILPVCPTFTIWNKSLMILSGLPAPDFIDYPERQECNCRPQESPYVSGMKTCH

SEQ ID NO: 229106 - DNA, 2118 bp, Artificial Sequence
  derived and/or modified sequence
atgggcgaatctccagcatccgtggtgttgaatgcctctggaggtctgttctcactgaaaatggaaacccttgaatccgaactgacatgccccatctgtctcgaactatttgaggacccactcctgctgccctgcgctcattcattgtgttttagctgtgctcatcgaatcctggtgagctcctgctcaagtggtgaatctatcgagccaatcacggcctttcaatgtcccacttgccgctatgtaatcagcctcaaccacagagggctcgacggattaaaaaggaacgtgactctgcagaatattatcgaccggtttcagaaagcgagcgttagtggcccaaattcacctagcgaaagtagacgggagagaacatatagacctacaacggcgatgagctctgagcgtatcgcttgccagttttgcgagcaagaccctccccgagatgcagtaaaaacctgtataacttgtgaagtcagctactgcgaccggtgccttcgcgccacccacccgaacaaaaaaccgtttacctcccaccggttggtcgagcccgtgccagacactcacctgcgcggaataacttgtctggatcacgagaacgagaaggtcaacatgtattgtgtgtcagatgaccagctgatttgcgcactttgcaaactcgtgggccggcacagggatcatcaggttgcttcattaaatgatagattcgaaaaactgaagcagacccttgagatgaacttgactaacctagttaagcggaacagcgaattggaaaaccagatggcgaagctgatccagatctgccagcaggtggaggtgaacaccgctatgcacgaagccaaattgatggaggagtgcgacgagctggtagagataattcagcagcggaaacagatgatcgcagtgaaaattaaagagacaaaggtgatgaagctgcgtaagttggcccagcaggtggcaaattgccgtcagtgccttgagcgcagcactgtattaataaaccaagccgagcacatcctgaaagagaacgatcaagcccgctttctacagagcgccaaaaatatcgcagaaagggtggccatggcaactgcctcgagccaagtattaatccccgatatcaattttaatgacgcctttgagaacttcgccctcgacttttcaagagaaaaaaagctactcgaggggctcgattaccttaccgcccccaaccctcccagcatcagggaagaactttgcaccgcgagccacgacactatcacagttcattggatatcagacgacgaattttctattagctcctatgaactgcagtacacaattttcaccgggcaggccaactttataagcctatataactccgtggattcctggatgattgtcccaaatataaaacagaatcattacacagttcacggattacagtccggaactaggtatatctttatcgtgaaagctatcaatcaggcgggctcccggaatagtgagcccacaagactcaagaccaacagtcagccatttaagctcgacccgaaaatgacacataagaagctcaagataagcaacgatggactgcaaatggagaaagatgaatccagtttgaagaaatcacatacaccagagcgattttccggcaccggctgttacggtgctgcaggaaacattttcatcgactcaggttgccactattgggaggtggtcatgggatcaagtacctggtatgccatcggaatagcctataagtctgctcctaagaacgaatggattggaaagaacgccagttcctgggtcttcagccgttgcaacagtaatttcgtggtgagacacaataacaaagaaatgctggtggatgtaccaccccatctaaaacgactgggggtgctgctcgactacgacaacaatatgctgtcattctacgacccagctaattccctgcacttacacacattcgacgtaaccttcattctgccagtgtgccccacctttacaatatggaacaagtccctgatgatcctgtctggccttcctgcgcctgattttatcgattacccagagcgccaggaatgtaactgccggccacaggagtccccctacgtatctggcatgaaaacctgtcattag

SEQ ID NO: 229107 - DNA, 660 bp, Artificial Sequence
  derived and/or modified sequence
atggagacattggaaagcgagttgacatgtcctatctgcctggaactcttcgaggacccgctactcctcccctgtgcccattctttatgtttctcttgtgcccaccgcattctcgtgtcttcctgctcctccggagagtcaatagaacctatcacagctttccagtgtccgacttgcagatacgttatctcactgaatcatcggggccttgacggcctgaagagaaatgttacactgcaaaatatcattgacaggtttcagaaagcctccgtcagcgggccaaacagcccctccgagtcaagacgggagaggacttacaggcccacaacagcgatgagttccgagcgaatagcctgccagttttgcgagcaggatccgccgcgggatgccgtcaaaacttgtatcacatgtgaagttagttactgcgatcgctgcttgcgggctactcaccctaacaaaaaaccttttacatcccatcgattagttgagccagttcctgacacccacctgagggggattacctgcttagatcacgagaatgagaaagtgaacatgtactgcgtctccgacgatcagttgatatgcgccctgtgtaagctggttggtaggcacagggaccatcaggtagccagcctgaatgaccggtttgaaaaactgtag

SEQ ID NO: 229108 - DNA, 2118 bp, Artificial Sequence
  derived and/or modified sequence
atgggagagagccctgcctctgtggtgctgaatgccagcggcggcctcttcagcctgaagatggagaccctggagagcgagctgacctgccccatctgcctggagctgtttgaggaccccctgctgctgccctgtgcccacagcctgtgcttcagctgtgcccaccgcatcctggtgagcagctgcagcagcggggagagcattgagcccatcacagccttccagtgccccacctgccgctacgtgatcagcctgaaccaccggggcctggatggcctgaagagaaatgtgaccctgcagaacatcatcgaccgcttccagaaggcctctgtgtctggccccaacagccccagcgagagcagaagagagaggacctaccggcccaccacagccatgagcagcgagagaattgcctgccagttctgtgagcaggaccccccaagagatgctgtgaagacctgcatcacctgtgaggtgtcctactgtgaccgctgcctgcgggccacccaccccaacaagaagcccttcaccagccaccggctggtggagcctgtgcctgacacccacctgcggggcatcacctgcctggaccatgaaaatgagaaggtgaacatgtactgtgtgtctgatgaccagctgatctgtgccctgtgcaagctggtgggccgccaccgggaccaccaggtggccagcctgaatgacagatttgagaagctgaagcagaccctggagatgaacctgaccaacctggtgaagagaaattctgagctggagaaccagatggccaagctgatccagatctgccagcaggtggaggtgaacacagccatgcatgaggccaagctgatggaggagtgtgatgagctggtggagatcatccagcagaggaagcagatgattgctgtgaagatcaaggagaccaaggtgatgaagctgaggaagctggcccagcaggtggccaactgccggcagtgcctggagaggagcacagtgctgatcaaccaggccgagcacatcctgaaggaaaatgaccaggcccgcttcctgcagagcgccaagaacattgctgagcgggtggccatggccacagccagcagccaggtgctgatcccagacatcaacttcaatgatgcctttgagaactttgccctggacttcagccgggagaagaagctgctggagggcctggactacctgacagcccccaacccccccagcatccgggaggagctgtgcacagccagccatgacaccatcaccgtgcactggatcagtgatgatgagttcagcatcagcagctatgagctgcagtacaccatcttcaccggccaggccaacttcatcagcctgtacaacagcgtggacagctggatgattgtgcccaacatcaagcagaaccactacacagtgcacggcctgcagagcggcacccgctacatcttcatcgtgaaggccatcaaccaggccggcagcaggaacagcgagcccacccggctgaagaccaacagccagcccttcaagctggaccccaagatgacccacaagaagctgaagatcagcaatgatggcctgcagatggagaaggatgagagcagcctgaagaagagccacaccccagagcgcttctctggaacaggctgctacggggctgctggcaacatcttcatcgacagcggctgccactactgggaggtggtgatgggcagcagcacctggtacgccatcggcatcgcctacaagagcgcccccaagaatgagtggattggcaagaatgccagctcctgggtgttcagccgctgcaacagcaactttgtggtgcgccacaacaacaaggagatgctggtggatgtgcccccccacctgaagaggctgggcgtgctgctggactatgacaacaacatgctgtccttctatgaccctgccaacagcctgcacctgcacacctttgatgtgaccttcatcctgcctgtgtgccccaccttcaccatctggaacaagagcctgatgatcctgagcggcctgcctgccccagacttcatcgactacccagagcggcaggagtgcaactgccggccccaggagagcccctacgtgtctggcatgaagacctgccactag

SEQ ID NO: 229109 - DNA, 660 bp, Artificial Sequence
  derived and/or modified sequence
atggagaccctggagagcgagctgacctgccccatctgcctggagctgtttgaggaccccctgctgctgccctgtgcccacagcctgtgcttcagctgtgcccaccgcatcctggtgagcagctgcagcagcggggagagcattgagcccatcacagccttccagtgccccacctgccgctacgtgatcagcctgaaccaccggggcctggatggcctgaagagaaatgtgaccctgcagaacatcatcgaccgcttccagaaggcctctgtgtctggccccaacagccccagcgagagcagaagagagaggacctaccggcccaccacagccatgagcagcgagagaattgcctgccagttctgtgagcaggaccccccaagagatgctgtgaagacctgcatcacctgtgaggtgtcctactgtgaccgctgcctgcgggccacccaccccaacaagaagcccttcaccagccaccggctggtggagcctgtgcctgacacccacctgcggggcatcacctgcctggaccatgaaaatgagaaggtgaacatgtactgtgtgtctgatgaccagctgatctgtgccctgtgcaagctggtgggccgccaccgggaccaccaggtggccagcctgaatgacagatttgagaagctgtag

SEQ ID NO: 229110 - DNA, 2251 bp, Artificial Sequence
  derived and/or modified sequence
acctgggaacgctatgggtgaaagcccagcctccgtggttcttaatgcctcaggaggactattttcactaaagatggaaacactggagtctgaattgacctgtccaatctgcctagagttgtttgaagacccccttctgctcccttgtgctcacagcctctgcttcagctgtgcccatcgcattttggtatcaagctgcagctctggtgaatccattgaacccattactgctttccagtgtcctacctgcaggtatgttatctcgctgaaccaccggggcctggatggcctcaagaggaatgtgactctgcagaacattattgatcgcttccagaaggcttcagtcagtgggcccaattcccctagtgagagccgccgggaaaggacttacaggcccaccactgccatgtctagcgagcgaattgcttgccaattctgtgagcaggacccgccaagggatgcagtaaaaacatgcatcacctgtgaggtctcctactgtgaccgttgcctgcgggccacgcaccccaacaagaaacctttcaccagccaccgcctggtggaaccagtgccagacacacatcttcgagggatcacctgcctggaccatgagaatgagaaagtgaacatgtactgtgtatctgatgaccaattgatctgtgccttatgcaaactggtgggtcgtcaccgagaccatcaggtcgcatccctgaatgatcgatttgagaaactcaagcaaactctggagatgaacctcaccaacctggttaagcgcaacagcgaactagaaaatcaaatggccaaactaatacagatctgccagcaggttgaggtgaatactgctatgcatgaggcaaaacttatggaagaatgtgacgagttggtagagatcatccagcagaggaagcaaatgatcgctgtcaaaatcaaagagacaaaggttatgaaactgagaaagttggcacagcaggttgctaattgccgccagtgtcttgaacggtcaacagtcctcatcaaccaagctgagcatatcctgaaagaaaatgaccaggcacggtttctacagtctgcaaaaaatattgctgagagggtcgctatggcaactgcatcttctcaagttctgattccagacatcaattttaatgatgcctttgaaaactttgctttagatttttccagagaaaagaaactgctagaggggttagattatttaacagccccaaacccaccatctatccgagaagaactctgtactgcctcccatgacaccattacagtccactggatctcggatgatgagttcagcatcagctcctatgagcttcagtacaccatattcactggccaggctaacttcatcagcctgtataattcagtagacagctggatgattgttcccaacattaaacagaaccattacacagtgcatggactccagagcgggactcgctacatcttcatcgttaaagccataaaccaagccggcagccggaacagtgaacctacccgactaaaaacaaacagccaaccctttaaattggatcccaaaatgactcacaagaagttgaagatctccaatgatggattgcagatggagaaggatgaaagctctctaaagaagagccacaccccagagaggtttagtggcacagggtgctatggggcagcaggaaatatattcattgacagtggctgccactattgggaggtggtcatgggttcctcaacatggtatgcaattggcattgcctacaaatcagctccaaagaatgaatggattggcaagaatgcctcctcatgggtcttctctcgctgcaatagtaacttcgtggtgagacacaacaacaaggaaatgctggtggatgtgcccccacacctgaagcgtctgggtgtcctcctggattatgacaacaatatgctgtctttctatgacccagctaactctctccatcttcatacttttgatgtgaccttcattcttccagtttgtccaacatttacaatctggaacaaatccctaatgatcctgtctggcttgcctgccccagattttattgattaccctgagcggcaggaatgcaactgcaggcctcaagaatccccttatgtttctgggatgaaaacctgtcattaagtttcaggagagtatataattcactggctctctagttcagcagttcttcccctcctacacctaagttagcgttcaatatacgagacacaaaataaagtttgtttgaagcatccaaaataa

SEQ ID NO: 229111 - DNA, 758 bp, Artificial Sequence
  derived and/or modified sequence
cttcaagatgacagggcgctggagaaaaggctgctggaatcagctggtgaaagcccagcctccgtggttcttaatgcctcaggaggactattttcactaaagatggaaacactggagtctgaattgacctgtccaatctgcctagagttgtttgaagacccccttctgctcccttgtgctcacagcctctgcttcagctgtgcccatcgcattttggtatcaagctgcagctctggtgaatccattgaacccattactgctttccagtgtcctacctgcaggtatgttatctcgctgaaccaccggggcctggatggcctcaagaggaatgtgactctgcagaacattattgatcgcttccagaaggcttcagtcagtgggcccaattcccctagtgagagccgccgggaaaggacttacaggcccaccactgccatgtctagcgagcgaattgcttgccaattctgtgagcaggacccgccaagggatgcagtaaaaacatgcatcacctgtgaggtctcctactgtgaccgttgcctgcgggccacgcaccccaacaagaaacctttcaccagccaccgcctggtggaaccagtgccagacacacatcttcgagggatcacctgcctggaccatgagaatgagaaagtgaacatgtactgtgtatctgatgaccaattgatctgtgccttatgcaaactggtgggtcgtcaccgagaccatcaggtcgcatccctgaatgatcgatttgagaaact

SEQ ID NO: 229112 - DNA, 2118 bp, Artificial Sequence
  derived and/or modified sequence
atgggcgagagccccgccagcgtggtgctgaacgccagcggcggcttgtttagcctgaagatggagaccctcgagagcgaactgacctgcccaatatgtttagaactctttgaagatcctctcctgttgccctgcgcccacagcctgtgtttttcctgcgcccatcggatattagtgagttcttgctcctcaggggaatctattgaacccataactgcttttcaatgtcccacatgccgatatgtcatatccttgaatcacaggggactggatggactgaagagaaatgttactctccagaatataattgacagattccagaaagcttctgtatccggcccgaattctccttctgaatctaggcgtgaacgtacctataggcctacaactgccatgagttccgaacggattgcttgccagttttgtgaacaggacccgccccgagatgcagtgaagacgtgcatcacgtgcgaggtctcttactgcgaccgatgtctacgggcaacacatcccaacaagaagccgttcacatctcacaggttggttgagccagtacctgatacacacttgagaggaattacctgcctggatcatgaaaacgaaaaggtgaatatgtactgcgttagtgatgaccagcttatctgtgctctgtgcaagctcgtcgggcgtcacagagaccatcaggtagcttcactgaacgacagatttgaaaagctcaagcagactctcgagatgaacttgactaacctggtgaaacgaaacagcgaactggagaaccagatggccaagctgatacagatttgtcaacaggtggaggtgaacactgccatgcacgaggctaaactcatggaggaatgcgacgaattggtcgagataatccaacagcgcaaacaaatgattgccgtgaaaataaaagagaccaaggtgatgaagttaaggaagctcgcccagcaagtggctaattgtagacagtgcctggagcgctccaccgtgttgattaatcaggcagaacacattctcaaggaaaacgatcaagctaggttcctccagagtgccaagaacatcgcagaacgagtggccatggcaactgccagtagccaggtgctcattccggacattaatttcaatgatgcatttgaaaactttgcactcgacttcagccgtgagaaaaagctcttagaggggctggactacctcacagctccaaacccaccaagtattcgagaggagctctgcacagcctcgcatgatactattacagtgcactggatttcagacgacgaatttagcatttcttcatatgaacttcaatatacaatcttcaccgggcaggccaacttcatctcactctacaattccgtggactcctggatgatcgtgcctaacataaaacagaatcattacaccgttcacggcctgcagtctggcaccaggtatatctttattgtcaaggcgattaatcaggcaggctcacgaaattccgagccaacaaggttgaagacaaattcccagccctttaagctggatccgaaaatgactcacaagaagctcaagattagtaatgacggcttgcagatggagaaggatgagagtagtttgaaaaaaagtcacacccctgagcgcttctcaggaactggatgctatggggcggcaggaaatatctttatagacagcggatgccattactgggaggtggttatgggctcttctacttggtacgccataggtattgcttacaaatcagctccaaaaaacgaatggatcggtaaaaatgcctcatcctgggtgttctcaaggtgtaactccaattttgtggttaggcacaacaacaaggagatgcttgtggatgttcctccgcacctgaagcgcctcggggtgctgttagactacgataacaatatgctcagcttttatgacccggccaattctctgcacttacacaccttcgacgtgaccttcatcctgcctgtatgccctacattcactatttggaacaagtctctaatgatcctgagcggcctacctgcccccgacttcatagactaccctgagcgccaggagtgtaactgtagaccacaggaaagcccatatgtgtcagggatgaaaacgtgccactag

SEQ ID NO: 229113 - DNA, 660 bp, Artificial Sequence
  derived and/or modified sequence
atggagaccctggagagcgagctgacctgccccatctgcctggagctattcgaggacccattgctgctcccctgcgctcacagtctgtgtttctcatgtgcccacagaatactggtcagtagctgtagcagcggggagagtatcgagccaatcacagcctttcagtgtcccacctgccggtatgttattagtctgaaccacagaggcttggacgggttgaaaagaaatgtcacactacaaaatataattgatcgatttcaaaaggcgtccgtatctggacctaattcccccagcgagtctcgtcgcgagcggacctacagacctaccaccgcaatgtcttctgagagaattgcttgtcagttctgtgagcaggatccaccaagggatgcggtgaaaacctgtatcacctgtgaggtttcatattgtgacaggtgcctaagggctacacaccccaataagaaaccattcacatcccataggctcgtggagcctgttcccgacacccatctgagggggatcacttgtctggatcacgagaacgagaaagtcaatatgtactgcgtctccgacgaccaactgatctgtgccctctgtaagcttgttgggcggcatagagatcatcaagtggcttcactgaatgatcggttcgagaagctatag

SEQ ID NO: 229114 - DNA, 2118 bp, Artificial Sequence
  derived and/or modified sequence
atgggggagagccccgcatctgttgtgttaaacgcatcaggcggtctgttctctttaaaaatggagaccttagaaagcgaactgacatgtcccatctgtttagagctatttgaagacccattactgctgccatgtgcacactcattgtgcttttcatgtgctcatcgcatactcgtctctagctgtagtagtggagagagcattgaaccaatcacagcctttcaatgtcctacatgccgctacgtgataagcctgaatcaccggggactggatggccttaaacgcaacgtgactttgcaaaatatcattgaccgcttccagaaggcctcagtgagtggccctaactcacccagtgaatccagacgcgagcggacttatcgccctaccaccgccatgtcctccgagcgcatagcctgtcaattctgcgaacaggatcctcctagagacgccgtaaaaacctgtataacctgcgaagtttcttactgcgaccggtgcttacgcgcaacccatccgaacaagaagccttttacttctcataggctggtggagcctgtcccagacacacatcttcgcggtattacttgtttggatcacgaaaatgagaaggtaaatatgtattgtgtgtcggatgatcagcttatctgtgcgttgtgtaaattagttgggcgtcaccgggatcatcaggtagcctctttgaatgaccggttcgagaagctgaagcagactctcgagatgaatctgactaaccttgtgaagaggaattcagagcttgagaaccagatggccaagctgatacagatctgccagcaggtcgaagtaaacacagccatgcacgaggctaagctgatggaggaatgcgatgagcttgtggaaatcatccagcagagaaagcagatgattgcggtcaaaattaaagagaccaaagtgatgaaacttcgaaagctggctcaacaagtcgctaattgtaggcagtgtttggagcggagtacggtgcttattaaccaagctgagcacatcctgaaggaaaacgaccaagcgaggtttctgcagagcgcgaagaatattgctgaaagagtggccatggctaccgcttccagtcaggtcctgatcccagatattaatttcaacgatgcattcgaaaacttcgcacttgacttttctcgggagaaaaagctcctggaaggacttgactatctcaccgcacctaacccacccagcattagggaggagctgtgcactgccagtcacgataccatcaccgtgcactggatcagcgatgacgaattcagcatcagttcttacgagttgcagtacacgatctttactggacaggcaaattttatctcattatacaacagcgtggatagctggatgatagtgccgaatataaagcagaaccattacactgtccacggcctgcagagtgggaccagatacatttttatcgtgaaggctatcaatcaagccggatccaggaacagcgagccaacaagactgaaaacaaacagtcagcccttcaaactcgacccgaagatgacacacaagaagctgaaaatttctaatgacggcttgcagatggaaaaagatgagtcttcattgaaaaaaagtcacactccagagaggtttagcggcacaggatgctacggggcagcagggaatatttttattgattcaggttgccactattgggaggtggttatggggagctctacgtggtacgccatcggcatcgcctataagtcggctcccaagaacgagtggatcggcaagaatgcctcttcgtgggtgtttagtaggtgtaactcgaattttgtggttagacataacaataaagagatgcttgtcgacgtccctccccacttgaaacgtctgggcgtccttctggattatgacaataatatgctatctttttatgacccagcaaactcacttcacctgcacacttttgacgtgacgtttattctccccgtctgcccaacgtttacgatctggaataaaagtctcatgatactttctgggctacctgccccagattttatcgactaccctgaacgacaggaatgcaactgccgccctcaagaaagcccctacgtctccgggatgaaaacctgtcattag

SEQ ID NO: 229115 - DNA, 660 bp, Artificial Sequence
  derived and/or modified sequence
atggagacactggaatccgaactcacttgccctatttgtctggaactcttcgaggatcccctccttctcccctgcgcccactctctctgctttagctgcgctcatcgaatactggttagctcatgctcttccggcgaatcaattgaaccgattaccgctttccaatgtccaacttgtcggtacgttatcagcctgaaccataggggcctcgatggactgaagcgcaacgttactctgcagaacatcattgatagattccagaaggccagcgttagcgggccaaactccccctccgagtcacgacgggaaagaacctatcggcctacgactgccatgtcctcggaacgaatcgcctgtcaattttgtgaacaggaccctccgagggatgccgttaagacctgcatcacatgcgaagtcagttattgcgacagatgcctaagagccacacacccaaacaagaaaccctttaccagtcaccggttagtcgagcctgtgcccgatacacatctgagagggatcacgtgcctggatcatgagaacgaaaaggtgaatatgtactgcgtaagcgacgaccaactgatctgcgccctgtgcaagctggtcggacggcatcgtgatcatcaagtggccagtttaaatgaccggttcgaaaaactgtag

SEQ ID NO: 229116 - DNA, 2118 bp, Artificial Sequence
  derived and/or modified sequence
atgggcgagagccccgccagcgtggtgctgaacgccagcggcggcctgttcagcctgaagatggagaccctggagagcgagctgacctgccccatctgcctggagctgttcgaggaccccctgctgctgccctgcgcccacagcctgtgcttcagctgcgcccacagaatcctggtgagcagctgcagcagcggcgagagcatcgagcccatcaccgccttccagtgccccacctgcagatacgtgatcagcctgaaccacagaggcctggacggcctgaagagaaacgtgaccctgcagaacatcatcgacagattccagaaggccagcgtgagcggccccaacagccccagcgagagcagaagagagagaacctacagacccaccaccgccatgagcagcgagagaatcgcctgccagttctgcgagcaggacccccccagagacgccgtgaagacctgcatcacctgcgaggtgagctactgcgacagatgcctgagagccacccaccccaacaagaagcccttcaccagccacagactggtggagcccgtgcccgacacccacctgagaggcatcacctgcctggaccacgagaacgagaaggtgaacatgtactgcgtgagcgacgaccagctgatctgcgccctgtgcaagctggtgggcagacacagagaccaccaggtggccagcctgaacgacagattcgagaagctgaagcagaccctggagatgaacctgaccaacctggtgaagagaaacagcgagctggagaaccagatggccaagctgatccagatctgccagcaggtggaggtgaacaccgccatgcacgaggccaagctgatggaggagtgcgacgagctggtggagatcatccagcagagaaagcagatgatcgccgtgaagatcaaggagaccaaggtgatgaagctgagaaagctggcccagcaggtggccaactgcagacagtgcctggagagaagcaccgtgctgatcaaccaggccgagcacatcctgaaggagaacgaccaggccagattcctgcagagcgccaagaacatcgccgagagagtggccatggccaccgccagcagccaggtgctgatccccgacatcaacttcaacgacgccttcgagaacttcgccctggacttcagcagagagaagaagctgctggagggcctggactacctgaccgcccccaacccccccagcatcagagaggagctgtgcaccgccagccacgacaccatcaccgtgcactggatcagcgacgacgagttcagcatcagcagctacgagctgcagtacaccatcttcaccggccaggccaacttcatcagcctgtacaacagcgtggacagctggatgatcgtgcccaacatcaagcagaaccactacaccgtgcacggcctgcagagcggcaccagatacatcttcatcgtgaaggccatcaaccaggccggcagcagaaacagcgagcccaccagactgaagaccaacagccagcccttcaagctggaccccaagatgacccacaagaagctgaagatcagcaacgacggcctgcagatggagaaggacgagagcagcctgaagaagagccacacccccgagagattcagcggcaccggctgctacggcgccgccggcaacatcttcatcgacagcggctgccactactgggaggtggtgatgggcagcagcacctggtacgccatcggcatcgcctacaagagcgcccccaagaacgagtggatcggcaagaacgccagcagctgggtgttcagcagatgcaacagcaacttcgtggtgagacacaacaacaaggagatgctggtggacgtgcccccccacctgaagagactgggcgtgctgctggactacgacaacaacatgctgagcttctacgaccccgccaacagcctgcacctgcacaccttcgacgtgaccttcatcctgcccgtgtgccccaccttcaccatctggaacaagagcctgatgatcctgagcggcctgcccgcccccgacttcatcgactaccccgagagacaggagtgcaactgcagaccccaggagagcccctacgtgagcggcatgaagacctgccactag

SEQ ID NO: 229117 - DNA, 660 bp, Artificial Sequence
  derived and/or modified sequence
atggagaccctggagagcgagctgacctgccccatctgcctggagctgttcgaggaccccctgctgctgccctgcgcccacagcctgtgcttcagctgcgcccacagaatcctggtgagcagctgcagcagcggcgagagcatcgagcccatcaccgccttccagtgccccacctgcagatacgtgatcagcctgaaccacagaggcctggacggcctgaagagaaacgtgaccctgcagaacatcatcgacagattccagaaggccagcgtgagcggccccaacagccccagcgagagcagaagagagagaacctacagacccaccaccgccatgagcagcgagagaatcgcctgccagttctgcgagcaggacccccccagagacgccgtgaagacctgcatcacctgcgaggtgagctactgcgacagatgcctgagagccacccaccccaacaagaagcccttcaccagccacagactggtggagcccgtgcccgacacccacctgagaggcatcacctgcctggaccacgagaacgagaaggtgaacatgtactgcgtgagcgacgaccagctgatctgcgccctgtgcaagctggtgggcagacacagagaccaccaggtggccagcctgaacgacagattcgagaagctgtag

SEQ ID NO: 229118 - protein, 434 aa, Artificial Sequence
  derived and/or modified sequence
MVSSCELELQEQSLRTASDQESGDEELNRLKEENEKLRSLTFSLAEKDILEQSLDEARGSRQELVERIHSLRERAVAAERQREQYWEEKEQTLLQFQKSKMACQLYREKVNALQAQVCELQKERDQAYSARDSAQREISQSLVEKDSLRRQVFELTDQVCELRTQLRQLQAEPPGVLKQEARTREPCPREKQRLVRMHAICPRDDSDCSLVSSTESQLLSDLSATSSRELVDSFRSSSPAPPSQQSLYKRVAEDFGEEPWSFSSCLEIPEGDPGALPGAKAGDPHLDYELLDTADLPQLESSLQPVSPGRLDVSESGVLMRRRPARRILSQVTMLAFQGDALLEQISVIGGNLTGIFIHRVTPGSAADQMALRPGTQIVMVSRARPLLSPGLLMGTVAAGGVTQADFTSPRRCRSTLGWASALSWADVKRSAHL

SEQ ID NO: 229119 - DNA, 1305 bp, Artificial Sequence
  derived and/or modified sequence
atggtgagcagctgcgagctggagctgcaggagcagagcctgagaaccgccagcgaccaggagagcggcgacgaggagctgaacagactgaaggaggagaacgagaagctgagaagcctgaccttcagcctggccgagaaggacatcctggagcagagcctggacgaggccagaggcagcagacaggagctggtggagagaatccacagcctgagagagagagccgtggccgccgagagacagagagagcagtactgggaggagaaggagcagaccctgctgcagttccagaagagcaagatggcctgccagctgtacagagagaaggtgaacgccctgcaggcccaggtgtgcgagctgcagaaggagagagaccaggcctacagcgccagagacagcgcccagagagagatcagccagagcctggtggagaaggacagcctgagaagacaggtgttcgagctgaccgaccaggtgtgcgagctgagaacccagctgagacagctgcaggccgagccccccggcgtgctgaagcaggaggccagaaccagagagccctgccccagagagaagcagagactggtgagaatgcacgccatctgccccagagacgacagcgactgcagcctggtgagcagcaccgagagccagctgctgagcgacctgagcgccaccagcagcagagagctggtggacagcttcagaagcagcagccccgccccccccagccagcagagcctgtacaagagagtggccgaggacttcggcgaggagccctggagcttcagcagctgcctggagatccccgagggcgaccccggcgccctgcccggcgccaaggccggcgacccccacctggactacgagctgctggacaccgccgacctgccccagctggagagcagcctgcagcccgtgagccccggcagactggacgtgagcgagagcggcgtgctgatgagaagaagacccgccagaagaatcctgagccaggtgaccatgctggccttccagggcgacgccctgctggagcagatcagcgtgatcggcggcaacctgaccggcatcttcatccacagagtgacccccggcagcgccgccgaccagatggccctgagacccggcacccagatcgtgatggtgagcagagccagacccctgctgagccccggcctgctgatgggcaccgtggccgccggcggcgtgacccaggccgacttcaccagccccagaagatgcagaagcaccctgggctgggccagcgccctgagctgggccgacgtgaagagaagcgcccacctgtag

SEQ ID NO: 229120 - DNA, 1326 bp, Artificial Sequence
  derived and/or modified sequence
atggtgagcagctgcgagctggagctgcaggagcagagcctgagaaccgccagcgaccaggagagcggcgacgaggagctgaacagactgaaggaggagaacgagaagctgagaagcctgaccttcagcctggccgagaaggacatcctggagcagagcctggacgaggccagaggcagcagacaggagctggtggagagaatccacagcctgagagagagagccgtggccgccgagagacagagagagcagtactgggaggagaaggagcagaccctgctgcagttccagaagagcaagatggcctgccagctgtacagagagaaggtgaacgccctgcaggcccaggtgtgcgagctgcagaaggagagagaccaggcctacagcgccagagacagcgcccagagagagatcagccagagcctggtggagaaggacagcctgagaagacaggtgttcgagctgaccgaccaggtgtgcgagctgagaacccagctgagacagctgcaggccgagccccccggcgtgctgaagcaggaggccagaaccagagagccctgccccagagagaagcagagactggtgagaatgcacgccatctgccccagagacgacagcgactgcagcctggtgagcagcaccgagagccagctgctgagcgacctgagcgccaccagcagcagagagctggtggacagcttcagaagcagcagccccgccccccccagccagcagagcctgtacaagagagtggccgaggacttcggcgaggagccctggagcttcagcagctgcctggagatccccgagggcgaccccggcgccctgcccggcgccaaggccggcgacccccacctggactacgagctgctggacaccgccgacctgccccagctggagagcagcctgcagcccgtgagccccggcagactggacgtgagcgagagcggcgtgctgatgagaagaagacccgccagaagaatcctgagccaggtgaccatgctggccttccagggcgacgccctgctggagcagatcagcgtgatcggcggcaacctgaccggcatcttcatccacagagtgacccccggcagcgccgccgaccagatggccctgagacccggcacccagatcgtgatggtgatcagaggctacagcagaacctggagacccaagtggagacccagaggcacccacagcaccagcggcagcacctggccctggagagccggccccaagggcagctgcagatgcatcgccaccagaagctgcaccagccccaccccctgcagcagagccgccgccgccggcatgcccaccgcctag

SEQ ID NO: 229121 - DNA, 1632 bp, Artificial Sequence
  derived and/or modified sequence
gtccagaggaaggaggccagcaggacctggtgggatagtccctggaaggccagggccctgcacacagactgcaagtcaacacaggagctttgctgtctgaacagccccggtcccgcgttcccagctgtatctactgaagcaggagctgcagcgagccaacatggtttcctcctgtgagctggaattgcaagagcagtccctgaggacagccagcgaccaggagtccggggatgaggagctgaaccgcctgaaggaggagaatgagaaactgcgctcgctgactttcagcctggcggagaaggacattctggagcagagcctggacgaggcgcgggggagccgacaggagctggtggagcgcatccactcgctgcgggagcgggccgtggctgccgagaggcagcgagagcagtactgggaagagaaggaacagaccctgctgcagttccagaagagtaagatggcctgccaactctacagggagaaggtgaatgcgctgcaggcccaggtgtgcgagctgcagaaggagcgagaccaggcgtactccgcgagggacagtgctcagagggagatttcccagagcctggtggagaaggactccctccgcaggcaggtgttcgagctgacggaccaggtctgcgagctgcgcacacagcttcgccagctgcaggcagagcctccgggtgtgctcaagcaggaagccaggaccagggagccctgtccacgggagaagcagcggctggtgcggatgcatgccatctgccccagagacgacagcgactgcagcctcgtcagctccacagagtctcagctcttgtcggacctgagtgccacgtccagccgcgagctggtggacagcttccgctccagcagccccgcgccccccagccagcagtccctgtacaagcgggtggccgaggacttcggggaagaaccctggtctttcagcagctgcctggagatcccggagggagacccgggagccctgccgggagctaaggcaggcgacccacacctggattatgagctcctagacacggcagaccttccgcagctggaaagcagcctgcagccagtctcccctggaaggcttgatgtctcggagagcggcgtcctcatgcggcggaggccagcccgcaggatcctgagccaggtcaccatgctggcgttccagggggatgcattgctggagcagatcagcgtcatcggcgggaacctcacgggcatcttcatccaccgggtcaccccgggctcggcggcggaccagatggccttgcgcccgggcacccagattgtgatggtgagccgtgcgaggcccctcctgtcccccgggctcctcatggggacagtggcagcgggtggggtgacccaggcagacttcacctcccccagacgatgcagatccactctgggctgggcctctgctctttcctgggctgacgtaaagcgttctgctcatttatagatgagagtcgtgccgtgcagaacccagcatgtcacccgtggtgctgctgccatgcggcgcttctgaccaggggtctttgcatgaggccccttgacagggctgctctgggtggtcactttgggtgtgtacagtaaaatacacgtgacataaaattcactattttaacc

SEQ ID NO: 229122 - DNA, 1305 bp, Artificial Sequence
  derived and/or modified sequence
atggttagtagctgtgagttggagctgcaggaacagtccctgcgcacggctagtgatcaggagagcggcgatgaggaactcaaccggctcaaggaagaaaacgaaaaactgcggtcgctgaccttctccctggcagaaaaggatattctggaacagtccttggatgaagcaagagggagtcgtcaggagcttgtggaacgtatccactcactgcgtgagagagcggttgcggccgagagacagcgagagcagtattgggaggaaaaagagcagacactgctgcagtttcagaagagcaagatggcgtgtcaactttaccgtgagaaagtgaacgccctccaagcccaggtttgtgagttgcagaaagaacgggatcaggcttattcggccagggattcagcccagagggagatttcacaatcacttgtggagaaagatagtttaagacggcaagtgttcgaactgactgaccaagtgtgtgagcttagaactcaacttcggcagctgcaagccgagccaccaggtgtcttaaagcaggaggccagaaccagagaaccctgcccccgcgaaaaacagcggctggttagaatgcacgctatctgcccgcgtgacgactcagactgtagtctggtatcctctactgagtctcagctactcagcgacctgagcgcaacgtcgtcccgtgaactcgtcgacagcttccggagttcatccccggcccccccttctcagcagagcttatacaagagggtagccgaggacttcggtgaagagccttggtccttcagctcctgtcttgagattcccgagggggaccccggcgccctcccaggtgctaaggcgggggaccctcacttagactatgagctactggatacagcggatctaccccagttagagtcaagcttacaaccagtaagtccgggaaggcttgacgtgtccgaatccggagttctcatgcggcggcgacctgccaggcgcatcctgagccaggttacaatgttagcgttccagggagacgcactattggaacaaatctcagttattggaggaaatctcacagggatatttatccaccgtgtgacgcccggcagcgcggcagatcaaatggcgctgcgccctggaactcaaatagtgatggtgtcccgggcccggccccttctgtcccccggcctcctcatgggaaccgttgccgccgggggtgttactcaagccgattttacgagcccaaggagatgtcgttcaacccttggatgggcttccgccttgagctgggccgacgtcaagcggtcggcccacctttag

SEQ ID NO: 229123 - DNA, 1326 bp, Artificial Sequence
  derived and/or modified sequence
atggtctcctcatgtgaactcgagctacaggaacaatccctgcgaactgcttctgaccaggaatctggtgacgaagagttaaaccggttaaaggaggaaaacgagaaactgaggtcactgaccttctcactcgccgagaaagatattctggaacagtctctcgatgaggcccgcggatctcgacaggaactagtggaaagaatacactcattgcgggaaagggcggtggccgccgaaaggcaaagggagcagtactgggaagagaaggaacagaccttgttacagttccagaaatcaaaaatggcctgccaactgtatcgggagaaggtaaacgctctgcaggcccaggtctgcgaacttcaaaaggagagagatcaggcatacagcgccagagattccgcccaacgtgaaattagtcagtcactcgttgagaaagatagcctccgccgacaggtgtttgaactcacggatcaggtgtgcgaattgcgcacccagctgagacagctccaggctgaacccccaggcgtgcttaagcaggaggctaggacaagagagccatgccccagggagaagcagcggcttgtgagaatgcatgcaatatgccctcgagacgattccgattgctctcttgtgtcctctacagagtctcagctcttatctgacttgtcagcaacaagttctagagagctcgttgattccttccgcagcagtagcccagcccctccgtcccagcagagcctgtacaagcgcgttgccgaagatttcggcgaggaaccttggagcttcagcagctgcttggaaatcccggagggggaccccggtgcactcccaggtgctaaggccggcgatccccatctggactacgagctgctggatacagcagacctgccacagctggagagttcactgcagccagtatccccagggcggttggatgtgagtgaatcgggcgtgctaatgcggagacgcccggcacgccggattctaagccaggtgacaatgctggcctttcagggggatgctctcctggagcagatctctgtaataggggggaatcttaccggcatttttatacaccgagtgacccctgggtcggcagccgaccagatggcactgcgcccaggaacccagattgttatggtgatacgcggctacagtaggacttggcggccaaagtggaggccacgcggtacccacagcacctccggttccacctggccctggagagcaggccctaaaggctcatgtagatgtattgcaacccggagttgcacgagtcccaccccatgcagtcgggccgcagctgccgggatgccaacagcctag

SEQ ID NO: 229124 - DNA, 1305 bp, Artificial Sequence
  derived and/or modified sequence
atggtgagcagctgtgagctggagctgcaggagcagagcctgaggacagccagtgaccaggagagcggagatgaggagctgaaccggctgaaggaggagaatgagaagctgcggagcctgaccttcagcctggccgagaaggacatcctggagcagagcctggatgaggcccggggcagccggcaggagctggtggagcgcatccacagcctgcgggagagagctgtggccgctgagcggcagcgggagcagtactgggaggagaaggagcagaccctgctgcagttccagaagagcaagatggcctgccagctgtaccgggagaaggtgaatgccctgcaggcccaggtgtgtgagctgcagaaggagcgggaccaggcctacagcgcccgggacagcgcccagcgggagatcagccagagcctggtggagaaggacagcctgcggcggcaggtgtttgagctgacagaccaggtgtgtgagctgcggacccagctgcggcagctgcaggccgagcccccaggagtgctgaagcaggaggcccggacccgggagccctgcccccgggagaagcagaggctggtgaggatgcacgccatctgccccagagatgacagcgactgcagcctggtgagcagcacagagagccagctgctgagtgacctgagcgccaccagcagccgggagctggtggacagcttccgcagcagcagccctgccccacccagccagcagagcctgtacaagagggtggctgaagattttggagaggagccctggagcttcagcagctgcctggagatccctgagggggaccccggggccctgcccggggccaaggccggggacccccacctggactatgagctgctggacacagctgacctgccccagctggagagcagcctgcagcctgtgtccccaggccgcctggatgtgtctgagagcggcgtgctgatgagaagaagacctgcccggcgcatcctgagccaggtgaccatgctggccttccagggagatgccctgctggagcagatctctgtgattggaggcaacctgaccggcatcttcatccaccgggtgaccccaggcagcgctgctgaccagatggccctgcggcccggcacccagatcgtgatggtgtcccgggcccggcccctgctgagccctggcctgctgatgggcaccgtggccgccggcggcgtgacccaggccgacttcaccagcccccggcgctgccgcagcaccctgggctgggccagcgccctgtcctgggcagatgtgaagaggtctgcccacctgtag

SEQ ID NO: 229125 - DNA, 1326 bp, Artificial Sequence
  derived and/or modified sequence
atggtgagcagctgtgagctggagctgcaggagcagagcctgaggacagccagtgaccaggagagcggagatgaggagctgaaccggctgaaggaggagaatgagaagctgcggagcctgaccttcagcctggccgagaaggacatcctggagcagagcctggatgaggcccggggcagccggcaggagctggtggagcgcatccacagcctgcgggagagagctgtggccgctgagcggcagcgggagcagtactgggaggagaaggagcagaccctgctgcagttccagaagagcaagatggcctgccagctgtaccgggagaaggtgaatgccctgcaggcccaggtgtgtgagctgcagaaggagcgggaccaggcctacagcgcccgggacagcgcccagcgggagatcagccagagcctggtggagaaggacagcctgcggcggcaggtgtttgagctgacagaccaggtgtgtgagctgcggacccagctgcggcagctgcaggccgagcccccaggagtgctgaagcaggaggcccggacccgggagccctgcccccgggagaagcagaggctggtgaggatgcacgccatctgccccagagatgacagcgactgcagcctggtgagcagcacagagagccagctgctgagtgacctgagcgccaccagcagccgggagctggtggacagcttccgcagcagcagccctgccccacccagccagcagagcctgtacaagagggtggctgaagattttggagaggagccctggagcttcagcagctgcctggagatccctgagggggaccccggggccctgcccggggccaaggccggggacccccacctggactatgagctgctggacacagctgacctgccccagctggagagcagcctgcagcctgtgtccccaggccgcctggatgtgtctgagagcggcgtgctgatgagaagaagacctgcccggcgcatcctgagccaggtgaccatgctggccttccagggagatgccctgctggagcagatctctgtgattggaggcaacctgaccggcatcttcatccaccgggtgaccccaggcagcgctgctgaccagatggccctgcggcccggcacccagatcgtgatggtgatccggggctacagcaggacctggaggcccaagtggaggccccggggcacccacagcaccagcggcagcacctggccctggagggctggccccaagggcagctgccgctgcatcgccaccaggagctgcaccagccccaccccctgcagcagagctgctgctgctggcatgcccacagcctag

SEQ ID NO: 229126 - DNA, 1305 bp, Artificial Sequence
  derived and/or modified sequence
atggtgagcagctgcgagctggagctgcaggagcagagcctgcggaccgccagtgaccaagagagtggggatgaagaactaaaccggttgaaggaggaaaacgagaaactgaggagcctaaccttctccctggcagaaaaggacattcttgagcagtccctggacgaagctagggggagcagacaggaactggtagagaggatccactccctgcgagaaagggccgtagccgcagagcgtcagcgagagcagtattgggaagagaaagaacagactcttctgcagtttcaaaagtctaagatggcctgccaactctaccgcgaaaaggtcaacgcccttcaagcgcaggtttgcgagctccagaaagagcgggatcaggcctattcggcacgcgattcagctcagcgcgaaatctcacagagtctggtggaaaaagacagcctgaggagacaggtgtttgagcttaccgaccaggtgtgcgagctgcggacacagcttagacaactgcaggccgagccccctggggttctaaagcaggaggccagaacaagggagccctgccccagggagaagcagagattggtgcgtatgcatgccatttgcccgcgagatgatagtgactgctccctggttagcagcaccgagtctcagttactatccgacctgagtgcgacaagctcccgggaattggtggattctttccgcagtagctcccccgccccaccctctcagcagtcgctgtacaagagggtggcagaggattttggcgaagagccatggtccttttcctcttgtctagagatccccgagggcgatccgggcgcgcttccgggtgccaaagccggagatccacacttagactacgagcttcttgatacagccgaccttccgcagctggagagctctcttcagcctgtaagcccaggacgcctcgatgtgagcgaatcaggggtcctaatgagaagaagacctgcacgacgcatcctcagtcaggttaccatgctggcctttcagggggacgccttgctggagcaaatctccgtcatcggcggcaacctgaccggcattttcatccacagagttacgccggggtccgctgcagatcagatggcactcagacctgggacacaaattgtgatggtgagccgagccaggcctctactcagccctggactattgatgggtaccgttgctgcagggggggtgacccaggcggacttcacctcccccaggcgctgcaggtccacactgggctgggcatccgcccttagttgggcagacgtcaaaaggtccgcccatttgtag

SEQ ID NO: 229127 - DNA, 1326 bp, Artificial Sequence
  derived and/or modified sequence
atggtgagcagctgcgagctggagctgcaggagcagagcctgcggaccgcctctgatcaggagtctggcgacgaggaactgaatcgcctgaaagaggagaacgaaaaacttaggtctctgaccttttctctagctgaaaaggatatccttgagcagtcccttgacgaagcccgcggatctaggcaggagcttgtcgagcggattcattctctgagggagcgggcagtagcggcagaacgccagcgcgagcagtattgggaagagaaggagcagacactgttgcaatttcaaaagtccaagatggcatgccaactttaccgtgagaaggtgaacgccctgcaagctcaagtctgtgaactccagaaggaacgagatcaggcttacagcgctagagactctgcacaaagagagatctcccagtccctcgtagagaaggattcccttcggcggcaggttttcgagcttacagaccaggtgtgtgaactccggacccagctgaggcagcttcaggccgaaccgcctggtgtgttgaagcaggaagcccggacacgggagccctgtcctagggagaaacaaagattggtacgaatgcacgccatctgcccccgtgatgattccgactgtagtcttgtgagcagcaccgagtcgcagcttttaagcgacctgtcggctacgagcagccgggaactggtggactcttttcgtagtagtagcccagccccaccctcccaacagtccctgtataaaagagtggccgaagatttcggcgaggagccatggtcatttagttcctgtttagagattcctgagggtgatccgggcgcactgcctggagccaaagccggcgacccacacctcgactacgagttgcttgacaccgcggatctgccacagctcgaatcatcactacagcccgtctctcccgggcggcttgacgtttcagaaagcggggtgctgatgagaagaagaccagctagaaggattctaagccaggtcactatgcttgcatttcaaggggatgccctgctggagcagatctcagtgatcggcggcaatctaaccggcattttcatccaccgcgttacccctgggagcgcagccgaccagatggccctaagacccgggacccagatcgtcatggtgattcggggctactctagaacatggaggccgaagtggagacctagagggacccatagcacaagcggaagcacttggccgtggcgcgctggccctaaggggtcttgcaggtgtattgcaactaggtcctgtacatccccaaccccatgttcaagagccgctgccgctgggatgcctacagcctag

SEQ ID NO: 229128 - DNA, 1305 bp, Artificial Sequence
  derived and/or modified sequence
atggtttctagctgtgaattggagttacaggagcagagcctgaggacagcctcggaccaggagtcaggagacgaagaactgaaccgtttaaaagaggaaaacgaaaagctgcgcagcctcacattctcattggctgagaaggacattctcgagcaaagcctcgacgaggcacgaggtagccgccaggagttggttgaaagaatccatagtttgcgggagcgtgccgtggctgcagagcgtcaacgcgagcagtactgggaagagaaagagcagactcttctccagtttcaaaaatcgaaaatggcctgtcagctctatcgcgagaaggtgaacgcactgcaagcccaggtttgcgagctgcagaaagaacgtgaccaagcctattctgctcgtgactctgcgcagcgtgaaatcagccagtcattagtagagaaagatagcctgaggaggcaggtgttcgaactcaccgatcaggtctgtgagctacgcacgcagcttcggcagctccaggcggaaccccctggggtcctgaagcaggaagccagaactagagagccttgtcctcgcgagaaacagcgcctcgttaggatgcacgccatctgccccagggatgactccgactgctccctggtctcgtcaactgagtctcaattactgtcagacctttccgctacaagttcgcgggaactagttgatagcttcaggtcttcatcgcctgcccctccctcccagcagagtctgtataaacgcgtcgcagaggatttcggggaggagccttggtcattttcaagttgcctggaaatacccgagggggacccaggggctctgcctggtgcgaaggcaggcgatccccatctggactacgagttgctggatacagcagatctgccccagttagaaagttctctgcagcctgtgagccccggtcggctggatgttagcgaaagcggtgttttgatgcgcagaaggcctgccagacgcatcctgagccaagtcactatgcttgcatttcagggagacgctttactcgagcaaatatctgtcatcggcggaaacctgacggggatttttatacacagagtcactcccggttcagccgctgaccaaatggcgttgcgacctgggacccaaatcgtgatggtgtcgcgcgctcgtccgttattgagccctggacttctcatgggcaccgttgccgcaggcggagttacacaggcagatttcacctcaccgaggcgctgccggagcaccctaggatgggctagcgctctgtcatgggcagacgtgaaacgatcagcccacctgtag

SEQ ID NO: 229129 - DNA, 1326 bp, Artificial Sequence
  derived and/or modified sequence
atggtatcaagttgtgagctggagctacaggagcagtctctgcgtacagcaagtgaccaggaatctggtgacgaggagctgaatcgccttaaagaggaaaatgaaaaacttcgatctctgacattttctcttgctgagaaagatatccttgagcagtcccttgacgaggcccgaggatccagacaggaactcgtcgaaaggattcattcactgagagagagagctgtcgccgcagaaaggcagcgcgaacagtactgggaggaaaaagagcagacactcctccagttccaaaaatctaaaatggcatgccagctgtacagggagaaggttaacgctctccaagcccaggtttgcgagttgcagaaagaaagggatcaagcatatagcgccagggactccgcccagagggagattagccagagcttggtggagaaggacagtctgcggaggcaggtgttcgagttaacagaccaggtctgtgaactgcgtacccagctgagacagcttcaagcagagccaccgggagtccttaaacaggaagccagaacccgggagccctgtccgagggaaaaacagagacttgtgagaatgcatgccatctgccctcgtgatgacagtgattgcagcttagtgtcttcgactgaatctcaacttctcagtgacttaagcgctacttcctcccgtgagctggtggacagcttcagaagttctagtccagccccaccgtcacaacaatctctgtacaagcgggtggcggaggacttcggtgaggagccttggagtttttcttcatgcttggaaatccctgagggcgacccaggagcactccctggcgctaaagccggagacccccacctggactatgagctgctggatacagccgaccttccacagctggagtcatccctgcagcccgtctcccccggacgtcttgacgtgagcgaaagtggagtgctgatgcgaagacgtcctgcccgaaggatcctgtcgcaggtgaccatgttagcattccagggagacgctcttctcgagcagatctccgtcattggtggaaacctgaccggcatattcattcacagagtgactcccggaagtgcagccgatcagatggctctgagaccaggcacccagatcgtgatggtgattcgcggatatagccggacgtggcgaccgaaatggcggccacggggaactcatagtacatcaggctcaacatggccgtggagagctgggccaaagggatcctgtcgatgcatcgccaccagatcctgtacgtctccgactccctgcagcagggcagccgcagctggtatgccaaccgcatag

SEQ ID NO: 229130 - protein, 264 aa, Artificial Sequence
  derived and/or modified sequence
MENFQKVEKIGEGTYGVVYKARNKLTGEVVALKKIRLDTETEGVPSTAIREISLLKELNHPNIVKLLDVIHTENKLYLVFEFLHQDLKKFMDASALTGIPLPLIKSYLFQLLQGLAFCHSHRVLHRDLKPQNLLINTEGAIKLADFGLARAFGVPVRTYTHEVTRRALFPGDSEIDQLFRIFRTLGTPDEVVWPGVTSMPDYKPSFPKWARQDFSKVVPPLDEDGRSLLSQMLHYDPNKRISAKAALAHPFFQDVTKPVPHLRL

SEQ ID NO: 229131 - DNA, 795 bp, Artificial Sequence
  derived and/or modified sequence
atggagaacttccagaaggtggagaagatcggcgagggcacctacggcgtggtgtacaaggccagaaacaagctgaccggcgaggtggtggccctgaagaagatcagactggacaccgagaccgagggcgtgcccagcaccgccatcagagagatcagcctgctgaaggagctgaaccaccccaacatcgtgaagctgctggacgtgatccacaccgagaacaagctgtacctggtgttcgagttcctgcaccaggacctgaagaagttcatggacgccagcgccctgaccggcatccccctgcccctgatcaagagctacctgttccagctgctgcagggcctggccttctgccacagccacagagtgctgcacagagacctgaagccccagaacctgctgatcaacaccgagggcgccatcaagctggccgacttcggcctggccagagccttcggcgtgcccgtgagaacctacacccacgaggtgaccagaagagccctgttccccggcgacagcgagatcgaccagctgttcagaatcttcagaaccctgggcacccccgacgaggtggtgtggcccggcgtgaccagcatgcccgactacaagcccagcttccccaagtgggccagacaggacttcagcaaggtggtgccccccctggacgaggacggcagaagcctgctgagccagatgctgcactacgaccccaacaagagaatcagcgccaaggccgccctggcccaccccttcttccaggacgtgaccaagcccgtgccccacctgagactgtag

SEQ ID NO: 229132 - DNA, 1260 bp, Artificial Sequence
  derived and/or modified sequence
ttgtttcaagttggccaaattgacaagagcgagaggtatactgcgttccatcccgacccggggccacggtactgggccctgtttccccctcctcggcccccgagagccagggtccgccttctgcagggttcccaggcccccgctccagggccgggctgacccgactcgctggcgcttcatggagaacttccaaaaggtggaaaagatcggagagggcacgtacggagttgtgtacaaagccagaaacaagttgacgggagaggtggtggcgcttaagaaaatccgcctggacactgagactgagggtgtgcccagtactgccatccgagagatctctctgcttaaggagcttaaccatcctaatattgtcaagctgctggatgtcattcacacagaaaataaactctacctggtttttgaatttctgcaccaagatctcaagaaattcatggatgcctctgctctcactggcattcctcttcccctcatcaagagctatctgttccagctgctccagggcctagctttctgccattctcatcgggtcctccaccgagaccttaaacctcagaatctgcttattaacacagagggggccatcaagctagcagactttggactagccagagcttttggagtccctgttcgtacttacacccatgaggtgactcgccgggccctattccctggagattctgagattgaccagctcttccggatctttcggactctggggaccccagatgaggtggtgtggccaggagttacttctatgcctgattacaagccaagtttccccaagtgggcccggcaagattttagtaaagttgtacctcccctggatgaagatggacggagcttgttatcgcaaatgctgcactacgaccctaacaagcggatttcggccaaggcagccctggctcaccctttcttccaggatgtgaccaagccagtaccccatcttcgactctgatagccttcttgaagcccccagccctaatctcaccctctcctccagtgtgggcttgaccaggcttggccttgggctatttggactcaggtgggccctctgaacttgccttaaacactcaccttctagtcttggccagccaactctgggaatacaggggtgaaaggggggaaccagtgaaaatgaaaggaagtttcagtattagatgcacttaagttagcctccaccaccctttcccccttctcttagttattgctgaagagggttggtataaaaataattttaaaaaa

SEQ ID NO: 229133 - DNA, 795 bp, Artificial Sequence
  derived and/or modified sequence
atggagaatttccagaaagtcgagaagatcggagaaggaacatatggggtggtatacaaagccagaaataagcttactggggaggtcgtggctctgaagaagatccgcctggacacggagaccgagggggtgccttccactgcaattcgggagatatctttgctaaaggagctgaaccatccaaatatcgtcaagctgctggacgtcatacatactgaaaataagctgtacctcgtctttgagttcctgcaccaggatctgaagaaattcatggacgccagtgctcttactggcattcctctgccactcattaagtcttatctcttccagttgctgcagggcctggccttttgtcacagtcacagagtgctgcatcgcgaccttaaaccccaaaacctgctgatcaatacagagggagctataaagcttgcggatttcggactggctcgggccttcggggtccccgtccgcacttatacacatgaagtgactcgcagggctctgtttccaggggattcggagattgaccagctgtttcgaatctttcgcacactagggacaccagacgaggtggtgtggccaggggtcacctcaatgccggattacaaaccctctttcccaaagtgggccaggcaggacttttcgaaggtggtacccccccttgacgaggacggtcggtccctcctgagccagatgctccattatgatcccaataagcgtatctctgctaaggcagccctggcccacccgttttttcaggacgtgactaaacccgtccctcaccttcgactctag

SEQ ID NO: 229134 - DNA, 795 bp, Artificial Sequence
  derived and/or modified sequence
atggagaacttccagaaggtggagaagatcggggagggcacctatggagtggtgtacaaggccaggaacaagctgaccggggaggtggtggccctgaagaagatccggctggacacagaaacagaaggagtgcccagcacagccatccgggagatcagcctgctgaaggagctgaaccaccccaacatcgtgaagctgctggatgtgatccacacagagaacaagctgtacctggtgtttgagttcctgcaccaggacctgaagaagttcatggatgccagcgccctgaccggcatccccctgcccctcatcaagagctacctgttccagctgctgcagggcctggccttctgccacagccaccgggtgctgcaccgggacctgaagccccagaacctgctgatcaacacagaaggagccatcaagctggccgactttggcctggcccgggccttcggcgtgcctgtgaggacctacacccatgaggtgacccggcgggccctcttccctggggacagcgagattgaccagctgttccgcatcttccgcaccctgggcaccccagatgaggtggtgtggccaggagtgacctccatgccagactacaagcccagcttccccaagtgggcccggcaggacttcagcaaggtggtgccccccctggatgaagatggccgcagcctgctgagccagatgctgcactatgaccccaacaagaggatcagcgccaaggccgccctggcccaccccttcttccaggatgtgaccaagcctgtgccccacctgcggctgtag

SEQ ID NO: 229135 - DNA, 795 bp, Artificial Sequence
  derived and/or modified sequence
atggagaacttccagaaggtggagaagatcggcgagggcacctacggcgttgtgtataaagcaagaaataagctgaccggtgaagtcgtggcgttgaagaagatccggttggataccgaaaccgagggcgtgccgtccacagccatcagagagatttcactgctgaaggagttaaaccacccgaatatagtcaagctgctagacgtcattcataccgagaacaaattgtatctagtgtttgaatttctgcaccaggacctgaagaaatttatggatgccagcgccttgacgggcatcccactcccgcttattaaatcttacctgtttcaattgctacaggggcttgcattttgtcatagccaccgggttctacaccgggacctgaagccccagaacttactgataaatactgaaggcgctataaagctcgcggacttcggtcttgcgagagccttcggagtccccgtacgaacctatacccatgaggttaccagacgcgctttattccctggcgattctgagattgaccagctgtttcgaatttttcggacactagggacccctgacgaggtggtctggcctggagtcacctctatgccggattataagccatcctttcccaaatgggctagacaggacttcagcaaggtggtgccgcccctggatgaggacggtagatctctgctgtcacaaatgttgcactacgatcctaacaaacgtatcagtgctaaagcggcactagctcaccccttttttcaggatgtgaccaaacccgtcccccatcttcgtctctag

SEQ ID NO: 229136 - DNA, 795 bp, Artificial Sequence
  derived and/or modified sequence
atggaaaatttccaaaaggtggaaaaaatcggagaggggacctacggggtggtgtacaaagcacgcaacaagttgactggcgaagtcgtggcattgaagaaaattcggcttgacactgaaacggaaggcgttccttccaccgccatcagagagatcagtctgcttaaagaactcaaccatccaaatattgtgaagcttctcgatgtcatacacacggagaataagctatacctggtgttcgagtttttgcaccaggatctcaaaaaattcatggacgcctcagcattgactggcatccccctgccactcatcaaatcttacctgttccaactgctgcaaggtctggccttttgtcattcccatcgcgtgctccaccgagacctgaagccccagaatttactgataaatacggagggcgctattaagctggctgacttcggtctcgccagggcttttggagtgcctgtcagaacctacacgcatgaggtaacaaggcgggcactcttccccggagacagcgagattgatcagctgttcagaatctttagaactcttgggacacccgacgaagtggtgtggcccggagtcacatctatgcctgactacaaaccatctttcccaaaatgggccagacaggacttttctaaagtggtgccacctctcgatgaggacgggagatccctgttgtcacagatgttgcattacgatcctaacaagcgtatcagcgctaaggctgctctggcacatccttttttccaagatgttacaaaacccgtgccccatctgcggctgtag

SEQ ID NO: 229137 - protein, 395 aa, Artificial Sequence
  derived and/or modified sequence
MASAASVTSLADEVNCPICQGTLREPVTIDCGHNFCRACLTRYCEIPGPDLEESPTCPLCKEPFRPGSFRPNWQLANVVENIERLQLVSTLGLGEEDVCQEHGEKIYFFCEDDEMQLCVVCREAGEHATHTMRFLEDAAAPYREQIHKCLKCLRKEREEIQEIQSRENKRMQVLLTQVSTKRQQVISEFAHLRKFLEEQQSILLAQLESQDGDILRQRDEFDLLVAGEICRFSALIEELEEKNERPARELLTDIRSTLIRCETRKCRKPVAVSPELGQRIRDFPQQALPLQREMKMFLEKLCFELDYEPAHISLDPQTSHPKLLLSEDHQRAQFSYKWQNSPDNPQRFDRATCVLAHTGITGGRHTWVWMARVPGDSGCCQFCSPPSVLGTEVAA

SEQ ID NO: 229138 - DNA, 1188 bp, Artificial Sequence
  derived and/or modified sequence
atggccagcgccgccagcgtgaccagcctggccgacgaggtgaactgccccatctgccagggcaccctgagagagcccgtgaccatcgactgcggccacaacttctgcagagcctgcctgaccagatactgcgagatccccggccccgacctggaggagagccccacctgccccctgtgcaaggagcccttcagacccggcagcttcagacccaactggcagctggccaacgtggtggagaacatcgagagactgcagctggtgagcaccctgggcctgggcgaggaggacgtgtgccaggagcacggcgagaagatctacttcttctgcgaggacgacgagatgcagctgtgcgtggtgtgcagagaggccggcgagcacgccacccacaccatgagattcctggaggacgccgccgccccctacagagagcagatccacaagtgcctgaagtgcctgagaaaggagagagaggagatccaggagatccagagcagagagaacaagagaatgcaggtgctgctgacccaggtgagcaccaagagacagcaggtgatcagcgagttcgcccacctgagaaagttcctggaggagcagcagagcatcctgctggcccagctggagagccaggacggcgacatcctgagacagagagacgagttcgacctgctggtggccggcgagatctgcagattcagcgccctgatcgaggagctggaggagaagaacgagagacccgccagagagctgctgaccgacatcagaagcaccctgatcagatgcgagaccagaaagtgcagaaagcccgtggccgtgagccccgagctgggccagagaatcagagacttcccccagcaggccctgcccctgcagagagagatgaagatgttcctggagaagctgtgcttcgagctggactacgagcccgcccacatcagcctggacccccagaccagccaccccaagctgctgctgagcgaggaccaccagagagcccagttcagctacaagtggcagaacagccccgacaacccccagagattcgacagagccacctgcgtgctggcccacaccggcatcaccggcggcagacacacctgggtgtggatggccagagtgcccggcgacagcggctgctgccagttctgcagcccccccagcgtgctgggcaccgaggtggccgcctag

SEQ ID NO: 229139 - DNA, 1188 bp, Artificial Sequence
  derived and/or modified sequence
atggcctcagctgcatccgtgacaagcctggctgacgaggtgaactgtccaatctgtcaggggactctgcgcgagcccgtgacaatcgactgtggccacaatttctgtagagcctgcctgacgaggtattgcgaaataccaggacccgatctcgaggaatctccgacatgccctctctgtaaggaaccttttaggccaggttcctttaggcctaactggcagctggccaacgtagtcgagaatattgaacgcttgcagctggtttctaccctgggacttggtgaagaagatgtgtgccaggagcacggcgaaaaaatatattttttctgtgaagacgatgaaatgcaactgtgcgtcgtctgcagggaggccggagaacacgccacccacactatgagatttttagaggacgccgctgccccatatcgcgagcagatccacaagtgcctgaagtgtctgcgtaaggagagggaggagattcaagaaattcagagcagagaaaataagcgtatgcaggtgctactcacccaggtgagcacaaagcggcagcaggttataagtgagttcgctcacctgcgcaagtttctggaggaacagcaatcaattctcttggcacagctggagtctcaggacggggatattcttaggcaacgcgatgagtttgacctactggttgcaggcgaaatttgtcgattctctgccttgattgaggagctagaagaaaagaacgagcgccctgcaagagagctgttgaccgatattaggtccacactcatccgatgcgagacacgaaagtgcaggaagccagtggccgtgtcccctgagctgggccagagaatccgggatttcccccaacaggccctgccgctgcagagagagatgaagatgttcctggaaaagctgtgctttgagctggactatgaaccagcgcacatctcattggatcctcagacaagccacccaaagctcctcctgtccgaggatcaccaacgagcccagtttagttacaagtggcagaattcccccgacaatccccaacgttttgatcgcgctacgtgcgtgcttgcacacacaggaattaccggggggcgtcacacctgggtctggatggcgcgagtgcctggagacagtggctgttgccagttttgttctcccccaagcgttctgggcactgaggtagccgcgtag

SEQ ID NO: 229140 - DNA, 1188 bp, Artificial Sequence
  derived and/or modified sequence
atggccagcgctgcctctgtgaccagcctggctgatgaggtgaactgccccatctgccagggcaccctgcgggagcctgtgaccatcgactgtggccacaacttctgccgggcctgcctgacccgctactgtgagatccctggccctgacctggaggagagccccacctgccccctgtgcaaggagcccttccggcccggcagcttccggcccaactggcagctggccaacgtggtggagaacatcgagcggctgcagctggtgtccaccctgggcctgggggaggaggatgtgtgccaggagcacggggagaagatctacttcttctgtgaagatgatgagatgcagctgtgtgtggtgtgccgggaggccggggagcacgccacccacaccatgaggttcctggaggatgctgctgccccctaccgggagcagatccacaagtgcctgaagtgcctgaggaaggagcgggaggagatccaggagatccagagccgggagaacaagaggatgcaggtgctgctgacccaggtgtccaccaagaggcagcaggtgatcagcgagtttgcccacctgaggaagttcctggaggagcagcagagcatcctgctggcccagctggagagccaggatggagacatcctgcggcagagagatgaatttgacctgctggtggccggggagatctgccgcttcagcgccctgattgaggagctggaggagaagaatgaaagacctgcccgggagctgctgacagacatccgcagcaccctcatccgctgtgagaccaggaaatgtaggaagcctgtggccgtgtccccagagctgggccagaggatccgggacttcccccagcaggccctgcccctgcagcgggagatgaagatgttcctggagaagctgtgctttgagctggactatgagcccgcccacatcagcctggacccccagaccagccaccccaagctgctgctgtctgaggaccaccagagggcccagttctcctacaagtggcagaacagcccagacaacccccagagatttgaccgggccacctgtgtgctggcccacacaggcatcactggaggccgccacacctgggtgtggatggcccgggtgcctggggacagcggctgctgccagttctgcagccccccatctgtgctgggcacagaggtggccgcctag

SEQ ID NO: 229141 - DNA, 1188 bp, Artificial Sequence
  derived and/or modified sequence
atggccagcgccgccagcgtgaccagcctggccgacgaggtgaactgtcctatctgccagggcaccttgagagaaccagttacaattgactgcggacacaacttctgcagagcctgtttgacaagatactgtgagatccctgggcccgatctagaagaaagccccacttgtcccctgtgcaaggagccattcagacccggcagttttcggcccaactggcaattggccaatgtcgtggaaaatatcgagcgcctgcagctagtgagtacgctcggtctcggcgaggaagacgtatgtcaggagcatggggaaaagatttattttttttgcgaggatgatgaaatgcagctgtgcgtggtctgtagagaggccggagaacacgctacacataccatgagatttctggaggatgcggctgccccatacagagaacagatccataagtgcctcaaatgtctgcggaaggagcgtgaagagatacaggaaatccagagcagagagaataaaaggatgcaggtgttgctgacccaggtcagcacaaaacgccagcaggttatcagcgaattcgcccatcttcgcaagtttctcgaggagcaacagtccatcctgctggcccagttggagtcgcaggacggcgacattctcaggcaacgggacgaattcgatctgctcgtggctggagaaatttgtagatttagtgcacttattgaggagttggaagagaagaatgagcgcccggcgagagagctgctaaccgacattcggagcacactcattaggtgcgagactcgcaagtgtcgaaagcctgtggctgtgtcacctgaactgggccagaggattagagattttccacagcaggctttgcctcttcaacgcgagatgaagatgtttctagaaaaactgtgtttcgagttggactacgaacctgctcacatctcattggacccacagaccagccaccccaagcttctcctttcggaggaccatcagagagctcagttctcctacaagtggcaaaactcacctgacaatccacagcggttcgacagggccacgtgtgtacttgcgcacactggcatcactggggggaggcatacctgggtctggatggcgagagtcccaggagactctggttgctgccagttctgtagcccaccttcagtgctggggaccgaagtggccgcatag

SEQ ID NO: 229142 - DNA, 1188 bp, Artificial Sequence
  derived and/or modified sequence
atggcgtcagctgcctccgttacatccttggctgatgaagttaactgccctatctgccagggcaccctccgggaaccagtgaccatagactgtggtcacaacttctgcagggcttgtctgacaaggtactgtgagattcctggtcccgacctggaagagtccccaacttgccctttatgtaaagagccctttaggccgggatcattcaggcccaattggcagctcgctaacgtggtggagaacatcgaacgtctccaactggtgtccactctcggtctaggggaagaagatgtgtgccaggagcacggtgagaaaatttactttttttgtgaggacgatgaaatgcagctttgcgtggtgtgccgggaagcaggcgagcatgccacccataccatgaggtttctggaggacgctgctgccccataccgtgagcagatccataagtgcctgaagtgtctcagaaaggaaagggaggagatccaggagattcaatctcgtgagaataagagaatgcaggtacttttaacccaggtgtctaccaaacggcaacaagtgattagcgagtttgcacacctgagaaaatttctggaagagcaacagtccattctgctcgctcagctcgaatctcaggatggggacatcctgagacagagggatgaatttgacttactcgttgcgggagaaatttgtcgcttcagcgctctgatcgaagaactagaggaaaagaatgaacgccctgcccgagaactgctgacagatattcgcagtacactcattagatgtgagacgagaaaatgcaggaaaccagtggctgtttctccagagctcggacagcgtatccgggacttccctcagcaggctttgccgttacagcgtgaaatgaaaatgtttttggaaaaactgtgctttgagttagattatgagcccgcacacattagcttagacccacaaactagtcaccccaagttgctcctgagcgaagatcatcaaagagcgcaattcagttacaaatggcaaaactcaccggacaacccacagaggtttgacagggccacttgtgtgctggcccacaccggtatcactggaggacgtcacacttgggtgtggatggctagggttccgggtgactctggatgctgccaattctgttccccaccgtctgtcttagggaccgaagtcgccgcatag

SEQ ID NO: 229143 - DNA, 3007 bp, Artificial Sequence
  derived and/or modified sequence
gagtgtgtgacccagcccttcccccgtggccaagcagagagagtggccttgaggaagccatagcagcaggaccagcatggcctctgctgcctctgtgaccagcctggcagatgaagtcaactgccccatctgtcagggtaccctgagggagccggtcactatcgactgcggccacaacttctgccgggcctgccttacccgctactgtgagataccaggcccagacctggaggagtcccctacttgcccactctgcaaagaacccttccgtcctgggagcttccggcccaactggcagctggctaacgtggtggagaacattgagcgcctccagctggtgtccacactgggtttgggagaggaggatgtctgccaagagcacggagagaagatctacttcttctgtgaggatgatgagatgcagttgtgcgtggtgtgccgggaggctggggagcacgctacccacaccatgcgcttcctggaggatgcagcggctccctatagggaacaaatccataagtgtcttaaatgtctaagaaaagagagagaggagattcaagaaatccagtcaagagaaaataaaaggatgcaagtcctcctgactcaggtgtccaccaagagacaacaggtgatttctgagttcgcacacctgaggaagtttctagaggaacagcagagcatcctcttagcacaattggagagccaggatggggacatcttgaggcaacgggatgaatttgatttgctggttgctggggagatctgccggtttagtgctcttattgaagaactggaggagaagaatgagaggccagcaagggagctcctgacggacatcagaagcactctaataagatgtgaaaccagaaagtgccggaaaccggtggctgtgtcgccagagctgggccagaggattcgggactttccccagcaggccctcccgctgcagagggagatgaagatgtttctggaaaaactatgctttgagttggactatgagccagctcacatttctctagaccctcagacttcccaccccaagctcctcttgtccgaggaccaccagcgagctcagttctcctacaaatggcagaactcaccagacaacccccagcgttttgaccgggccacctgtgttctggcccacactggcatcacaggggggagacacacgtgggtgtggatggccagggtacctggggactcaggctgctgccagttctgctcaccaccatccgtgcttggcacagaagtagctgcatagaaagagcactggatttgaagtcagaagacctgggttcttgaaccagcctgtcaaccagttgtatgactttaaacaaggcatctcacctcttttcatcttgttttcttccaataatgttagagttcatgtaatcacattctctagaaccatttagtttgtgttaactatgaaccaagcagtgtggtggccactggtgacttgaaaatatagagaaaaaaaaaacctgctctatatctgaaagagctcttgggaagacagagaaacataaagaggaaattacagcacagtgtggtgggtgttacgggaagtccaaccccagcattatgggagttcaggggaaggggcatagcccagcctggaaggagagggtgagtgggggatggctttctgaaaagggtggtctaaaggatgcctatggtcaatagggaaaagaggggaagaagcatcttaagaagaggaaacagcagagaactggctggatgacctgtgactctggagcactgggttgtctccattgtcattatgggcagatgtgtgccatccccagccgacgccactcactgcctccttcctcctggtgttgccacttctgggtgagattaaggtgcagggcctgggggcaggaggacataaggtatagccataaatcataacccagggaccacactcaaccctagggaaattgtcttcctgatcagttgattaccatctgaggtcaagaaatgagatagtgggagcaaatgggtcacaaatagctcagctgtgggctcagaaactgctaggtaaaagaattccagaaggaggccagggcataagttggatgacctatgaactttagtctaaagaattgagactaccgtaattgagactactgtagtgacatctgagaaatgggatggaagagtgaccatgttttattttcttgttcttgtcactattgtattttattttgcataatcatgcccttcactgacagtctccttaacatcatctgtttactctgctcagtgtaaactacaatgctctgtcatctccctactgggtctcctgggaggaggggagccatccagggtgcaaactcaaaggcagagggcacagcgtgcttaggcccaagcttagaattcaattgagaagttctgttgttcatccttacctcagcaggtagaaaagaggtggagatcagaagccagggattagagattgaattgctttccctgggagtgtgcagtatctcattaaaatgttgtatattcaaaaaaatacagacacacacaagtgcctatataatgataaaacatatccaaagcacccaaacctgtgattccagaaaagtagatcctatttttgtttatttttattggctttagctgtgtcttttgaaaggactattatcctctaaaatgtatgtgtatgaagatcctggcttgcagctcgggagctttacacaccttgtgtcactttatcttggtaacgagccaagatcatgcaaccagttcatccatgtctgacccaagagctcttaactgctatgctgcactgcctcattcagagatagatgcctgcatgggtcctggcgattattttaatgctggctacacccccacaggtgacttggattcagaaatacaatttatatttcttctttttaaattgttttattttatttttcttttaatagttatatgtcagtgagaacaatttatatgtcttacactgagaaataaaactgctcataagtgaaaa

SEQ ID NO: 229144 - DNA, 1188 bp, Artificial Sequence
  derived and/or modified sequence
atggcttccgccgcgagtgttacctctctggctgacgaagtaaattgccctatttgccagggcacgctcagggagccagttaccatagattgtggtcacaacttctgtcgcgcatgtctcacacgttattgcgaaattcccggtccagatctggaggagtccccaacgtgtccattatgcaaagagccgtttagaccaggcagctttaggccaaactggcagctggccaatgtcgttgagaacatagagaggctccagcttgtgtctacccttgggctgggagaagaggacgtttgtcaggagcacggagaaaagatctacttcttttgcgaagatgacgagatgcagctctgcgtagtctgtcgagaggccggcgaacacgcaacgcatactatgcggttcctggaagacgctgccgcaccttaccgagagcagattcacaaatgcttgaaatgcctgcgtaaagaacgcgaagaaattcaggaaatccagtcgcgggaaaataaacgcatgcaagtgttactgacacaggtgagtactaagcgccagcaggtcatctctgagttcgcccacttgcgcaagtttctggaggagcagcagtctatccttctggcccagctagagagccaggacggcgatattttaaggcagcgggacgaatttgaccttctggtagcaggagagatttgtcggttctccgccctgattgaggagctggaggagaaaaacgaaagaccggccagagagttgctgaccgacattcgcagtactctcatccgctgcgagacgagaaaatgtcggaaacccgtggccgtctcacctgaactggggcaacgcattagggactttccgcagcaggcgttgccccttcagagagaaatgaagatgtttctggagaagttgtgctttgaactcgattacgaacctgctcatatttctcttgacccacagacatcacatccgaagctgctgctgtctgaagatcatcagagagcacagttcagctacaagtggcagaactctccagacaaccctcagcgatttgatcgcgccacctgtgtgctggctcatacaggtattacaggggggcgacacacatgggtgtggatggctcgagttccaggggatagcggatgctgccagttctgcagcccaccgtctgttctaggtacggaggtcgctgcttag

SEQ ID NO: 229145 - DNA, 1188 bp, Artificial Sequence
  derived and/or modified sequence
atggccagcgcagccagcgttacatcactggcggacgaggtcaattgcccaatctgtcaagggacccttcgggagccagtcacgatcgattgtggtcacaacttctgccgagcctgtctcactcggtattgcgagatccctggtcctgacctcgaagaatccccaacatgccctctctgtaaagagcctttccgcccaggcagcttccgacctaattggcagctggctaacgtggtagagaacatcgagcggttgcagctcgtatccacactcggattgggagaggaagatgtctgccaagaacacggggagaagatctattttttctgtgaagacgacgagatgcagctttgcgtcgtctgcagggaggctggagaacacgctacacacacaatgcggttcctcgaggacgccgccgcgccatatagagaacagatccacaaatgtctgaaatgtctgcgtaaggagagagaagaaatacaagagatccagtccagagagaacaaacgcatgcaggtgctactgacacaggtttccacaaaaagacagcaagtgatctctgaattcgctcaccttcgtaagttcctggaagagcagcagtccatcctactcgcacagctggagagtcaagacggagacatcctgaggcagagggacgagttcgaccttctggtcgcaggcgagatctgccgattctccgccttaatcgaggaactggaagagaagaacgagagaccagctcgagagctgttaaccgatattagaagcaccctcattcgctgtgagacacgtaagtgccggaaacccgtagctgtatctccagaactgggccaacggatccgtgacttccctcagcaagcactgcccctgcaaagagaaatgaagatgttcctggaaaagctgtgcttcgaactggattacgaaccagcccatataagtctcgatcctcagacctcacaccctaagcttttgctatctgaggaccaccagagggcccagttctcctataagtggcagaatagccccgacaacccccagcgtttcgatagggcaacctgtgtgctcgcccacaccggcattaccggaggaaggcacacatgggtctggatggccagggtgcccggcgattcaggatgctgccaattttgcagcccaccaagcgtcttaggaacagaggtggccgcatag

SEQ ID NO: 229146 - DNA, 1188 bp, Artificial Sequence
  derived and/or modified sequence
atggctagcgctgcctctgttacctctttggccgacgaggtgaattgtccaatatgtcaaggcacactgcgcgagccggtcaccattgattgcggacataatttttgccgcgcctgtctgactcgatactgtgagataccaggtccagacctggaggaaagccccacttgcccactctgcaaagagccgttcaggcccggatcattcagaccaaactggcagttagccaatgtagtagaaaacatcgaaagactccagctagtgtcaaccctggggttgggggaggaagacgtgtgccaagaacacggcgaaaagatttattttttctgcgaagacgatgagatgcagttgtgcgttgtctgccgcgaggcaggagagcacgcaacccacactatgcgattcctggaggatgcagcggcgccctaccgtgagcaaatccataaatgcctcaaatgtctgcgcaaggaacgggaggaaattcaggaaatccagtctcgtgagaacaaaaggatgcaggttctgctgactcaggttagcaccaaacggcaacaagtcatctccgagtttgcccacctccgcaagttcctggaagaacagcagtcaattctgctggcgcagctcgagagccaggatggcgatattttgcgccagagagatgaattcgatctcctggtggcaggggagatttgcaggttcagcgctctaatcgaggagctcgaagagaaaaatgaaaggccagcaagagagctgttgactgatatcaggtcgaccctgatacgatgtgagacacgaaagtgtaggaagcctgtcgccgtgagtccggagctggggcaacggatccgcgattttcctcagcaagccttgcctctgcaaagggaaatgaagatgtttcttgagaaattatgttttgagctggactatgaaccagcccacataagcctggacccgcaaacctcacacccaaaactgcttcttagtgaggatcatcaacgagctcagttctcctacaaatggcagaatagtcctgacaaccctcagcgattcgaccgggcaacatgcgtgttggcacatacgggtattacgggtggccgacatacttgggtatggatggctcgggtgcccggtgattcaggctgttgtcaattctgctcgccacctagtgtgctgggaacggaggtggctgcgtag

SEQ ID NO: 229147 - DNA, 1188 bp, Artificial Sequence
  derived and/or modified sequence
atggcgagcgctgcatccgtcaccagtctggctgatgaggtgaactgtcccatctgccagggaacactccgggagccagtgacaatagattgtggccataatttttgtcgggcttgccttactagatactgcgagatcccaggccccgatctcgaggaaagccctacttgcccattatgcaaggagcccttccgacccgggagctttagacccaactggcaactggctaatgtggtggagaacatcgagagactgcagctggttagtaccttgggtctcggagaagaggatgtctgccaggaacacggcgagaagatttatttcttctgcgaggacgatgaaatgcagctatgcgtcgtctgcagggaagccggtgaacacgccacacatactatgcgctttctagaagacgcggctgcgccttatagggagcagatccacaaatgcctcaagtgcctgagaaaggagcgcgaagagattcaggaaatacagagccgcgagaacaagcggatgcaagtgcttctgactcaggtctctactaagagacagcaagtcatatcggaattcgctcacctacgaaaatttctcgaggagcaacagtctatcttgctggcccagctcgaaagccaagatggtgacatcctgcgccagcgggacgagtttgacctgttggtagctggggagatctgccggttttcggcccttatcgaggagctggaggaaaagaatgaaaggcccgcacgtgaattactcactgatatccgcagcactttaatcaggtgcgaaacgcgcaagtgccgcaaaccagtggctgtgtctcctgagctgggacagcgaattcgtgacttccctcagcaagcgctgccacttcagagagagatgaaaatgttcctagagaagctttgttttgagcttgactacgaacccgcccacatctccctggatccgcagacatcacatccgaagcttttgctcagtgaagatcaccaacgtgcgcagttttcttacaagtggcaaaatagcccggacaacccacagcgatttgatagagccacctgcgtgctcgcccacaccgggatcactggaggccgccacacgtgggtgtggatggcccgcgtgcccggagactcaggatgttgtcagttttgcagccctccatccgtcctgggcacagaggtagcagcttag

SEQ ID NO: 229148 - DNA, 1188 bp, Artificial Sequence
  derived and/or modified sequence
atggcctcagcagctagcgttacttctctggccgacgaagtgaattgccccatctgccaggggactctacgggaaccagttacgattgactgcggtcataacttttgcagggcctgtttgacgaggtattgtgagattccagggcccgatctcgaggaatcccccacgtgtcctttgtgtaaggagccttttcgcccaggctcatttcgcccgaactggcaactggcaaacgttgtggagaacatcgagaggctgcagctggtcagcactctcgggcttggcgaggaggatgtctgccaggaacacggagagaaaatctacttcttctgcgaggacgacgagatgcagttgtgcgtggtctgcagggaagctggggaacatgcgacccacacaatgcgcttcctggaagatgccgctgcgccttacagagagcagattcataaatgcctgaaatgtctgagaaaggaacgagaagaaatacaggaaattcaatccagggaaaacaaacgaatgcaggtgctcttaacccaggtctctaccaagcgtcaacaagtcatctcggaatttgcgcatcttcgcaaattcttagaggaacaacagagcattcttttggcacagttggagtcccaggacggggacattttaaggcagagggatgaattcgacctattagtggctggtgaaatttgtagattctctgctttgatagaggaactggaagagaagaacgaaaggcccgcaagggaacttttaacagatataaggagtactctgatccgatgcgaaaccagaaagtgtcgcaagccagtggccgtgtctccagaactggggcagcggattcgggatttcccacagcaggcactgcctctccagagagaaatgaagatgttcctcgaaaagctctgctttgaactcgattatgaacccgcccatatcagcctcgacccccagacaagccatcctaagctgcttctctccgaagatcaccagcgggcccagttttcctataagtggcaaaactcaccagataatcctcagaggtttgatcgcgccacttgcgtcctggcacacacgggcatcactggcggccgccatacctgggtgtggatggccagggtccctggggacagcggctgctgccagttttgcagcccacctagtgtcctcgggaccgaggtggccgcttag

SEQ ID NO: 229149 - DNA, 1188 bp, Artificial Sequence
  derived and/or modified sequence
atggcttccgctgcttctgtcacttcactcgcagacgaggtaaactgccctatctgccagggcacgctccgagaacccgtcaccatcgattgcggtcacaacttctgccgggcatgcctgacaaggtattgcgagataccgggaccggatctggaagaatctccaacctgccccctctgcaaagagccttttcgacccggttcctttcgacctaattggcagctggcgaacgtcgttgaaaatattgaaagattgcagttagtttccacattgggcttgggcgaggaggatgtgtgccaggaacatggagagaaaatctattttttctgtgaggacgatgagatgcagctctgtgtggtttgtagggaggccggcgagcatgcaactcacacgatgaggttcctggaggacgccgcagccccataccgcgaacagattcacaagtgcctaaagtgccttcgcaaggaaagagaggagatacaggaaatccaatcaagagagaacaagcggatgcaggtgctgctcacccaggtgtccactaagcgtcagcaggtgatctcagagttcgcccacctgaggaagttcttagaggaacagcagagtatcttattggcccagctggagtctcaggatggtgatattctgagacagcgggatgaatttgacttgctggtggctggagaaatctgtagatttagcgccctgatagaggaactggaggaaaaaaacgagagacccgcacgtgagctgctcacggatattaggtccacattgattcggtgcgagaccagaaaatgccgcaaacctgtggccgtttcaccggaactgggccagagaatcagggactttccccagcaagcacttcctctccagcgcgaaatgaagatgttccttgaaaaattgtgcttcgagctcgattacgaaccggcacacatctcactggacccccaaacgagtcatcccaaactccttctctctgaagatcatcagagagctcagttttcttacaagtggcaaaatagccccgataaccctcagagatttgacagagcaacttgcgttctagcgcacactgggattacagggggccgccacacttgggtgtggatggctcgcgtgcctggcgactccgggtgctgccagttctgttccccgccttccgtacttggaaccgaggttgccgcttag

SEQ ID NO: 229150 - DNA, 1188 bp, Artificial Sequence
  derived and/or modified sequence
atggcttcggccgcttctgtcaccagcctcgccgatgaagtaaattgcccaatttgccaggggactttacgggagcctgtgacaatcgactgtggacacaatttctgtcgcgcttgcctgacgagatactgcgagattcccggaccggacctggaagagtccccaacatgtcccctttgcaaagagccttttcggcctggatcctttagacccaactggcagttggcaaacgtggttgaaaatattgagaggctgcagcttgtttccaccttgggcctcggagaagaggacgtttgccaagagcatggcgagaagatttacttcttttgcgaagatgacgaaatgcagctgtgtgtggtatgtcgcgaggcgggagagcacgcaactcacacaatgcgattcctagaagatgccgcggcaccataccgcgagcagattcataagtgcctgaaatgcttgaggaaggagagagaagaaatacaggagatccaatcacgcgagaataaacggatgcaagttttactcacgcaggtgagtactaaacgccagcaggttatcagtgagtttgcccatctcaggaaatttctggaggagcagcagagtattctgctggcccaactggaaagtcaggatggggacatcctcagacagagagatgagtttgatctgctggtggctggagaaatctgtcggttttcagcacttatcgaagaactggaagagaagaacgaaaggccggccagggagttactgaccgacatccgctccactctgattcggtgtgaaacccgtaagtgcaggaagcctgtggctgtgtcacctgagctgggacaacgcattcgggactttccacagcaagcgctccctctgcaacgggaaatgaagatgtttttggagaagctctgttttgaactggattacgaacccgcgcacatctctttagacccgcagaccagccaccccaagctgctcctcagcgaagatcaccagagagctcaatttagctacaagtggcagaatagtcccgataacccccagagatttgatcgcgccacttgcgtgctggcacacaccggcataacaggcggccgacacacatgggtttggatggctcgtgtgcctggtgactcaggatgttgccaattctgttctcccccaagcgtgctcgggactgaagtggccgcatag

SEQ ID NO: 229151 - DNA, 3007 bp, Artificial Sequence
  derived and/or modified sequence
gagtgtgtgacccagcccttcccccgtggccaagcagagagagtggccttgaggaagccatagcagcaggaccagcatggcctctgctgcctctgtgaccagcctggcagatgaagtcaactgccccatctgtcagggtaccctgagggagccggtcactatcgactgcggccacaacttctgccgggcctgccttacccgctactgtgagataccaggcccagacctggaggagtcccctacttgcccactctgcaaagaacccttccgtcctgggagcttccggcccaactggcagctggctaacgtggtggagaacattgagcgcctccagctggtgtccacactgggtttgggagaggaggatgtctgccaagagcacggagagaagatctacttcttctgtgaggatgatgagatgcagttgtgcgtggtgtgccgggaggctggggagcacgctacccacaccatgcgcttcctggaggatgcagcggctccctatagggaacaaatccataagtgtcttaaatgtctaagaaaagagagagaggagattcaagaaatccagtcaagagaaaataaaaggatgcaagtcctcctgactcaggtgtccaccaagagacaacaggtgatttctgagttcgcacacctgaggaagtttctagaggaacagcagagcatcctcttagcacaattggagagccaggatggggacatcttgaggcaacgggatgaatttgatttgctggttgctggggagatctgccggtttagtgctcttattgaagaactggaggagaagaatgagaggccagcaagggagctcctgacggacatcagaagcactctaataagatgtgaaaccagaaagtgccggaaaccggtggctgtgtcgccagagctgggccagaggattcgggactttccccagcaggccctcccgctgcagagggagatgaagatgtttctggaaaaactatgctttgagttggactatgagccagctcacatttctctagaccctcagacttcccaccccaagctcctcttgtccgaggaccaccagcgagctcagttctcctacaaatggcagaactcaccagacaacccccaacgttttgaccgggccacctgtgttctggcccacactggcatcacaggggggagacacacgtgggtgtggatggccagggtacctggggactcaggctgctgccagttctgctcaccaccatccgtgcttggcacagaagtagctgcatagaaagggcactggatttgaagtcagaagacctgggttcttgaaccagcctgtcaaccagttgtatgactttaaacaaggcatctcacctcttttcatcttgttttcttccaataatgttagagttcatgtaatcacattctctagaaccatttagtttgtgttaactatgaaccaagcagtgtggtggccactggtgacttgaaaatatagagaaaaaaaaaacctgctctatatctgaaagagctcttgggaagacagagaaacataaagaggaaattacagcacagtgtggtgggtgttacgggaagtccaaccccagcattatgggagttcaggggaaggggcatagcccagcctggaaggagagggtgagtgggggatggctttctgaaaagggtggtctaaaggatgcctatggtcaatagggaaaagaggggaagaagcatcttaagaagaggaaacagcagagaactggctggatgacctgtgactctggagcactgggttgtctccattgtcattatgggcagatgtgtgccatccccagccgacgccactcactgcctccttcctcctggtgttgccacttctgggtgagattaaggtgcagggcctgggggcaggaggacataaggtatagccataaatcataacccagggaccacactcaaccctagggaaattgtcttcctgatcagttgattaccatctgaggtcaagaaatgagatagtgggagcaaatgggtcacaaatagctcagctgtgggctcagaaactgctaggtaaaagaattccagaaggaggccagggcataagttggatgacctatgaactttagtctaaagaattgagactaccgtaattgagactactgtagtgacatctgagaaatgggatggaagagtgaccatgttttattttcttgttcttgtcactattgtattttattttgcataatcatgcccttcactgacagtctccttaacatcatctgtttactctgctcagtgtaaactacaatgctctgtcatctccctactgggtctcctgggaggaggggagccatccagggtgcaaactcaaaggcagagggcacagcgtgcttaggcccaagcttagaattcaattgagaagttctgttgttcatccttacctcagcaggtagaaaagaggtggagatcagaagccagggattagagattgaattgctttccctgggagtgtgcagtatctcattaaaatgttgtatattcaaaaaaatacagacacacacaagtgcctatataatgataaaacatatccaaagcacccaaacctgtgattccagaaaagtagatcctatttttgtttatttttattggctttagctgtgtcttttgaaaggactattatcctctaaaatgtatgtgtatgaagatcctggcttgcagctcgggagctttacacaccttgtgtcactttatcttggtaacgagccaagatcatgcaaccagttcatccatgtctgacccaagagctcttaactgctatgctgcactgcctcattcagagatagatgcctgcatgggtcctggcgattattttaatgctggctacacccccacaggtgacttggattcagaaatacaatttatatttcttctttttaaattgttttattttatttttcttttaatagttatatgtcagtgagaacaatttatatgtcttacactgagaaataaaactgctcataagtgaaaa

SEQ ID NO: 229152 - DNA, 1188 bp, Artificial Sequence
  derived and/or modified sequence
atggccagcgccgccagcgtgaccagcctggccgacgaggtgaactgtccgatctgccagggcacgttgagggagccagtaacgattgactgtgggcataacttctgtagggcctgcctgacacgctactgcgagataccgggacccgatctggaggaatccccaacatgcccactgtgtaaagagccatttaggccagggtccttccgcccaaactggcaactggctaacgtggtggagaacatcgagaggcttcagctcgtgagcacattggggctcggcgaggaagatgtgtgtcaggagcatggcgaaaagatctactttttctgcgaagatgacgaaatgcagctctgcgtggtttgccgggaggccggggagcatgccacccacacaatgagatttttggaggacgccgcagccccatatcgcgagcagattcataagtgtctcaagtgtctcagaaaggagagggaagagatccaggaaatacagtctagagaaaataaaagaatgcaagtactgcttactcaggtatcaaccaaacggcagcaagtgattagcgagttcgcgcaccttcgaaaatttcttgaggagcagcagtccatcctcttagcgcagctggaatcacaggacggggatattctgaggcaacgagatgaattcgacctgctggtcgccggcgaaatatgtagattttctgctttgatagaagagttggaggaaaaaaacgagcgcccagccagagagctcctcactgatattagatccactctcattaggtgcgaaactcgtaagtgtcggaagcccgtggccgtgtcacccgaattaggacagcgaatccgcgactttccacaacaggctctgcccctccagagggagatgaagatgttcctggagaagctatgctttgagctggattacgagccggctcacatttcgcttgacccccagacctctcatccaaaacttttactgtcggaggatcaccagagggcccaattctcctacaagtggcagaactcgccagataatcctcagcggtttgaccgggccacctgcgtcctcgcgcataccggtattactggaggtcgccacacgtgggtttggatggcccgggtgcccggagattccggttgttgtcagttttgtagcccaccatcagtcctgggaactgaggtggctgcctag

SEQ ID NO: 229153 - DNA, 1188 bp, Artificial Sequence
  derived and/or modified sequence
atggccagcgccgccagcgtgaccagcctggccgacgaggtgaactgcccaatctgccagggcacactgcgagagcctgtgacgatagactgcggacataatttctgtagggcttgtctaactagatactgcgaaattcctggcccagacctggaggagtctccgacttgtcctctgtgtaaggagcctttcaggcccggctcttttagaccaaactggcagctcgctaacgttgttgaaaacatcgaacggttacagcttgtctctactttgggcctgggcgaggaggacgtatgtcaggaacatggcgaaaagatttattttttttgtgaggacgatgagatgcaactgtgcgtggtctgtcgtgaagcaggtgagcatgcaacacacaccatgagatttttggaagacgcagccgccccctacagagagcagatccataagtgcctcaaatgcctgaggaaagaaagagaggagattcaagaaattcaatccagagaaaacaaacggatgcaggtacttctcactcaagtatcaaccaagcggcagcaagtcatttcagaattcgctcacctgaggaaattcttagaagagcagcagagcattttgttagcacaattagaatctcaggacggcgatatcctgagacagcgggatgaatttgaccttctagtagctggtgaaatttgcaggttctcagccctgatcgaagagctcgaggagaaaaacgagagacccgcccgcgaactgctaacagatatacgatcaacgctgatccgttgcgaaacccgaaagtgtcgtaaacccgtcgctgtcagcccagagctaggccagcgtatccgcgatttccctcagcaggccttgcctctgcagagggagatgaaaatgttcctggagaagctctgctttgaattagattacgagcctgcccacatttccctcgacccgcagacatcgcatccgaagctgttgctctccgaagaccatcagagagcacagttctcttacaaatggcaaaacagcccagataacccccagcgatttgatagagcaacatgtgtcttggcacatacgggtattaccggtggaaggcacacgtgggtctggatggcgagggtgccaggtgattcggggtgctgtcaattctgttcacctcctagcgtgttgggaaccgaggtggcggcatag

SEQ ID NO: 229154 - DNA, 1188 bp, Artificial Sequence
  derived and/or modified sequence
atggccagcgccgccagcgtgaccagcctggccgacgaggtgaactgccctatttgccagggcaccctgcgggagcccgtgacaattgactgtggccacaatttctgcagagcctgcctgaccaggtattgtgagatacctggaccggacttggaggagagtccaacttgtccgctctgcaaagaacccttcagacctggatcttttcgacccaactggcagctggccaacgtggttgagaacattgaaaggctacagctggtttcgactcttggactgggcgaagaggatgtgtgccaagagcacggagaaaagatctacttcttttgcgaggacgatgaaatgcagctgtgcgttgtatgcagggaagccggcgaacatgctacccacactatgcggttcctggaggacgcagctgccccatacagggaacagatccacaagtgcctcaaatgcctcaggaaggagcgtgaggaaatccaagagatccagtcccgggagaataagaggatgcaagtgctgctgacacaagtgtctaccaaaaggcagcaggttatctccgagttcgcccatctgaggaaattcctcgaggagcagcagagtatcctgctggcccagttggaaagccaggatggagatatccttcggcagcgggatgaatttgacctgctggtggcaggagagatctgccggttcagcgcactgatcgaagaactggaggagaaaaatgaaagaccggccagagagcttttaactgatatccggtccacacttatccgttgcgaaacgaggaagtgtcgcaagcccgtggcggtttcccccgaattgggtcaacgtattcgcgattttccccagcaggccctgcctctgcaaagagagatgaagatgtttctcgaaaagttatgcttcgagcttgactacgaaccagctcacatctcattggaccctcagaccagccaccctaagttactcctgagtgaagatcaccaaagggcgcaattctcatataagtggcagaattctcccgataaccctcagcgcttcgaccgtgctacatgcgtcttagctcatacaggcattacaggcggccgccatacgtgggtttggatggctagagtgcccggcgatagcggctgctgtcaattctgctcaccaccctcggtcttgggaaccgaagtcgctgcctag

SEQ ID NO: 229155 - DNA, 1188 bp, Artificial Sequence
  derived and/or modified sequence
atggccagcgccgccagcgtgaccagcctggccgacgaggtgaactgtccgatctgccaggggactctgcgggaacccgtcaccatcgactgcggacacaatttctgtcgggcttgtctgacacgttactgtgagatccccgggcctgacctcgaggagagtccgacttgtcccctgtgcaaggagcctttcaggcctgggagcttcagacccaattggcagctggctaatgtcgtcgagaacatagagcgcctgcagttagtatccacgctcggcctgggcgaggaagatgtgtgtcaggaacacggtgagaagatttactttttttgcgaagacgacgagatgcagctctgcgtcgtttgtcgtgaggctggcgaacacgcaactcacaccatgcgcttcctagaagatgcagctgctccctatagggagcagatccacaaatgcttaaaatgcctaagaaaagagcgggaggaaattcaagaaattcaatcccgggaaaataagaggatgcaggtcctgctcactcaggtgtcgaccaagcgacagcaagttatctctgaatttgcacatctcaggaagtttttagaagaacagcagagcatactcctggcgcagctggaaagccaggacggcgacatactacggcagcgggatgaatttgatttgctggtagctggggagatctgtcgtttttctgccttaatagaggaattagaagagaagaatgagagacccgcccgcgagttgctgacagacatcaggtcaaccctgataagatgcgagacacgtaagtgccgcaagcccgttgcagtaagccctgagcttggacaacggatacgcgatttccctcaacaagcactgcccttgcagagggagatgaaaatgttcttggaaaaactctgctttgaacttgactatgaacctgctcatatttccctggaccctcagacgtcccaccccaagctgctgctgtccgaggaccaccagagagcccagttcagctataagtggcaaaattcccctgataatcctcagcgctttgatcgcgcaacatgcgtgctcgctcatacaggcattaccggaggtaggcacacatgggtctggatggcaagggtcccaggtgattccggctgttgtcagttctgcagtcccccatcagtcctgggtactgaggttgcagcctag

SEQ ID NO: 229156 - DNA, 1188 bp, Artificial Sequence
  derived and/or modified sequence
atggccagcgccgccagcgtgaccagcctggccgacgaggtgaactgtcctatttgccagggcacattgagggagcccgttaccatcgactgtggacacaacttctgtagagcctgtcttacacggtactgtgaaatcccaggtcctgacctggaggagtctcctacctgtcctctctgtaaagagccattcagaccggggtcatttaggcctaattggcaattggccaacgttgtcgagaacattgaaagacttcagctggtgtcaacccttgggctcggggaagaagatgtttgccaggagcacggggaaaagatttacttcttttgcgaggacgacgagatgcagctatgtgtggtgtgtagagaagctggggaacacgctactcatacgatgagattcctggaagacgctgccgccccttaccgtgagcagattcataaatgtttaaagtgccttcgcaaagaacgtgaagagattcaggagatacaaagtagagaaaacaagaggatgcaggtcctcctgacacaggtatccacgaaacgccaacaggtcatctccgagtttgcccatttgagaaaattcctggaagaacagcagtcaatccttcttgcccagctggaaagtcaggacggagatatactccgtcaacgagatgagtttgacttgctggtggccggggaaatttgtcgtttcagcgcgttaatcgaggagctggaggagaagaatgagcggcccgccagagagctgttgaccgacataagatcaacactaatccgttgcgaaactaggaagtgccgcaaacctgtggccgtctcaccggaactgggtcaaaggataagagatttcccccaacaggctctcccactccagagggaaatgaagatgttcctcgagaaactgtgtttcgagctggattatgagccagcacacatatctctcgacccccagacctctcatcctaaacttttgctcagcgaagatcaccagcgtgcccagtttagttacaaatggcagaatagtccggacaatccgcagcggtttgatcgggcaacttgtgtcctggcccataccggcattactgggggtcgccacacttgggtctggatggcgagggtgccaggcgactcggggtgctgccagttctgcagtcctccatctgtcctcggaactgaggtggcagcgtag

SEQ ID NO: 229157 - DNA, 1188 bp, Artificial Sequence
  derived and/or modified sequence
atggccagcgccgccagcgtgaccagcctggccgacgaggtgaactgccccatctgccaagggaccctccgagagcccgtgactattgattgtggacacaacttctgtagagcctgcttgactaggtattgcgaaatccccggcccagacctcgaagaaagtcccacttgcccgctgtgtaaagagcccttccgtcctggcagttttcgacccaattggcaacttgccaatgtggtcgagaatatcgaacgccttcaattggtttcgaccttaggactcggagaggaggatgtgtgtcaggaacacggggagaaaatctacttcttctgcgaagacgacgaaatgcagctgtgcgtggtgtgtagggaggctggggaacatgctacacacacgatgcggtttctggaagatgccgctgccccatatcgggaacaaatacacaaatgtctgaaatgtctaaggaaagagcgggaggaaatacaagagatacagagtcgtgagaacaaacggatgcaggtcctcctgacacaggtaagcacaaaacgccagcaagtgatttctgagttcgcgcacctgcgcaagttcctggaagaacaacagagtatcctgttggctcagttagaatctcaggacggcgatatcttgcgccagcgagatgaattcgatctgctcgttgccggcgaaatatgtagatttagtgcattgatcgaagagctcgaggaaaaaaatgagcgcccagctcgggagctcctgacagatatacgcagcactttgatccggtgcgaaacgcggaagtgtagaaagcccgttgcagtcagtccagaactcggacaaagaatccgtgatttcccacagcaggcgctgccacttcaacgggaaatgaagatgttcctcgagaaactctgtttcgaactagattacgagccagctcacatctcattggacccacagacaagccatcctaagttgctactcagtgaggaccaccagcgggcccagttctcctataaatggcagaactctccagataatccgcagagattcgatcgggccacttgtgtgctggcccatactgggattaccggaggcaggcacacgtgggtttggatggctcgcgtgccaggagactctggttgttgtcagttctgctcgcctccttctgtcttgggcacagaagttgccgcctag

SEQ ID NO: 229158 - DNA, 1188 bp, Artificial Sequence
  derived and/or modified sequence
atggccagcgccgccagcgtgaccagcctggccgacgaggtgaactgtcctatttgccagggaacccttcgggaaccagtcaccatagactgcgggcataacttctgccgagcctgcctcactagatactgcgaaatacctgggccagacctggaggaaagccccacatgccccctgtgcaaggagccattccgccccgggtcctttagaccaaactggcagctcgctaacgttgtggagaacatagaacgcctgcagctcgtttctaccttgggactcggggaggaggacgtctgccaggagcatggcgaaaaaatttacttcttttgtgaggatgacgagatgcagctatgcgtggtttgtcgggaggcgggagaacacgccacacataccatgcgttttctagaggatgccgccgcgccatatcgcgaacaaattcacaagtgcctgaaatgtttaagaaaggagagagaggaaattcaggaaattcagagtagagaaaataagcgtatgcaggtcctcttaacgcaggtgtccaccaagcggcagcaagtgatttctgaatttgctcacttacgtaaatttttagaagaacagcagagcatccttctcgcacaactggaatcacaagacggggatatcctgaggcagagggacgaattcgacctgttggttgctggcgaaatctgcaggttctctgccttgatagaggaactggaggagaagaatgagagaccagctcgggagctgctgacagacataagaagtacgctgatacggtgcgagacccgcaagtgcagaaaacccgtggctgtatcaccagagctgggccagcggatccgagattttccgcaacaggcactgccactgcagcgcgaaatgaagatgttcctggagaagctgtgctttgagctggactacgaacccgcccacatatctctggacccgcagacatctcatcccaaactccttctgtccgaggaccaccagcgggcccagttcagttataagtggcagaattcccctgacaacccacagcggttcgatagggccacgtgcgtccttgcccacacagggatcacaggtggcaggcacacatgggtgtggatggcacgtgtacccggcgattccgggtgttgtcagttctgcagtccccccagcgtgcttggcaccgaggtggccgcatag

SEQ ID NO: 229159 - DNA, 3007 bp, Artificial Sequence
  derived and/or modified sequence
gagtgtgtgacccagcccttcccccgtggccaagcagagagagtggccttgaggaagccatagcagcaggaccagcatggcctctgctgcctctgtgaccagcctggcagatgaagtcaactgccccatctgtcagggtaccctgagggagccggtcactatcgactgcggccacaacttctgccgggcctgccttacccgctactgtgagataccaggcccagacctggaggagtcccctacttgcccactctgcaaagaacccttccgtcctgggagcttccggcccaactggcagctggctaacgtggtggagaacattgagcgcctccagctggtgtccacactgggtttgggagaggaggatgtctgccaagagcacggagagaagatctacttcttctgtgaggatgatgagatgcagttgtgcgtggtgtgccgggaggctggggagcacgctacccacaccatgcgcttcctggaggatgcagcggctccctatagggaacaaatccataagtgtcttaaatgtctaagaaaagagagagaggagattcaagaaatccagtcaagagaaaataaaaggatgcaagtcctcctgactcaggtgtccaccaagagacaacaggtgatttctgagttcgcacacctgaggaagtttctagaggaacagcagagcatcctcttagcacaattggagagccaggatggggacatcttgaggcaacgggatgaatttgatttgctggttgctggggagatctgccggtttagtgctcttattgaagaactggaggagaagaatgagaggccagcaagggagctcctgacggacatcagaagcactctaataagatgtgaaaccagaaagtgccggaaaccggtggctgtgtcgccagagctgggccagaggattcgggactttccccagcaggccctcccgctgcagagggagatgaagatgtttctggaaaaactatgctttgagttggactatgagccagctcacatttctctagaccctcagacttcccaccccaagctcctcttgtccgaggaccaccagcgagctcagttctcctacaaatggcagaactcaccagacaacccccagcgttttgaccgggccacctgtgttctggcccacactggcatcacaggggggagacacacgtgggtgtggatggccagggtacctggggactcaggctgctgccagttctgctcaccaccatccgtgcttggcacagaagtagctgcatagaaagggcactggatttgaagtcagaagacctgggttcttgaaccagcctgtcaaccagttgtatgactttaaacaaggcatctcacctcttttcatcttgttttcttccaataatgttagagttcatgtaatcacattctctagaaccatttagtttgtgttaactatgaaccaagcagtgtggtggccactggtgacttgaaaatatagagaaaaaaaaaacctgctctatatctgaaagagctcttgggaagacagagaaacataaagaggaaattacagcacagtgtggtgggtgttacgggaagtccaaccccagcattatgggagttcaggggaaggggcatagcccagcctggaaggagagggtgagtgggggatggctttctgaaaagggtggtctaaaggatgcctatggtcaatagggaaaagaggggaagaagcatcttaagaagaggaaacagcagagaactggctggatgacctgtgactctggagcactgggttgtctccattgtcattatgggcagatgtgtgccatccccagccgacgccactcactgcctccttcctcctggtgttgccacttctgggtgagattaaggtgcagggcctgggggcaggaggacataaggtatagccataaatcataacccagggaccacactcaaccctagggaaattgtcttcctgatcagttgattaccatctgaggtcaagaaatgagatagtgggagcaaatgggtcacaaatagctcagctgtgggctcagaaactgctaggtaaaagaattccagaaggaggccagggcataagttggatgacctatgaactttagtctaaagaattgagactaccgtaattgagactactgtagtgacatctgagaaatgggatggaatagtgaccatgttttattttcttgttcttgtcactattgtattttattttgcataatcatgcccttcactgacagtctccttaacatcatctgtttactctgctcagtgtaaactacaatgctctgtcatctccctactgggtctcctgggaggaggggagccatccagggtgcaaactcaaaggcagagggcacagcgtgcttaggcccaagcttagaattcaattgagaagttctgttgttcatccttacctcagcaggtagaaaagaggtggagatcagaagccagggattagagattgaattgctttccctgggagtgtgcagtatctcattaaaatgttgtatattcaaaaaaatacagacacacacaagtgcctatataatgataaaacatatccaaagcacccaaacctgtgattccagaaaagtagatcctatttttgtttatttttattggctttagctgtgtcttttgaaaggactattatcctctaaaatgtatgtgtatgaagatcctggcttgcagctcgggagctttacacaccttgtgtcactttatcttggtaacgagccaagatcatgcaaccagttcatccatgtctgacccaagagctcttaactgctatgctgcactgcctcattcagagatagatgcctgcatgggtcctggcgattattttaatgctggctacacccccacaggtgacttggattcagaaatacaatttatatttcttctttttaaattgttttattttatttttcttttaatagttatatgtcagtgagaacaatttatatgtcttacactgagaaataaaactgctcataagtgaaaa

SEQ ID NO: 229160 - DNA, 3009 bp, Artificial Sequence
  derived and/or modified sequence
agtgtgtgacccagcccttcccccgtggccaagcagagagagtggccttgaggaagccatagcagcaggaccagcatggcctctgctgcctctgtgaccagcctggcagatgaagtcaactgccccatctgtcagggtaccctgagggagccggtcactatcgactgcggccacaacttctgccgggcctgccttacccgctactgtgagataccaggcccagacctggaggagtcccctacttgcccactctgcaaagaacccttccgtcctgggagcttccggcccaactggcagctggctaacgtggtggagaacattgagcgcctccagctggtgtccacactgggtttgggagaggaggatgtctgccaagagcacggagagaagatctacttcttctgtgaggatgatgagatgcagttgtgcgtggtgtgccgggaggctggggagcacgctacccacaccatgcgcttcctggaggatgcagcggctccctatagggaacaaatccataagtgtcttaaatgtctaagaaaagagagagaggagattcaagaaatccagtcaagagaaaataaaaggatgcaagtcctcctgactcaggtgtccaccaagagacaacaggtgatttctgagttcgcacacctgaggaagtttctagaggaacagcagagcatcctcttagcacaattggagagccaggatggggacatcttgaggcaacgggatgaatttgatttgctggttgctggggagatctgccggtttagtgctcttattgaagaactggaggagaagaatgagaggccagcaagggagctcctgacggacatcagaagcactctaataagatgtgaaaccagaaagtgccggaaaccggtggctgtgtcgccagagctgggccagaggattcgggactttccccagcaggccctcccgctgcagagggagatgaagatgtttctggaaaaactatgctttgagttggactatgagccagctcacatttctctagaccctcagacttcccaccccaagctcctcttgtccgaggaccaccagcgagctcagttctcctacaaatggcagaactcaccagacaacccccagcgttttgaccgggccacctgtgttctggcccacactggcatcacaggggggagacacacgtgggtgtggatggccagggtacctggggactcaggctgctgccagttctgctcaccaccatccgtgcttggcacagaagtagctgcatagaaagagcactggatttgaagtcagaagacctgggttcttgaaccagcctgtcaaccagttgtatgactttaaacaaggcatctcacctcttttcatcttgttttcttccaataatgttagagttcatgtaatcacattctctagaaccatttagtttgtgttaactatgaaccaagcagtgtggtggccactggtgacttgaaaatgtagagaaaaaaaaaacctgctctatatctgaaagagctcttgggaagacagagaaacataaagaggaaattatagcacagtgtggtgggtgttacgggaagtccaaccccagcattatgggagttcaggggaaggggcatagcccagcctggaaggagaggatgagtgggggatggctttctgaaaagggtagtctaaaggatgcctatagtcaatagggaaaagaggggaagaagcatcttaagaagaggaaacagcagagaactggctggatgacctgtgactctggagcactgggttgtctccattgtccttatgggcagatgtgtgccatccccagccgacaccactcactgcctccttcctcctggtgttgccacttctgggtgagattaaggtgcagggcctgggggcaggaggacataaggtatagccataaatcataacccagggaccacactcaaccctagggaaattgtcttcctgatcagttgattaccatctgaggtcaagaaatgagatagtgggagcaaatgggtcacaaatagctcagctgtgggctcagaaactgctaggtaaaagaattccagaaggaggccagggcataagttggatgacctatgacctttagtctaaagaattgagactaccgtaattgagactactgtagtgacatctgagaaatgggatggaagagtgaccatgttttattttcttgttcttgtcactattgtattttattttgcataatcatgcccttcactgacagtctccttaacatcatctgtttactctgctcagatgtaaaatacaatgctctgtcatctccctactgggtctcctgggaggaggggagccatccagggtgcaaactcaaaggcagagggcacagcgtgcttaggcccaagcttagaattcaattgagaagttctgttgttcatccttacctcagcaggtagaaaagaggtggagatcagaagccagggattaaagattgaattgctttccctgggagtgtgcagtatctcattaaaatgttgtatattcaaaaaaatacagacacacacaagtgcctatataatgataaaacatatgcaaagcacccaaacctgtgattccagaaaggtagatcctatttttctgtttatttttattggctttagctgtgtcttttgaaaggactattatcctctaaaatgtatgtgtatgaagatcctggcttgcagctcgggagctttacacaccttgtgtcactttatcttggtaacgagccaagatcatgcaaccagttcatccatgtctgacccaagagctcttaactgctatgctgcactgcctcattcagagatagatgcctgcatgggtcctggcgattattttaatgctggctacacccccacaggtgacttggattcagaaatacaatttatatttcttctttttaaattgttttattttatttttcttttaatagttatatgtcagtgagaacaatttatatgtcttacactgagaaataaaactgctcataagtgaaaa

SEQ ID NO: 229161 - DNA, 3007 bp, Artificial Sequence
  derived and/or modified sequence
gagtgtgtgacccagcccttcccccgtggccaagcagagagagtggccttgaggaagccatagcagcaggaccagcatggcctctgctgcctctgtgaccagcctggcagatgaagtcaactgccccatctgtcagggtaccctgagggagccggtcactatcgactgcggccacaacttctgccgggcctgccttacccgctactgtgagataccaggcccagacctggaggagtcccctacttgcccactctgcaaagaacccttccgtcctgggagcttccggcccaactggcagctggctaacgtggtggagaacattgagcgcctccagctggtgtccacactgggtttgggagaggaggatgtctgccaagagcacggagagaagatctacttcttctgtgaggatgatgagatgcagttgtgcgtggtgtgccgggaggctggggagcacgctacccacaccatgcgcttcctggaggatgcagcggctccctatagggaacaaatccataagtgtcttaaatgtctaagaaaagagagagaggagattcaagaaatccagtcaagagaaaataaaaggatgcaagtcctcctgactcaggtgtccaccaagagacaacaggtgatttctgagttcgcacacctgaggaagtttctagaggaacagcagagcatcctcttagcacaattggagagccaggatggggacatcttgaggcaacgggatgaatttgatttgctggttgctggggagatctgccggtttagtgctcttattgaagaactggaggagaagaatgagaggccagcaagggagctcctgacggacatcagaagcactctaataagatgtgaaaccagaaagtgccggaaaccggtggctgtgtcgccagagctgggccagaggattcgggactttccccagcaggccctcccgctgcagagggagatgaagatgtttctggaaaaactatgctttgagttggactatgagccagctcacatttctctagaccctcagacttcccaccccaagctcctcttgtccgaggaccaccagcgagctcagttctcctacaaatggcagaactcaccagacaacccccagcgttttgaccgggccacctgtgttctggcccacactggcatcacaggggggagacacacgtgggtgtggatggccagggtacctggggactcaggctgctgccagttctgctcaccaccatccgtgcttggcacagaagtagctgcatagaaagggcactggatttgaagtcagaagacctgggttcttgaaccagcctgtcaaccagttgtatgactttaaacaaggcatctcacctcttttcatcttgttttcttccaataatgttagagttcatgtaatcacattctctagaaccatttagtttgtgttaactatgaaccaagcagtgtggtggccactggtgacttgaaaatatagagaaaaaaaaaacctgctctatatctgaaagagctcttgggaagacagagaaacataaagaggaaattacagcacagtgtggtgggtgttacgggaagtccaaccccagcattatgggagttcaggggaaggggcatagcccagcctggaaggagagggtgagtgggggatggctttctgaaaagggtggtctaaaggatgcctatggtcaatagggaaaagaggggaagaagcatcttaagaagaggaaacagcagagaactggctggatgacctgtgactctggagcactgggttgtctccattgtcattatgggcagatgtgtgccatccccagccgacgccactcactgcctccttcctcctggtgttgccacttctgggtgagattaaggtgcagggcctgggggcaggaggacataaggtatagccataaatcataacccagggaccacactcaaccctagggaaattgtcttcctgatcagttgattaccatctgaggtcaagaaatgagatagtgggagcaaatgggtcacaaatagctcagctgtgggctcagaaactgctaggtaaaagaattccagaaggaggccagggcataagttggatgacctatgaactttagtctaaagaattgagactaccgtaattgagactactgtagtgacatctgagaaatgggatggaagagtgaccatgttttattttcttgttcttgtcactattgtattttattttgcataatcatgcccttcactgacagtctccttaacatcatctgtttactctgctcagtgtaaactacaatgctctgtcatctccctactgggtctcctgggaggaggggagccatccagggtgcaaactcaaaggcagagggcacagcgtgcttaggcccaagcttagaattcaattgagaagttctgttgttcatccttacctcagcaggtagaaaagaggtggagatcagaagccagggattagagattgaattgctttccctgggagtgtgcagtatctcattaaaatgttgtatattcaaaaaaatacagacacacacaagtgcctatataatgataaaacatatccaaagcacccaaacctgtgattccagaaaagtagatcctatttttgtttatttttattggctttagctgtgtcttttgaaaggactattatcctctaaaatgtatgtgtatgaagatcctggcttgcagctcgggagctttacacaccttgtgtcactttatcttggtaacgagccaagatcatgcaaccagttcatccatgtctgacccaagagctcttaactgctatgctgcactgcctcattcagagatagatgcctgcatgggtcctggcgattattttaatgctggctacacccccacaggtgacttggattcagaaatacaatttatatttcttctttttaaattgttttattttatttttcttttaatagttatatgtcagtgagaacaatttatatgtcttacactgagaaataaaactgctcataagtgaaaa

SEQ ID NO: 229162 - DNA, 1188 bp, Artificial Sequence
  derived and/or modified sequence
atggcctccgcggctagcgttacgagcctggccgacgaggtcaattgcccaatctgccaggggaccttacgggagccagttacaatagactgcgggcacaatttttgccgcgcatgtcttaccaggtactgcgagattcccggaccagacctggaggagtctcctacctgccccttgtgtaaggaaccattccgacccggttccttcaggccgaactggcagctggccaatgtggtggagaacatcgaacgactgcagttggtctccactctcggtctgggcgaagaggatgtgtgtcaagagcatggggaaaaaatatacttcttttgcgaggatgatgagatgcaactttgtgtagtgtgccgggaggccggagaacacgccactcacaccatgagattcctagaagacgctgccgctccataccgggagcaaatccacaaatgtctgaagtgtttgagaaaggaacgtgaagagatacaggaaattcagtcaagggagaacaaaagaatgcaagtgctgctgacgcaggtctccactaagagacagcaggtgatctccgaattcgcgcatcttcgcaagttccttgaggaacagcagagtatcctgctcgctcagctggagagtcaggacggagatattttgagacaacgtgatgagttcgacctccttgttgctggcgagatctgtcggttctctgctcttatagaggagctggaagaaaagaatgaaagaccggcacgggaactgctaaccgacattagatccacattaataaggtgcgaaacccgcaagtgcaggaagccggtggccgtgtcaccggagctgggtcagagaattagagactttccacagcaggctctcccattacagcgggagatgaagatgtttctagaaaaactgtgttttgagcttgattacgaaccagctcacatcagtctggatccacagaccagccaccccaaactgttgctgagtgaggatcatcagagagctcagttttcttataaatggcagaacagccccgacaatccccagaggtttgaccgggctacctgcgtcctggcgcacacagggataaccggtggaagacacacatgggtgtggatggctagggtgcccggagacagcggctgctgccagttctgtagcccccctagcgtgctcggaacggaggtagcggcttag

SEQ ID NO: 229163 - DNA, 1188 bp, Artificial Sequence
  derived and/or modified sequence
atggcatctgctgctagcgtcaccagcttagcagatgaagtcaactgcccaatctgccaaggaaccctgagagagccggtgacaatcgactgcgggcacaacttttgtcgagcatgtctaaccaggtattgcgagatcccagggccagacctcgaagaaagcccgacgtgtcctttgtgcaaggaacctttccgcccaggcagctttagacccaactggcagctcgccaacgtggtcgagaacatcgagagactgcagctggtaagtaccctagggttaggagaggaagacgtgtgccaggaacacggtgaaaagatatactttttttgtgaggacgatgagatgcagctgtgcgtcgtttgtcgagaagcgggagagcacgccactcacacaatgaggttcctcgaggatgctgccgcaccataccgcgagcagatccacaagtgtctgaagtgcctgagaaaagagcgagaagagattcaagaaattcagagccgtgagaataagcgcatgcaggtgctcctgacacaagtgtcaacaaaaaggcagcaggtaatttccgagttcgctcacctgcgcaagtttctggaagagcagcagagcatactgctggcccagctcgaaagccaggatggcgacattctcagacagcgtgatgagtttgatctgctagtggccggagagatctgccgcttttccgcactcatcgaggagcttgaagaaaagaacgaacgacctgcccgtgaattgcttacagacataaggtcgactcttattaggtgtgaaacaaggaaatgcaggaaaccagtcgccgtgtctcctgaactgggccagcgaattagagattttccccagcaggcactgcctttgcagagggagatgaagatgtttctagagaagctctgctttgagctggactatgagccggcacatatatcactcgacccacaaacctcacatcctaagctgctactgagcgaggaccatcagagggcacaattcagctataaatggcaaaatagccccgacaatccccaacgattcgatagggcgacttgcgtgctggcccataccggtattaccggagggaggcatacatgggtttggatggctcgggtgccaggtgacagtggatgttgccagttttgtagtcctcctagtgtgctcggaacggaagtcgcagcttag

SEQ ID NO: 229164 - DNA, 1188 bp, Artificial Sequence
  derived and/or modified sequence
atggcatctgccgcatccgtcacatcgctcgccgacgaggtgaactgcccaatatgccagggaacccttcgggagccggttaccatcgattgtggccacaacttttgtcgagcgtgcctcacaagatattgtgagattccgggacctgacctggaggaatccccaacctgtccgctgtgcaaggagcccttcagacctgggtcatttaggcctaactggcagctggctaacgtggtggagaacatcgagcgccttcaactggtgtccactcttggtcttggcgaggaggatgtctgccaagaacacggagaaaagatctattttttctgtgaggatgacgagatgcagctgtgcgtcgtatgccgcgaagcaggagaacatgccacgcatacaatgcgattcttggaggatgctgcggctccatatcgtgagcaaatacataaatgtcttaagtgtctgagaaaagagcgtgaagaaattcaggagattcaatccagagagaataaacgtatgcaggtacttctgacacaggtgtctaccaagaggcagcaggttatttcggagttcgcccacctaagaaagtttctcgaggagcaacagagcatccttttagcacagctagaatctcaggatggggatattctgcggcagcgggatgagttcgacctccttgtggccggagagatttgcagattctctgccttgatcgaggaactggaagagaagaatgagaggcctgctcgggagctgctgaccgacatccggtctactctgatccggtgtgaaacaagaaagtgtcggaagcctgtggcagtgtcccctgaactcggacagcggattcgtgattttcctcagcaggccctccccctccagcgcgagatgaagatgtttctcgaaaagctatgttttgagcttgactacgaacccgctcacataagtctcgatccccaaactagccatccaaagctgctcctatccgaggaccatcagagagctcagttctcctacaagtggcaaaacagccccgacaatccacagcgtttcgatcgggcaacatgcgtgctggcccacaccggaattactggcggtaggcatacgtgggtgtggatggcacgcgtgcctggtgacagcggatgctgccagttctgctcgcccccaagcgttttgggaaccgaagttgctgcgtag

SEQ ID NO: 229165 - DNA, 1188 bp, Artificial Sequence
  derived and/or modified sequence
atggcctccgctgcttcagtcaccagcctggcagatgaagtcaattgtcctatttgtcagggcactctgcgtgaaccagttacaattgattgcggtcataacttttgcagagcctgcctgaccaggtactgtgaaatccccggtcctgacctggaggaaagtcctacctgcccactctgtaaagagccatttagacctggttcattccgccctaattggcagcttgcaaacgtggtcgagaacatagagagacttcaattggtcagtaccttaggccttggggaagaggatgtctgccaggagcatggggaaaagatctatttcttctgtgaagatgacgagatgcagctgtgtgtggtgtgccgagaggccggagaacacgccacccatactatgaggttcctcgaagacgccgctgccccatatcgcgaacagatccacaagtgcttaaaatgtctgcggaaagagcgcgaggaaatacaggaaattcagtcccgcgagaataagagaatgcaggtgcttctgacacaggtgtccaccaagcgccagcaggtgatttccgaatttgcacacctccgaaaattcttagaggagcagcaatctatcctcctggctcagctggagtcacaggacggggatatcctgcgccagcgagatgaatttgatttgctggtggcaggcgagatctgccggttctcggcccttattgaggaactcgaagaaaagaatgaacgcccagctcgagaactgctaaccgacattcgctccaccctcattagatgcgaaacccgcaaatgccggaagcctgtcgcggtgtctcccgagctgggacaacgtataagggatttcccacagcaggctttgcccctgcagagagagatgaagatgtttctggagaagctgtgcttcgagttagattacgaacctgcgcatatcagccttgacccccagacttcacaccctaaactcctgttatccgaggatcaccagagggcgcagttttcctacaagtggcagaactcccctgataatcctcagagatttgatagagcaacttgcgtgctggcccatacagggataactggtggacgccacacatgggtttggatggccagagtgcctggagacagcgggtgctgtcaattctgcagccccccttcggttctgggaaccgaggtggccgcatag

SEQ ID NO: 229166 - DNA, 1188 bp, Artificial Sequence
  derived and/or modified sequence
atggctagcgcggcttccgtaacaagcctggcggatgaagtcaattgcccaatttgtcagggaaccctgcgggagcccgtcacgatcgactgcggacacaacttttgccgcgcttgtttgacgcgctactgtgaaatccccggacccgacttagaagagagtcccacttgccccctctgcaaagagccattcaggcctggcagcttcaggcccaactggcagctcgccaacgtagtggagaatatcgagagacttcagctggtctcaacactagggttgggggaggaggatgtgtgccaagagcatggggagaagatatacttcttttgcgaagatgacgaaatgcaattatgcgtggtctgcagagaggccggtgaacatgccacccacaccatgcgcttcctggaggatgccgctgctccctacagagagcagattcacaagtgtcttaaatgtctcaggaaagagcgggaagagatacaagagatccagagccgcgagaataagcgcatgcaggttctgcttactcaagtcagtacgaaaaggcaacaggtaatttcggaatttgcccacctgcggaagttccttgaagagcagcagtcaattctcttagctcagctagaatcacaggacggggacatactgaggcagcgagacgagtttgatctccttgtagcgggagagatctgtagattttcggctctgatcgaagagttggaggagaagaacgagagacccgctagagagcttttgacggatatccgctccacgctgattcgatgcgagaccagaaaatgcagaaagcccgttgccgtgtctccggagctggggcagaggatccgggacttcccccagcaggctctgccactccagcgcgagatgaaaatgtttctggaaaaactctgttttgagctggactacgaacccgcacacatcagcttagacccacagacctcacacccgaagctgcttctatctgaagatcatcagcgtgcccagttctcatacaaatggcaaaattcgccggacaaccctcagcgttttgatcgcgcaacgtgcgtgctggctcacactggcattactgggggtcgccacacatgggtgtggatggcacgggtgccaggtgactcaggctgctgccagttctgttctccgccttcagtcctcgggacagaggtggccgcttag

SEQ ID NO: 229167 - DNA, 1188 bp, Artificial Sequence
  derived and/or modified sequence
atggcgtctgcagcctctgtgaccagcctcgccgatgaggtaaactgtccgatctgccaagggacattgagagaaccagtgactatcgactgcggtcacaatttttgtcgggcatgtctcaccaggtattgcgagattcccggacccgatctggaggagtcacctacgtgccctctgtgcaaagagccgttcagacccggaagcttccgacccaactggcagttggcgaacgtcgtggagaatatagaacgtctccagcttgtctcgactctaggactgggtgaagaggatgtttgccaagagcatggtgaaaagatttacttcttctgcgaggatgacgagatgcagctgtgtgtcgtgtgtcgggaggcaggggaacacgcaacacataccatgagattcctggaggatgccgcagccccttaccgggaacagatccataaatgcttgaaatgtctacgcaaggaaagggaggagattcaagagatccagtccagagagaataaaagaatgcaagtcctgctcactcaggtgagcacaaaaaggcagcaggtgatctcagaattcgcccacctacggaagttcttggaagagcagcaatcaatcctgctggcccagttggaatctcaggatggagatattctgaggcagcgcgacgagtttgatctcctggtcgcaggcgagatttgccgcttctctgccctgatcgaagaactggaggaaaaaaacgagcggccagcaagagagctgcttactgatattcggtctacattaattaggtgtgaaacccggaagtgtcggaaacccgtcgccgtgtctcctgagttgggacagaggattcgggacttcccgcagcaggcattgcccctccagcgcgagatgaaaatgtttttggagaaactctgctttgaactggactatgagcccgctcacatttcgctcgatccacagacatcacaccccaagctgttgttgtctgaggaccatcagagagcccagttttcttataagtggcagaattcacccgataaccctcagcgctttgatcgagctacttgcgtgcttgcgcacaccggaatcacaggcggacggcatacctgggtttggatggccagggtgccaggcgattccggttgctgccagttctgttccccgccttccgtgctggggacagaagtggcagcctag

SEQ ID NO: 229168 - DNA, 1188 bp, Artificial Sequence
  derived and/or modified sequence
atggctagcgctgcttccgtgactagcctggccgacgaagtgaattgtccgatctgccaaggtacattgcgcgaacccgtgactatcgattgcggccacaatttctgtcgtgcctgcctgacgcgctactgtgaaattccagggccagatctcgaagaatcccccacatgcccgctctgtaaggagcccttcagaccgggaagtttccgcccaaactggcagctggctaacgtcgttgagaacatcgagaggctacagcttgtcagcacgctggggctgggggaggaggatgtctgtcaggagcatggagaaaaaatctattttttctgcgaagatgacgagatgcagctgtgtgtggtctgtcgcgaggccggagagcacgcaacccataccatgcggtttctggaagatgctgcagcaccatatcgcgagcagatccacaagtgcctgaagtgtctacggaaggagcgggaggagatacaggaaattcagtcccgagaaaacaagagaatgcaggttctactaacgcaggtgtccactaagagacagcaagtaatctctgagtttgcccacctgcggaaattccttgaagagcaacaaagtattctcctagctcagctggaatcccaggacggggatattctgcgacagcgcgacgagttcgacctgcttgtcgccggagagatctgccgcttctctgccctgatcgaagagctggaagaaaagaatgagcggcctgccagggagcttctgaccgatatccggtctactttgatcaggtgtgaaactcgcaagtgtagaaagcccgtggcagtgtctccggagcttggacagcggattagggactttcctcagcaagccctgcctttgcaacgggagatgaagatgtttctggagaaattgtgttttgaactcgactatgagcccgctcatatcagcctcgatcctcagacaagccaccctaagttactgttgtcagaagaccaccagcgtgctcagttttcttacaaatggcaaaattccccagacaatccacaaaggttcgacagggcaacttgtgtgctcgcccacaccggaatcactgggggaagacatacttgggtatggatggccagagttccaggcgacagtggatgctgccagttttgcagcccacccagtgtgctcggaacagaagtggcggcatag

SEQ ID NO: 229169 - DNA, 3010 bp, Artificial Sequence
  derived and/or modified sequence
gagtgtgtgacccagcccttcccccgtggccaagcagagagagtggccttgaggaagccatagcagcaggaccagcatggcctctgctgcctctgtgaccagcctggcagatgaagtcaactgccccatctgtcagggtaccctgagggagccggtcactatcgactgcggccacaacttctgccgggcctgccttacccgctactgtgagataccaggcccagacctggaggagtcccctacttgcccactctgcaaagaacccttccgtcctgggagcttccggcccaactggcagctggctaacgtggtggagaacattgagcgcctccagctggtgtccacactgggtttgggagaggaggatgtctgccaagagcacggagagaagatctacttcttctgtgaggatgatgagatgcagttgtgcgtggtgtgccgggaggctggggagcacgctacccacaccatgcgcttcctggaggatgcagcggctccctatagggaacaaatccataagtgtcttaaatgtctaagaaaagagagagaggagattcaagaaatccagtcaagagaaaataaaaggatgcaagtcctcctgactcaggtgtccaccaagagacaacaggtgatttctgagttcgcacacctgaggaagtttctagaggaacagcagagcatcctcttagcacaattggagagccaggatggggacatcttgaggcaacgggatgaatttgatttgctggttgctggggagatctgccggtttagtgctcttattgaagaactggaggagaagaatgagaggccagcaagggagctcctgacggacatcagaagcactctaataagatgtgaaaccagaaagtgccggaaaccggtggctgtgtcgccagagctgggccagaggattcgggactttccccagcaggccctcccgctgcagagggagatgaagatgtttctggaaaaactatgctttgagttggactatgagccagctcacatttctctagaccctcagacttcccaccccaagctcctcttgtccgaggaccaccagcgagctcagttctcctacaaatggcagaactcaccagacaacccccagcgttttgaccgggccacctgtgttctggcccacactggcatcacaggggggagacacacgtgggtgtggatggccagggtacctggggactcaggctgctgccagttctgctcaccaccatccgtgcttggcacagaagtagctgcatagaaagagcactggatttgaagtcagaagacctgggttcttgaaccagcctgtcaaccagttgtatgactttaaacaaggcatctcacctcttttcatcttgttttcttccaataatgttagagttcatgtaatcacattctctagaaccatttagtttgtgttaactatgaaccaagcagtgtggtggccactggtgacttgaaaatgtagagaaaaaaaaaacctgctctatatctgaaagagctcttgggaagacagagaaacataaagaggaaattatagcacagtgtggtgggtgttacgggaagtccaaccccagcattatgggagttcaggggaaggggcatagcccagcctggaaggagaggatgagtgggggatggctttctgaaaagggtagtctaaaggatgcctatagtcaatagggaaaagaggggaagaagcatcttaagaagaggaaacagcagagaactggctggatgacctgtgactctggagcactgggttgtctccattgtccttatgggcagatgtgtgccatccccagccgacaccactcactgcctccttcctcctggtgttgccacttctgggtgagattaaggtgcagggcctgggggcaggaggacataaggtatagccataaatcataacccagggaccacactcaaccctagggaaattgtcttcctgatcagttgattaccatctgaggtcaagaaatgagatagtgggagcaaatgggtcacaaatagctcagctgtgggctcagaaactgctaggtaaaagaattccagaaggaggccagggcataagttggatgacctatgacctttagtctaaagaattgagactaccgtaattgagactactgtagtgacatctgagaaatgggatggaagagtgaccatgttttattttcttgttcttgtcactattgtattttattttgcataatcatgcccttcactgacagtctccttaacatcatctgtttactctgctcagatgtaaaatacaatgctctgtcatctccctactgggtctcctgggaggaggggagccatccagggtgcaaactcaaaggcagagggcacagcgtgcttaggcccaagcttagaattcaattgagaagttctgttgttcatccttacctcagcaggtagaaaagaggtggagatcagaagccagggattaaagattgaattgctttccctgggagtgtgcagtatctcattaaaatgttgtatattcaaaaaaatacagacacacacaagtgcctatataatgataaaacatatgcaaagcacccaaacctgtgattccagaaaggtagatcctatttttctgtttatttttattggctttagctgtgtcttttgaaaggactattatcctctaaaatgtatgtgtatgaagatcctggcttgcagctcgggagctttacacaccttgtgtcactttatcttggtaacgagccaagatcatgcaaccagttcatccatgtctgacccaagagctcttaactgctatgctgcactgcctcattcagagatagatgcctgcatgggtcctggcgattattttaatgctggctacacccccacaggtgacttggattcagaaatacaatttatatttcttctttttaaattgttttattttatttttcttttaatagttatatgtcagtgagaacaatttatatgtcttacactgagaaataaaactgctcataagtgaaaa

SEQ ID NO: 229170 - protein, 656 aa, Artificial Sequence
  derived and/or modified sequence
MTGAKRKKKSMLWSKMHTPQCEDIIQWCRRRLPILDWAPHYNLKENLLPDTVSGIMLAVQQVTQGLAFAVLSSVHPVFGLYGSLFPAIIYAIFGMGHHVATGTFALTSLISANAVERIVPQNMQNLTTQSNTSVLGLSDFEMQRIHVAAAVSFLGGVIQVAMFVLQLGSATFVVTEPVISAMTTGAATHVVTSQVKYLLGMKMPYISGPLGFFYIYAYVFENIKSVRLEALLLSLLSIVVLVLVKELNEQFKRKIKVVLPVDLVLIIAASFACYCTNMENTYGLEVVGHIPQGIPSPRAPPMNILSAVITEAFGVALVGYVASLALAQGSAKKFKYSIDDNQEFLAHGLSNIVSSFFFCIPSAAAMGRTAGLYSTGAKTQVACLISCIFVLIVIYAIGPLLYWLPMCVLASIIVVGLKGMLIQFRDLKKYWNVDKIDWGIWVSTYVFTICFAANVGLLFGVVCTIAIVIGRFPRAMTVSIKNMKEMEFKVKTEMDSETLQQVKIISINNPLVFLNAKKFYTDLMNMIQKENACNQPLDDISKCEQNTLLNSLSNGNCNEEASQSCPNEKCYLILDCSGFTFFDYSGVSMLVEVYMDCKGRSVDVLLAHCTASLIKAMTYYGNLDSEKPIFFESVSAAISHIHSNKNLSKLSDHSEV

SEQ ID NO: 229171 - DNA, 1971 bp, Artificial Sequence
  derived and/or modified sequence
atgaccggcgccaagagaaagaagaagagcatgctgtggagcaagatgcacaccccccagtgcgaggacatcatccagtggtgcagaagaagactgcccatcctggactgggccccccactacaacctgaaggagaacctgctgcccgacaccgtgagcggcatcatgctggccgtgcagcaggtgacccagggcctggccttcgccgtgctgagcagcgtgcaccccgtgttcggcctgtacggcagcctgttccccgccatcatctacgccatcttcggcatgggccaccacgtggccaccggcaccttcgccctgaccagcctgatcagcgccaacgccgtggagagaatcgtgccccagaacatgcagaacctgaccacccagagcaacaccagcgtgctgggcctgagcgacttcgagatgcagagaatccacgtggccgccgccgtgagcttcctgggcggcgtgatccaggtggccatgttcgtgctgcagctgggcagcgccaccttcgtggtgaccgagcccgtgatcagcgccatgaccaccggcgccgccacccacgtggtgaccagccaggtgaagtacctgctgggcatgaagatgccctacatcagcggccccctgggcttcttctacatctacgcctacgtgttcgagaacatcaagagcgtgagactggaggccctgctgctgagcctgctgagcatcgtggtgctggtgctggtgaaggagctgaacgagcagttcaagagaaagatcaaggtggtgctgcccgtggacctggtgctgatcatcgccgccagcttcgcctgctactgcaccaacatggagaacacctacggcctggaggtggtgggccacatcccccagggcatccccagccccagagccccccccatgaacatcctgagcgccgtgatcaccgaggccttcggcgtggccctggtgggctacgtggccagcctggccctggcccagggcagcgccaagaagttcaagtacagcatcgacgacaaccaggagttcctggcccacggcctgagcaacatcgtgagcagcttcttcttctgcatccccagcgccgccgccatgggcagaaccgccggcctgtacagcaccggcgccaagacccaggtggcctgcctgatcagctgcatcttcgtgctgatcgtgatctacgccatcggccccctgctgtactggctgcccatgtgcgtgctggccagcatcatcgtggtgggcctgaagggcatgctgatccagttcagagacctgaagaagtactggaacgtggacaagatcgactggggcatctgggtgagcacctacgtgttcaccatctgcttcgccgccaacgtgggcctgctgttcggcgtggtgtgcaccatcgccatcgtgatcggcagattccccagagccatgaccgtgagcatcaagaacatgaaggagatggagttcaaggtgaagaccgagatggacagcgagaccctgcagcaggtgaagatcatcagcatcaacaaccccctggtgttcctgaacgccaagaagttctacaccgacctgatgaacatgatccagaaggagaacgcctgcaaccagcccctggacgacatcagcaagtgcgagcagaacaccctgctgaacagcctgagcaacggcaactgcaacgaggaggccagccagagctgccccaacgagaagtgctacctgatcctggactgcagcggcttcaccttcttcgactacagcggcgtgagcatgctggtggaggtgtacatggactgcaagggcagaagcgtggacgtgctgctggcccactgcaccgccagcctgatcaaggccatgacctactacggcaacctggacagcgagaagcccatcttcttcgagagcgtgagcgccgccatcagccacatccacagcaacaagaacctgagcaagctgagcgaccacagcgaggtgtag

SEQ ID NO: 229172 - DNA, 624 bp, Artificial Sequence
  derived and/or modified sequence
atgaccggcgccaagagaaagaagaagagcatgctgtggagcaagatgcacaccccccagtgcgaggacatcatccagtggtgcagaagaagactgcccatcctggactgggccccccactacaacctgaaggagaacctgctgcccgacaccgtgagcggcatcatgctggccgtgcagcaggtgacccagggcctggccttcgccgtgctgagcagcgtgcaccccgtgttcggcctgtacggcagcctgttccccgccatcatctacgccatcttcggcatgggccaccacgtggccaccggcaccttcgccctgaccagcctgatcagcgccaacgccgtggagagaatcgtgccccagaacatgcagaacctgaccacccagagcaacaccagcgtgctgggcctgagcgacttcgagatgcagagaatccacgtggccgccgccgtgagcttcctgggcggcgtgatccaggtggccatgttcgtgctgcagctgggcagcgccaccttcgtggtgaccgagcccgtgatcagcgccatgaccaccggcgccgccacccacgtggtgaccagccaggtgaagtacctgctgggcatgaagatgccctacatcagctag

SEQ ID NO: 229173 - DNA, 1971 bp, Artificial Sequence
  derived and/or modified sequence
atgaccggcgccaagcggaaaaagaaatcaatgctctggtctaaaatgcatacccctcagtgtgaggatattattcagtggtgtcgcagacgactcccaattctcgactgggccccacactacaatctcaaagaaaacttgctgcctgacaccgtgagcggaattatgctggccgtccaacaggtgacccaggggctcgcgtttgccgttctcagcagcgtacatcctgtgtttgggctctacggctctctgttccccgcgattatctatgctatctttgggatggggcaccacgtcgctaccggaacatttgctctgacaagcctcatcagcgctaacgcagtggagagaatcgtgccccaaaatatgcagaacctcaccacacaatcgaatactagtgtgctcggtctgtccgatttcgaaatgcagcggatccacgtggcggccgccgtctcctttttgggcggggtgattcaggtggccatgttcgtgctacagctcggaagcgctacctttgttgtgaccgagcctgtgatcagcgctatgactacaggagcagccacacacgtggttacatcccaggtgaagtacttgctcggcatgaaaatgccttacatatccggccccctaggttttttttatatctatgcgtatgtatttgagaacattaagagcgtgcggttggaagccttgctcttgtccctgctgtcaatcgtggttctggtgctggtgaaggagctcaacgaacagtttaaaaggaagattaaagttgtgctgcctgtggaccttgtgttgattatcgccgcgtcctttgcctgctactgcacgaacatggaaaacacgtacggcctcgaggttgtggggcatatcccacagggcatcccctccccacgcgcgcctccaatgaacattctgtctgccgtcatcactgaagcgtttggcgtcgcgctcgttgggtacgtcgcctcactcgcactggcccagggcagcgcaaagaagttcaagtatagcatcgatgacaatcaggagttcctggcccatggtctgagtaacattgtttcatcattcttcttttgcataccctccgctgcagctatgggccggactgccggcctgtattcaaccggggcaaagacacaggtcgcttgccttattagctgcatcttcgttctcattgtgatctacgccatcggccccctgctttattggctgccgatgtgtgtcttggccagcataattgtggtcggactcaaaggaatgcttattcaattccgggacctgaaaaagtactggaacgttgacaaaatagactggggtatttgggtgtctacctatgtgtttaccatttgctttgctgctaatgtggggttgttatttggtgtggtttgcacaattgctattgtaatcggaaggttccctcgggccatgacagtctccatcaaaaacatgaaggaaatggagttcaaggtcaaaacagagatggacagcgagacactgcagcaagtcaaaattatctccataaataaccctctagttttcctgaacgccaagaaattctatacagacttgatgaacatgattcagaaagaaaatgcatgcaaccagcccctggacgatatttcaaaatgcgagcaaaatacccttctcaactcactgtcaaacggtaattgcaacgaagaggcctctcagtcctgccctaacgagaaatgctatctcatccttgattgcagtgggttcactttcttcgactacagcggagtgtctatgctcgttgaggtgtatatggactgtaagggaaggtctgtggacgtgttactggcccattgcacagccagcctgatcaaggctatgacctactatggtaacctggatagcgagaagcccattttcttcgagtctgtgagtgcagccatatctcacattcactccaacaagaatctgagcaagctctcagaccattccgaggtttag

SEQ ID NO: 229174 - DNA, 624 bp, Artificial Sequence
  derived and/or modified sequence
atgactggagccaaacggaagaaaaagagcatgctgtggtcaaagatgcacacaccccaatgtgaggatattatccaatggtgcaggcgcagactgcccattttggattgggctcctcactataatttgaaagagaacctacttcccgataccgtgagtggtattatgctggccgtgcagcaggtcactcagggtctcgctttcgccgtgttgtcctccgtgcatcctgttttcggtctctatgggagcctgttccccgccatcatctatgccattttcggaatgggacatcacgtggccaccggtaccttcgctcttacatccctcattagtgccaatgccgtggaaaggattgtcccgcagaatatgcagaacctcacaacacagtcaaacacatctgtgcttggcctgtcggactttgaaatgcagagaattcatgttgcagctgcggtctcgtttctgggaggcgtcattcaggtagccatgttcgttctgcagcttggaagcgctacctttgtggtgaccgaacccgttattagtgccatgacaacgggtgcagccactcatgtggtgacctcccaggtaaaatatctcctgggcatgaagatgccctacatttcatag

SEQ ID NO: 229175 - DNA, 1971 bp, Artificial Sequence
  derived and/or modified sequence
atgaccggcgccaagcggaagaagaaatctatgctgtggagtaaaatgcacaccccacagtgtgaggacatcattcagtggtgtcgtcgcagactgcccatattggattgggccccccactataacctgaaagaaaaccttctgcctgatactgtgtcaggcatcatgttggcagtacagcaagtaacccaaggtctcgccttcgctgtcctgtccagcgtccaccccgtgttcggtctttacggatctctgttccccgctatcatctacgctatttttggaatgggacatcacgtggctacgggtacctttgctctgacatcccttatctccgcgaacgctgttgaaaggatcgtcccccagaatatgcagaatctgaccacacagagcaatacaagcgttctaggcttgtctgactttgagatgcaacgcatccacgtggcggctgctgtatcgtttctcggcggggttatacaggtggccatgttcgtcctgcagctggggtccgccacatttgttgtgactgagcctgtgatctccgctatgaccactggcgcggctacccatgtggtgaccagccaagtgaagtacctgctggggatgaagatgccttacatatctggtcctctcggcttcttctacatatacgcatatgtctttgagaacattaagagcgtacggctggaggcgcttttattatctctactttcaattgtggtcctggtgctcgtcaaggaactcaatgagcagttcaagaggaagatcaaagtggtgttaccagtcgatttagtgctcatcatcgctgcttcatttgcatgttactgtacaaacatggaaaacacctacggactcgaggtagtgggtcatattccacaaggaatcccatctcctcgcgcacccccaatgaatattctgtcagccgttattactgaagcgtttggcgtagcactcgtcggatacgtcgcctcccttgcgctggctcagggctccgccaagaaattcaaatacagcatcgacgacaatcaggagtttctggcacacggtttgagtaacattgtgtcctctttctttttttgtattcccagcgcggctgccatggggaggactgcaggactttattcaacgggagcaaagacccaggtcgcctgcctgatttcttgcatttttgttcttattgtgatctatgcaatcggccctctgctgtattggcttccgatgtgcgtcctggcctcaatcatagtggtgggactgaaggggatgttaattcagttccgtgatctgaaaaagtattggaatgtagacaagatagactggggcatctgggttagcacatatgtattcaccatttgtttcgccgctaatgttgggcttttattcggggtggtctgcacaatagccattgtcatcggacggttccctagggccatgaccgtgagcattaaaaacatgaaggagatggaatttaaagtgaagacagagatggactccgaaaccttgcaacaggtgaagatcataagtatcaacaacccgttggtgttccttaacgccaaaaagttttatacagacctcatgaatatgatccagaaggagaacgcctgcaaccaacccctcgatgatatttctaaatgtgagcaaaacacgctgttgaatagcttatccaacggaaactgcaacgaggaggcctcccagtcgtgcccaaatgagaagtgttacctgatcctggattgctccggatttaccttctttgattactccggcgtgtccatgcttgtcgaagtttacatggattgtaagggccgtagcgtagacgtgctcctggcacattgcacggccagccttattaaagccatgacttactatggaaaccttgattccgaaaagcctatcttctttgaatccgtcagcgcagccatatcacatatccacagcaataaaaatctgtccaagctgagcgatcatagtgaggtgtag

SEQ ID NO: 229176 - DNA, 1971 bp, Artificial Sequence
  derived and/or modified sequence
atgaccggggccaagaggaagaagaagtccatgctgtggagcaagatgcacaccccccagtgtgaggacatcatccagtggtgcagaagaaggctgcccatcctggactgggccccccactacaacctgaaggagaacctgctgcctgacacagtgtctggcatcatgctggccgtgcagcaggtgacccagggcctggcctttgctgtgctgagctctgtgcaccctgtgtttggcctgtatggcagcctcttccctgccatcatctatgccatcttcggcatgggccaccacgtggccaccggcacctttgccctgaccagcctcatcagcgccaatgctgtggagcgcatcgtgccccagaacatgcagaacctgaccacccagagcaacacctctgtgctgggcctgagtgactttgagatgcagaggatccacgtggccgctgctgtgtccttcctgggcggcgtcatccaggtggccatgtttgtgctgcagctgggcagcgccacctttgtggtgacagagcctgtgatcagcgccatgaccaccggggccgccacccacgtggtgaccagccaggtgaagtacctgctgggcatgaagatgccctacatcagcggccccctgggcttcttctacatctatgcctacgtgtttgagaacatcaagtctgtgcggctggaggccctgctgctgagcctgctgagcatcgtggtgctggtgctggtgaaggagctgaatgagcagttcaagaggaagatcaaggtggtgctgcctgtggacctggtgctgatcatcgccgccagctttgcctgctactgcaccaacatggagaacacctacggcctggaggtggtgggccacatcccccagggcatccccagcccccgggccccacccatgaacatcctgtctgctgtgatcacagaggcctttggagtggccctggtgggctacgtggccagcctggccctggcccagggcagcgccaagaagttcaagtacagcattgatgacaaccaggagttcctggcccacggcctgagcaacatcgtgtcctccttcttcttctgcatccccagcgctgctgccatgggccgcacagctggcctgtacagcactggagccaagacccaggtggcctgcctgatcagctgcatctttgtgctgattgtcatctatgccatcggccccctgctgtactggctgcccatgtgtgtgctggccagcatcatcgtggtgggcctgaagggcatgctgatccagttccgggacctgaagaagtactggaatgtggacaagattgactggggcatctgggtgtccacctacgtgttcaccatctgctttgctgccaacgtgggcctgctgtttggagtggtgtgcaccatcgccatcgtgattggccgcttcccccgggccatgacagtgtccatcaagaacatgaaggagatggagttcaaggtgaagacagagatggacagcgagaccctgcagcaggtgaagatcatcagcatcaacaaccccctggtgttcctgaatgccaagaagttctacacagacctgatgaacatgatccagaaggaaaatgcctgcaaccagcccctggatgacatcagcaaatgtgagcagaacaccctgctgaacagcctgagcaatggaaactgcaatgaggaggccagccagagctgccccaatgagaagtgctacctgatcctggactgcagcggcttcaccttctttgactacagcggcgtgtccatgctggtggaggtgtacatggactgcaagggccgctctgtggatgtgctgctggcccactgcacagccagcctcatcaaggccatgacctactacggcaacctggacagcgagaagcccatcttctttgaatctgtgtctgctgccatcagccacatccacagcaacaagaacctgagcaagctgagtgaccacagcgaggtgtag

SEQ ID NO: 229177 - DNA, 624 bp, Artificial Sequence
  derived and/or modified sequence
atgaccggggccaagaggaagaagaagtccatgctgtggagcaagatgcacaccccccagtgtgaggacatcatccagtggtgcagaagaaggctgcccatcctggactgggccccccactacaacctgaaggagaacctgctgcctgacacagtgtctggcatcatgctggccgtgcagcaggtgacccagggcctggcctttgctgtgctgagctctgtgcaccctgtgtttggcctgtatggcagcctcttccctgccatcatctatgccatcttcggcatgggccaccacgtggccaccggcacctttgccctgaccagcctcatcagcgccaatgctgtggagcgcatcgtgccccagaacatgcagaacctgaccacccagagcaacacctctgtgctgggcctgagtgactttgagatgcagaggatccacgtggccgctgctgtgtccttcctgggcggcgtcatccaggtggccatgtttgtgctgcagctgggcagcgccacctttgtggtgacagagcctgtgatcagcgccatgaccaccggggccgccacccacgtggtgaccagccaggtgaagtacctgctgggcatgaagatgccctacatctcctag

SEQ ID NO: 229178 - DNA, 1971 bp, Artificial Sequence
  derived and/or modified sequence
atgaccggcgccaagcggaagaagaagagcatgctgtggagcaagatgcacacgccccagtgtgaggacattatacagtggtgtcggagacgccttcccatcctcgactgggccccccactataacctcaaagagaacctgcttcccgacactgtgtctggcattatgctagccgtccagcaagtcacccagggtttagcattcgccgtcctaagctccgtccatccggtatttggcctctacggatccctgtttcctgctatcatttatgctatcttcgggatgggacaccatgtggctacagggacctttgccttaacttctcttatctccgcgaatgccgtggaacggattgttccgcagaacatgcagaatcttaccacacagtcaaatacttcagtcctgggactttcggacttcgaaatgcagagaattcacgtggcggctgccgtgtcctttctgggaggggtaatccaggtagccatgttcgtcctacaacttgggtctgcgactttcgttgttacagagcccgtgatatctgccatgaccactggcgccgctacacacgtggtaacctctcaggtgaagtatttgctgggcatgaaaatgccttacatttcaggcccacttggattcttttacatttacgcttacgtttttgaaaacattaagtcggtccggctggaggcgctgctcctgtcactattgtctatcgtagtactggtcctcgtgaaggagctaaatgaacagttcaagcgcaagataaaagtggtgttgcctgtggatttggtgctgatcatcgccgcttcattcgcttgttactgcactaatatggagaacacctacggattagaagttgttggccatattccccagggcataccctccccacgtgccccacctatgaacattctctccgcagtcattaccgaagcattcggggtggcactggtcgggtacgttgcctctcttgccctggcgcaaggcagcgcaaaaaagttcaagtactccattgatgataaccaagagttcctcgctcatgggctgagtaatatcgtcagcagtttcttcttttgtatccctagtgctgccgcaatgggtagaaccgccggtttgtattctaccggggcaaaaacccaggttgcatgcttaatcagttgcatctttgtgctaatagttatctatgctattgggccgttattatattggctaccaatgtgcgtcctagctagcatcatcgtcgtgggacttaaggggatgctgatccagtttagggacctgaaaaaatactggaatgtcgataagatcgattggggcatatgggtgagcacttatgtcttcaccatttgtttcgctgctaatgtggggctcctgttcggcgtggtgtgcacaatcgcaatagtaatcgggagattcccacgcgccatgaccgtcagcattaaaaacatgaaggagatggaattcaaagtgaaaactgaaatggactcagagactttacagcaagtgaagattatctctatcaataatccactggtgtttctgaacgctaagaaattctataccgacctgatgaatatgatccagaaggagaatgcatgcaaccagcccctggacgacatctccaaatgcgagcagaatacactcctgaattccctgagcaacggtaactgtaatgaggaagcaagccaaagctgcccaaatgagaagtgctacctaatattggactgttccggattcaccttcttcgactactccggagtgtcaatgctggtagaagtctatatggactgcaagggccgaagcgttgacgtcctcctcgcacattgcaccgcatctctcattaaagctatgacctactatggcaatctcgattcggagaagccgattttcttcgagagcgtttcagccgccattagccatatccacagtaataagaacctctctaagctgtctgatcactctgaggtgtag

SEQ ID NO: 229179 - DNA, 624 bp, Artificial Sequence
  derived and/or modified sequence
atgaccggcgccaagcggaagaagaagagcatgctgtggagcaagatgcacaccccccagtgcgaagacatcattcagtggtgtcgtagacgacttccaatcctggattgggctcctcactacaacttaaaagagaatttgctaccagatactgtctcaggtatcatgctggctgtacagcaagttacacagggtctagcattcgccgttctgagctctgtgcatccagtattcggcctgtatgggtctctgttcccggctataatatatgcgatattcggtatgggtcaccacgtggcgactggcacatttgctttgacttccctgatcagtgccaatgccgttgaaagaatcgtcccgcagaacatgcaaaaccttaccacccagtccaacacttccgtgctgggactgtccgatttcgaaatgcagcggatccacgtggccgcggccgtgtcctttttggggggcgtcatccaggtggctatgtttgtcctgcagttggggtcggctactttcgtggtaactgaacctgtcatatcagctatgacaactggcgctgcaactcatgttgtgaccagtcaggtgaaatatctattggggatgaagatgccgtacatttcttag

SEQ ID NO: 229180 - DNA, 1971 bp, Artificial Sequence
  derived and/or modified sequence
atgaccggcgccaagcggaagaagaagagcatgctgtggagcaagatgcacactccacagtgcgaggatattatccagtggtgtcgcagacgactacctatcttggactgggccccccactacaacctcaaagaaaatctgctgcctgatacagttagcggcattatgctggccgtgcagcaggtcacccaaggacttgcctttgcagtgctgagcagcgtgcatccagtgttcggcctctatggcagcctgttccccgccattatctacgcaattttcggtatgggacaccacgttgccactggcacattcgcactcacgagcctgattagcgcaaacgccgtggagcggatcgtcccacagaatatgcaaaatttgacaacacaatccaacactagtgtcttgggtctgtccgacttcgagatgcagcggatccatgtcgctgcagccgtgagcttcttgggcggagtcatccaggtggcaatgtttgtcttacagcttggatccgccaccttcgtggtgaccgaaccggttatatctgctatgaccacgggggctgccactcacgtcgtgacctcgcaggttaagtatcttctgggcatgaaaatgccctacatttcgggccctctgggtttcttctacatctatgcttacgtgtttgagaacattaagtctgtgaggctggaggccttgctgctgagtctgctgagtatcgtagtgttggttcttgttaaggagctgaacgagcaatttaaacggaagataaaagtggtgttacctgtcgacctagtgttgattattgcggcctcctttgcctgttactgtactaatatggagaacacttacggtcttgaggtggtgggccatatcccacagggtatcccctctccgcgcgcacccccaatgaacattctgtctgccgtgattaccgaggcattcggggttgcattagtcgggtacgtcgcaagcctagctctcgcccagggctcggccaagaaatttaagtatagcattgacgataaccaggaattcctggcgcatgggctgtccaacatcgtgtcaagcttcttcttttgcatcccgagtgccgccgcaatgggcagaaccgccgggctctacagtacaggcgccaagacacaggtggcatgcctcattagttgcatcttcgtgctgatcgtcatttacgctatcggaccactgctctactggctgcccatgtgtgtcttagcttctatcattgtagtgggcttaaaagggatgttgattcaattcagagacttgaagaagtactggaatgtggacaaaatcgattggggaatttgggtctccacttacgtgttcactatctgctttgctgccaatgtcggactgctgtttggcgtggtctgtacaattgccatcgtcatagggcggtttcctcgtgcaatgacagtcagtattaaaaacatgaaagagatggaattcaaggtgaagacagaaatggacagtgaaaccctccaacaggttaagatcatcagcataaacaaccccctcgtgtttctgaatgctaagaaattctatacagatttaatgaacatgattcagaaggaaaacgcttgcaatcagccacttgacgatatctcaaaatgtgagcaaaacacactactcaatagcctgtccaatggtaattgcaacgaagaagcttcacagtcctgtccgaatgagaagtgttacttaattttggactgtagcggttttacattttttgattacagtggagtgagcatgttagttgaagtctatatggactgtaaggggagatccgtcgatgtgttactggctcactgcaccgcctcactcatcaaagccatgacatattatgggaaccttgattcagagaagcctatatttttcgagtccgtctcagccgctattagccatatccatagcaacaaaaatttgagcaagctttcagaccattctgaggtgtag

SEQ ID NO: 229181 - DNA, 1971 bp, Artificial Sequence
  derived and/or modified sequence
atgactggagccaagaggaagaagaaaagcatgctgtggagcaaaatgcatacccctcagtgtgaagatattatccagtggtgtagaagaagattgccgatcttggactgggcccctcactacaacctcaaagaaaacttgctgccagacaccgtctccggaattatgctggctgtacagcaggttacacagggtctagcgtttgcggttctgtcttcagtgcatccggtgtttgggctttacgggtcactcttccctgcgataatctatgcaatcttcggtatgggacaccacgttgccacaggaaccttcgcgctgacatcactgattagtgcgaacgccgtagagcggattgttccgcaaaacatgcagaacctaaccacccaatctaacacctctgtgctgggcctcagcgatttcgaaatgcagaggattcacgtcgctgctgcagtttcatttctgggcggagtgattcaggtagccatgtttgtgctccaactcggaagtgctaccttcgtggtcaccgagcctgtcattagcgccatgactacaggcgctgcaacacacgtcgtaacctcccaggtgaagtacctgcttggaatgaaaatgccatatataagcggccctctgggcttcttttacatctatgcatatgtgtttgagaatattaagtcagtccggctggaagcgctgctcctgtctctgctgagcattgttgtgctcgttctcgtgaaggagctcaatgaacagttcaagcggaagatcaaggtagtgttgcccgtggatctggttctgattattgccgcaagttttgcatgctattgcactaacatggaaaacacttacggtctggaggtggttggccatatcccccagggtattcctagtcccagggctcctccaatgaacattctgagcgcagttataaccgaagccttcggtgttgcattggtggggtacgtcgcctccttggctctcgcacagggatctgccaagaaatttaagtactcaattgatgacaaccaggagtttctcgcacacggattgagcaatattgttagctcattcttcttttgcatcccaagcgccgcagcaatgggcaggaccgcgggattatattctactggcgctaagacccaagttgcctgcctgatctcatgtatattcgtcctgatagtcatttacgctattggccctctgctgtattggctcccaatgtgcgtccttgcctccattatcgtggtggggctcaagggcatgctgatccaattccgggatctgaagaaatactggaacgtggacaagatcgattggggcatctgggtatccacctacgtattcaccatttgcttcgccgcaaacgtcggtctactgttcggcgtggtgtgcactatcgctattgtgatcggtcgcttccctagggccatgaccgttagcattaagaatatgaaggaaatggagtttaaggtgaagacagaaatggatagcgagactttacagcaagtgaagattatttcgatcaataatccgcttgtcttcttgaatgcgaagaaattttacacagacttaatgaatatgattcagaaggagaacgcctgcaatcaacccctggacgatattagtaagtgcgagcaaaataccctgttaaacagcctctcaaatggcaattgtaacgaagaagcctctcagtcatgccctaacgaaaagtgttatctcattctggattgttcaggctttacattttttgactactccggagtgtcaatgctggtagaagtttacatggattgcaaagggaggtccgtcgatgttctgctggcacattgtactgccagtcttatcaaggccatgacgtactacggtaacctcgatagcgagaagcctattttcttcgaaagcgtatctgccgctataagtcatattcattctaacaagaacctgtcgaagttgtcagatcattcagaggtgtag

SEQ ID NO: 229182 - DNA, 624 bp, Artificial Sequence
  derived and/or modified sequence
atgacgggggcaaagcgaaagaaaaaatctatgctgtggtccaagatgcacactcctcagtgcgaagacatcattcagtggtgccggaggcggctgcctatcctggactgggcccctcactacaatctgaaagagaacctcttgccagataccgtcagcggtataatgctagcggtccagcaggttacgcagggccttgcctttgcggtgctgtctagcgtacatccagtgttcggcctttatgggtccctcttcccagcaattatttatgctattttcgggatgggacatcatgtggcaacagggacatttgctctgacttccttgatttccgctaacgctgtggagcggattgtcccacagaatatgcagaacctgacgacccagagtaacacaagtgtgcttggcctgagcgacttcgagatgcagcgtattcacgttgctgccgcagtatccttcctcggcggtgtcatccaggtggcgatgttcgtgctgcagctgggctccgcgacctttgtggttactgaacctgtgattagtgccatgaccactggagcagcaactcatgtggttacaagtcaggttaaatatttgctcggcatgaaaatgccgtatatcagttag

SEQ ID NO: 229183 - DNA, 1971 bp, Artificial Sequence
  derived and/or modified sequence
atgaccggcgcaaaacggaagaagaagtcaatgctgtggtcaaaaatgcacacaccacagtgcgaagacatcatacagtggtgccggaggcggttgcccattctcgactgggcaccgcactacaatctgaaggagaacttgctccctgacacagtatccggtatcatgttggccgtacagcaagtgacacaaggccttgccttcgctgtgctgtcttcggttcaccctgtgtttggtctgtacgggtcactgttcccggcaatcatatatgcgatcttcgggatgggccatcacgttgcaactgggacatttgccttgacttctctgatcagtgccaatgccgtggaacggatcgtgccccagaatatgcagaacctgacgacccaaagtaatacgagtgttctggggttgtccgattttgagatgcagagaatccacgtcgcggcagcggtaagtttccttggcggtgtgattcaggtagcaatgttcgtgctgcaactcggctcagctacctttgtggtcacagagccagtcatttctgccatgactaccggtgctgccacccacgtggtgacctctcaggtaaaatatctgctcgggatgaagatgccatacatttccggaccactgggctttttctacatttacgcatatgtgtttgaaaatatcaagagcgtgcggttggaagcactgctcctctcactactgtctatcgtggtcctggtcctggttaaggagctgaatgaacagtttaagcgtaaaattaaggtcgtactgccagtggacctcgttcttatcattgcagcttcatttgcctgttactgtactaatatggagaacacatatggtctcgaggtggttggacacatacctcaaggtatccccagtcctagggcacctcccatgaacattttgagcgcagtgatcactgaagcgttcggggttgccttggttggctatgtggcttctctggcactggcacagggcagtgccaagaaattcaaatatagcattgatgataaccaagagtttcttgctcatgggctttctaatattgttagctcctttttcttttgtatcccgagtgccgctgctatggggagaacagccggattatacagtacaggcgcaaaaacccaggttgcctgtctgatcagttgtatattcgtgttgatcgttatctatgcgatcgggccactgctatattggcttcctatgtgcgttctggcctccattattgttgtgggactcaaaggaatgctcatccaattccgtgatctgaaaaagtattggaacgtggataagatcgactgggggatttgggtttcaacttacgtctttaccatttgcttcgccgcaaacgttgggttgctatttggcgttgtgtgcacaatcgccatcgtgatcggacggttccccagagccatgacagtgtcgatcaagaacatgaaggagatggaatttaaggtgaaaaccgaaatggatagcgagactttgcaacaagtaaaaattatcagtattaataacccactcgtttttttgaatgctaaaaagttttacacagacttgatgaatatgatccagaaggaaaatgcttgtaaccagcctctggacgacatcagcaagtgtgaacagaatactcttctgaattcactgtccaacggcaactgtaacgaggaggcaagccaatcctgtccaaacgagaagtgttacctgattttggattgctctggattcacattttttgactattccggagtgagcatgctcgttgaagtgtatatggattgtaaaggcaggagtgtggatgtactgctggcccactgtactgcctcattgataaaagccatgacatactacgggaatcttgattccgagaagcccatcttcttcgagtctgtgtctgcagctatatcacacatccactctaataagaacctgagtaagttatccgatcactccgaggtttag

SEQ ID NO: 229184 - DNA, 5263 bp, Artificial Sequence
  derived and/or modified sequence
gaatataaggggaattactggcgagagagctgtagaccaacttaacactgaacccattacttttccaagaccagaaaaaaatattacatgaacaggaactacttctccttcagataagaattcaagctttgacattgtaaaccacagacgaattggagcttggcattgaaaggaggtgttctgcaatgattttttttcttgtttagagaagtttacttctacaagaagaaatctgaaaaatgacaggagcaaagaggaaaaagaaaagcatgctttggagcaagatgcataccccccagtgtgaagacattatacagtggtgtagaaggcgactgcccattttggattgggcaccacattacaatctgaaagaaaacttgcttccagacactgtgtctgggataatgttggcagttcaacaggtgacccaaggattggcctttgctgttctctcatctgtgcacccagtgtttggtttatatgggtctctgtttcctgccataatttatgccatatttggaatgggacatcatgttgccacaggcacctttgccttgacatccttaatatcagccaacgccgtggaacggattgtccctcagaacatgcagaatctcaccacacagagtaacacaagcgtgctgggcttatccgactttgaaatgcaaaggatccacgttgctgcagcagtttccttcttgggaggtgtgattcaggtggccatgtttgtgctgcaactgggcagtgccacatttgtggtcacagagcctgtgatcagcgcaatgacaactggggctgccacccatgtggtgacttcacaagtcaaatatctcttgggaatgaaaatgccatatatatccggaccacttggattcttttatatttatgcatatgtttttgaaaacatcaagtctgtgcgactggaagcattgcttttatccttgctgagcattgtggtccttgttcttgttaaagagctgaatgaacagtttaaaaggaaaattaaagttgttcttcctgtagatttagttttgattattgctgcatcatttgcttgttattgcaccaatatggaaaacacatatggattagaagtagttggtcatattccacaaggaattccctcacctagagctcccccgatgaacatcctctctgcggtgatcactgaagctttcggagtggcacttgtaggctatgtggcctcactggctcttgctcaaggatctgccaaaaaattcaaatattcaattgatgacaaccaggaatttttggcccatggcctcagcaatatagtttcttcatttttcttctgcataccaagtgctgctgccatgggaaggacggctggcctgtacagcacaggagcgaagacacaggtggcttgtctaatatcttgcattttcgtccttatagtcatctatgcaataggacctttgctttactggctgcccatgtgtgtccttgcaagcattattgttgtgggactgaagggaatgctaatacagttccgagatttaaaaaaatattggaatgtggataaaatcgattggggaatatgggtcagtacatatgtatttacaatatgctttgctgccaatgtgggactgctgtttggtgttgtttgtaccatagctatagtgataggacgcttcccaagagcaatgactgtaagtataaaaaatatgaaagaaatggaatttaaagtgaagacagaaatggacagtgaaaccctgcagcaggtgaaaattatctcaataaacaacccgcttgttttcctgaatgcaaaaaaattttatactgatttaatgaacatgatccaaaaggaaaatgcctgtaatcagccacttgatgatatcagcaagtgtgaacaaaacacattgcttaattccctatccaatggcaactgcaatgaagaagcttcacagtcctgccctaatgagaagtgttatttaatcctggattgcagtggatttaccttttttgactattctggagtctccatgcttgttgaggtttacatggactgtaaaggcaggagtgtggatgtattgttagcccattgtacagcttccttgataaaagcaatgacgtattatggaaacctagactcagagaaaccaattttttttgaatcggtatctgctgcaataagtcatatccattcaaataagaatttgagcaaactcagtgaccacagtgaagtctgagacccttttgtcacagtacagctcttgtctttaccaactgcctgaagaggccatatgctggcattttgcacaactttttggttgtttagatcctacagatgacctctgctacaataagtacgatgtgacttagtaactgcatagcagttggaaagaactgccaacttttttttctcatttttgttagtaagaagattcgcttagttattttatgtaaaaatcagtatgtgtttagttttagtgtactgaagggtaaacatggttttattttattttaccatattattttgtgttgttttatttctattgtgctgtaagttgatgtttaaaattgagaaatacttttgtcataggtaatttggaacatttacaagccatttgtaaaattttaagataatctgtaactaatacataaaaacaacttagcaaatgtgccattttcacacaacttctctctgtataggcctctgaaatatcaataaggctaaatattactttacacagtaagatgtgaaattcacaaaaagtaaaccaaacaaaacgaatgaaaaactggaaataattcgtttccatatctttccatacatccatttctgaagtattcaggaatgttttcataatcgaaagaaacgggtatccaaataaaaccaagttcttgacattggtctgttttgctgtgaatattggaaatgcttaggatcttcagacccaatagctctaattttaacatttctacccaataagaggctctgttttccactgaagctttgttggagaaagagaatatgaaaattacacattttataatttttagatgagaaaataccactagcagaatagctttgtgctattccagtataagatgaactgtaataatttttgacttccctatttcagagatagtcaatataatatgtttatctatatccatatggatggataggtaggtagatcttcatagatttttttttcttttgttagaggagagcttgatgtgattatcttcaaacccaccaaaccaacaggataattgacaaataaacgccataggctaggctgaactgtatgttactgttttcatgcttatacatatattttcaatcacatacaagtacatagaatttcacattttaatttagcaaattgatttacctaggaaaaaattatcaccttcaaagataggcatagacacataattatgcttaagcttttaacagcattttaaccgctctaaaaattaccagagtaagaaaaagctaggtactttaaagtgagtttgagaaacaagttgaaactaaaattaaaataccagccatttaggtgctttctctggcatctataaaagtaaattctagtgcctgccaagtgatggattataatggtctctagcaaatgtgtggtaaacattcatatggccattaattttaacattaaatcgtaggtagggcaatgtagtaaaatgaaagagaattaagaaaggttttgaattcttataacatatccagccatttcaattttgattgaaatgaactacaaagaatagtgtttgtccctatggtagcctcagtctctttatcactaacttggattgaaatgagtgaggccaactcacattcccatcaaacactcttccaaggaaaagcagaagtaataattggaggtaaagtttccttagagaaaataattttattctgctttgtccaattaaattattccaatggcggatggtaatattcaccatctctaattcattggtcactggtaggtaagcatgagttaaggaaagtcaaaaatgaaaatatattttgctgtgtataaattgatattttgctatgcaactcctgtaattgaatttgtataatgcaggcactttctaatttattagagattatggatcagttctgacattaaaatcatagttaattgatggatggtttttatagtttgttgataaagtggacacagtattgtctgagcagttatattttaatgcatttcagtgtttatagtagaagtttagtggataaaactttaagtccaataacttgggggtcaaatgctaatgttttattcaatgtaaaggaagaccaaaccatgtaccttatgaagacctttgttttaagacttccacacaccaaggctacaatgactgttaacctggaggaagtctctggtatggagttctgagagcttaagagctaaacatgagtttagacacacaagattctaaaatgcaaatgtttattttgaagcaggcattgacaacacaaaaactgtgtagtggtcttgatgctggattgtttctagagtcacaatgaattatttttatgagattaccttatttttatatatgacaaactacttctataatgcttattatggtaaaataaaattggaaaaaattaaaactgacctataagagtgttaaggacctaatagagtgacatatataaattaagcataaaatatgtaaccaggaaaagactgttaacattacatttatgcaaattaaatgcccttaaatttcaccatttgtctttcattttaaaggttatttgctcccgattatatgattcaagtgttataagttttagcttgaactactttgcagtaatttatttgacagatctctattctataaatgtgtaatgtgatgaagaaagagatctttcttttttaatgaaaacattaatgtgttaataccctgtatggataatgcttgacatttagtggtttccaaaatatattagtatattgttgaacatacattatgccttagaaatgcacattctgtattttgtgggatgataatctaattcagtatagaatatgctgtttggcaatgagtttgtggccagatttcaaatagggagttaagtggtactttcacaatccaaagatttttagttaaaaatcatgtagtctaatatgctgcagttatttttttatatttttcaatgcatttaattatcttttttataattctttgtactaactcagcatgtaacaaccaatttacatggaaataaatcgaaatatgataactattatgc

SEQ ID NO: 229185 - DNA, 818 bp, Artificial Sequence
  derived and/or modified sequence
tgaagccagcaagtcttgactaatctccaagcaatgtagctgtaaaaggactggaagataagcaagaatctgaagctggtgcctctccaagtattaatttgttcttacaaatgttttactcaacgtgaccctaacctctttggaattgctcaggtgtagaacagagaagtttacttctacaagaagaaatctgaaaaatgacaggagcaaagaggaaaaagaaaagcatgctttggagcaagatgcataccccccagtgtgaagacattatacagtggtgtagaaggcgactgcccattttggattgggcaccacattacaatctgaaagaaaacttgcttccagacactgtgtctgggataatgttggcagttcaacaggtgacccaaggattggcctttgctgttctctcatctgtgcacccagtgtttggtttatatgggtctctgtttcctgccataatttatgccatatttggaatgggacatcatgttgccacaggcacctttgccttgacatccttaatatcagccaacgccgtggaacggattgtccctcagaacatgcagaatctcaccacacagagtaacacaagcgtgctgggcttatccgactttgaaatgcaaaggatccacgttgctgcagcagtttccttcttgggaggtgtgattcaggtggccatgtttgtgctgcaactgggcagtgccacatttgtggtcacagagcctgtgatcagcgcaatgacaactggggctgccacccatgtggtgacttcacaagtcaaatatctcttgggaatgaaaatgccatatatatcc

SEQ ID NO: 229186 - DNA, 2902 bp, Artificial Sequence
  derived and/or modified sequence
ccagcaagtcttgactaatctccaagcaatgtagctgtaaaaggactggaagataagcaagaatctgaagctggtgcctctccaagtattaatttgttcttacaaatgttttactcaacgtgaccctaacctctttggaattgctcaggtgtagaacagctttgacattgtaaaccacagacgaattggagcttggcattgaaaggaggtgttctgcaatgattttttttcttgtttagagaagtttacttctacaagaagaaatctgaaaaatgacaggagcaaagaggaaaaagaaaagcatgctttggagcaagatgcataccccccagtgtgaagacattatacagtggtgtagaaggcgactgcccattttggattgggcaccacattacaatctgaaagaaaacttgcttccagacactgtgtctgggataatgttggcagttcaacaggtgacccaaggattggcctttgctgttctctcatctgtgcacccagtgtttggtttatatgggtctctgtttcctgccataatttatgccatatttggaatgggacatcatgttgccacaggcacctttgccttgacatccttaatatcagccaacgccgtggaacggattgtccctcagaacatgcagaatctcaccacacagagtaacacaagcgtgctgggcttatccgactttgaaatgcaaaggatccacgttgctgcagcagtttccttcttgggaggtgtgattcaggtggccatgtttgtgctgcaactgggcagtgccacatttgtggtcacagagcctgtgatcagcgcaatgacaactggggctgccacccatgtggtgacttcacaagtcaaatatctcttgggaatgaaaatgccatatatatccggaccacttggattcttttatatttatgcatatgtttttgaaaacatcaagtctgtgcgactggaagcattgcttttatccttgctgagcattgtggtccttgttcttgttaaagagctgaatgaacagtttaaaaggaaaattaaagttgttcttcctgtagatttagttttgattattgctgcatcatttgcttgttattgcaccaatatggaaaacacatatggattagaagtagttggtcatattccacaaggaattccctcacctagagctcccccgatgaacatcctctctgcggtgatcactgaagctttcggagtggcacttgtaggctatgtggcctcactggctcttgctcaaggatctgccaaaaaattcaaatattcaattgatgacaaccaggaatttttggcccatggcctcagcaatatagtttcttcatttttcttctgcataccaagtgctgctgccatgggaaggacggctggcctgtacagcacaggagcgaagacacaggtggcttgtctaatatcttgcattttcgtccttatagtcatctatgcaataggacctttgctttactggctgcccatgtgtgtccttgcaagcattattgttgtgggactgaagggaatgctaatacagttccgagatttaaaaaaatattggaatgtggataaaatcgattggggaatatgggtcagtacatatgtatttacaatatgctttgctgccaatgtgggactgctgtttggtgttgtttgtaccatagctatagtgataggacgcttcccaagagcaatgactgtaagtataaaaaatatgaaagaaatggaatttaaagtgaagacagaaatggacagtgaaaccctgcagcaggtgaaaattatctcaataaacaacccgcttgttttcctgaatgcaaaaaaattttatactgatttaatgaacatgatccaaaaggaaaatgcctgtaatcagccacttgatgatatcagcaagtgtgaacaaaacacattgcttaattccctatccaatggcaactgcaatgaagaagcttcacagtcctgccctaatgagaagtgttatttaatcctggattgcagtggatttaccttttttgactattctggagtctccatgcttgttgaggtttacatggactgtaaaggcaggagtgtggatgtattgttagcccattgtacagcttccttgataaaagcaatgacgtattatggaaacctagactcagagaaaccaattttttttgaatcggtatctgctgcaataagtcatatccattcaaataagaatttgagcaaactcagtgaccacagtgaagtctgagacccttttgtcacagtacagctcttgtctttaccaactgcctgaagaggccatatgctggcattttgcacaactttttggttgtttagatcctacagatgacctctgctacaataagtacgatgtgacttagtaactgcatagcagttggaaagaactgccaacttttttttctcatttttgttagtaagaagattcgcttagttattttatgtaaaaatcagtatgtgtttagttttagtgtactgaagggtaaacatggttttattttattttaccatattattttgtgttgttttatttctattgtgctgtaagttgatgtttaaaattgagaaatacttttgtcataggtaatttggaacatttacaagccatttgtaaaattttaagataatctgtaactaatacataaaaacaacttagcaaatgtgccattttcacacaacttctctctgtataggcctctgaaatatcaataaggctaaatattactttacacagtaagatgtgaaattcacaaaaagtaaaccaaacaaaacgaatgaaaaactggaaataattcgtttccatatctttccatacatccatttctgaagtattcaggaatgttttcataatcgaaagaaacgggtatccaaataaaaccaagttcttga

SEQ ID NO: 229187 - protein, 1457 aa, Artificial Sequence
  derived and/or modified sequence
MAGNSLVLPIVLWGRKAPTHCISAVLLTDDGATIVTGCHDGQICLWDLSVELQINPRALLFGHTASITCLSKACASSDKQYIVSASESGEMCLWDVSDGRCIEFTKLACTHTGIQFYQFSVGNQREGRLLCHGHYPEILVVDATSLEVLYSLVSKISPDWISSMSIIRSHRTQEDTVVALSVTGILKVWIVTSEISDMQDTEPIFEEESKPIYCQNCQSISFCAFTQRSLLVVCSKYWRVFDAGDYSLLCSGPSENGQTWTGGDFVSSDKVIIWTENGQSYIYKLPASCLPASDSFRSDVGKAVENLIPPVQHILLDRKDKELLICPPVTRFFYGCREYFHKLLIQGDSSGRLNIWNISDTADKQGSEEGLAMTTSISLQEAFDKLNPCPAGIIDQLSVIPNSNEPLKVTASVYIPAHGRLVCGREDGSIVIVPATQTAIVQLLQGEHMLRRGWPPHRTLRGHRNKVTCLLYPHQVSARYDQRYLISGGVDFSVIIWDIFSGEMKHIFCVHGGEITQLLVPPENCSARVQHCICSVASDHSVGLLSLREKKCIMLASRHLFPIQVIKWRPSDDYLVVGCSDGSVYVWQMDTGALDRCVMGITAVEILNACDEAVPAAVDSLSHPAVNLKQAMTRRSLAALKNMAHHKLQTLATNLLASEASDKGNLPKYSHNSLMVQAIKTNLTDPDIHVLFFDVEALIIQLLTEEASRPNTALISPENLQKASGSSDKGGSFLTGKRAAVLFQQVKETIKENIKEHLLDDEEEDEEIMRQRREESDPEYRSSKSKPLTLLEYNLTMDTAKLFMSCLHAWGLNEVLDEVCLDRLGMLKPHCTVSFGLLSRGGHMSLMLPGYNQPACKLSHGKTEVGRKLPASEGVGKGTYGVSRAVTTQHLLSIISLANTLMSMTNATFIGDHMKKGPTRPPRPSTPDLSKARGSPPTSSNIVQGQIKQGWSQLAAMHCVMLPDLLGLDKFRPPLLEMLARRWQDRCLEVREAAQALLLAELRRIEQAGRKEAIDAWAPYLPQYIDHVISPGVTSEAAQTITTAPDASGPEAKVQEEEHDLVDDDITTGCLSSVPQMKKISTSYEERRKQATAIVLLGVIGAEFGAEIEPPKLLTRPRSSSQIPEGFGLTSGGSNYSLARHTCKALTFLLLQPPSPKLPPHSTIRRTAIDLIGRGFTVWEPYMDVSAVLMGLLELCADAEKQLANITMGLPLSPAADSARSARHALSLIATARPPAFITTIAKEVHRHTALAANTQSQQNMHTTTLARAKGEILRVIEILIEKMPTDVVDLLVEVMDIIMYCLEGSLVKKKGLQECFPAICRFYMVSYYERNHRIAVGARHGSVALYDIRTGKCQTIHGHKGPITAVAFAPDGRYLATYSNTDSHISFWQMNTSLLGSIGMLNSAPQLRCIKTYQVPPVQPASPGSHNALKLARLIWTSNRNVILMAHDGKEHRFMV

SEQ ID NO: 229188 - DNA, 4374 bp, Artificial Sequence
  derived and/or modified sequence
atggccggcaacagcctggtgctgcccatcgtgctgtggggcagaaaggcccccacccactgcatcagcgccgtgctgctgaccgacgacggcgccaccatcgtgaccggctgccacgacggccagatctgcctgtgggacctgagcgtggagctgcagatcaaccccagagccctgctgttcggccacaccgccagcatcacctgcctgagcaaggcctgcgccagcagcgacaagcagtacatcgtgagcgccagcgagagcggcgagatgtgcctgtgggacgtgagcgacggcagatgcatcgagttcaccaagctggcctgcacccacaccggcatccagttctaccagttcagcgtgggcaaccagagagagggcagactgctgtgccacggccactaccccgagatcctggtggtggacgccaccagcctggaggtgctgtacagcctggtgagcaagatcagccccgactggatcagcagcatgagcatcatcagaagccacagaacccaggaggacaccgtggtggccctgagcgtgaccggcatcctgaaggtgtggatcgtgaccagcgagatcagcgacatgcaggacaccgagcccatcttcgaggaggagagcaagcccatctactgccagaactgccagagcatcagcttctgcgccttcacccagagaagcctgctggtggtgtgcagcaagtactggagagtgttcgacgccggcgactacagcctgctgtgcagcggccccagcgagaacggccagacctggaccggcggcgacttcgtgagcagcgacaaggtgatcatctggaccgagaacggccagagctacatctacaagctgcccgccagctgcctgcccgccagcgacagcttcagaagcgacgtgggcaaggccgtggagaacctgatcccccccgtgcagcacatcctgctggacagaaaggacaaggagctgctgatctgcccccccgtgaccagattcttctacggctgcagagagtacttccacaagctgctgatccagggcgacagcagcggcagactgaacatctggaacatcagcgacaccgccgacaagcagggcagcgaggagggcctggccatgaccaccagcatcagcctgcaggaggccttcgacaagctgaacccctgccccgccggcatcatcgaccagctgagcgtgatccccaacagcaacgagcccctgaaggtgaccgccagcgtgtacatccccgcccacggcagactggtgtgcggcagagaggacggcagcatcgtgatcgtgcccgccacccagaccgccatcgtgcagctgctgcagggcgagcacatgctgagaagaggctggcccccccacagaaccctgagaggccacagaaacaaggtgacctgcctgctgtacccccaccaggtgagcgccagatacgaccagagatacctgatcagcggcggcgtggacttcagcgtgatcatctgggacatcttcagcggcgagatgaagcacatcttctgcgtgcacggcggcgagatcacccagctgctggtgccccccgagaactgcagcgccagagtgcagcactgcatctgcagcgtggccagcgaccacagcgtgggcctgctgagcctgagagagaagaagtgcatcatgctggccagcagacacctgttccccatccaggtgatcaagtggagacccagcgacgactacctggtggtgggctgcagcgacggcagcgtgtacgtgtggcagatggacaccggcgccctggacagatgcgtgatgggcatcaccgccgtggagatcctgaacgcctgcgacgaggccgtgcccgccgccgtggacagcctgagccaccccgccgtgaacctgaagcaggccatgaccagaagaagcctggccgccctgaagaacatggcccaccacaagctgcagaccctggccaccaacctgctggccagcgaggccagcgacaagggcaacctgcccaagtacagccacaacagcctgatggtgcaggccatcaagaccaacctgaccgaccccgacatccacgtgctgttcttcgacgtggaggccctgatcatccagctgctgaccgaggaggccagcagacccaacaccgccctgatcagccccgagaacctgcagaaggccagcggcagcagcgacaagggcggcagcttcctgaccggcaagagagccgccgtgctgttccagcaggtgaaggagaccatcaaggagaacatcaaggagcacctgctggacgacgaggaggaggacgaggagatcatgagacagagaagagaggagagcgaccccgagtacagaagcagcaagagcaagcccctgaccctgctggagtacaacctgaccatggacaccgccaagctgttcatgagctgcctgcacgcctggggcctgaacgaggtgctggacgaggtgtgcctggacagactgggcatgctgaagccccactgcaccgtgagcttcggcctgctgagcagaggcggccacatgagcctgatgctgcccggctacaaccagcccgcctgcaagctgagccacggcaagaccgaggtgggcagaaagctgcccgccagcgagggcgtgggcaagggcacctacggcgtgagcagagccgtgaccacccagcacctgctgagcatcatcagcctggccaacaccctgatgagcatgaccaacgccaccttcatcggcgaccacatgaagaagggccccaccagaccccccagacccagcacccccgacctgagcaaggccagaggcagcccccccaccagcagcaacatcgtgcagggccagatcaagcagggctggagccagctggccgccatgcactgcgtgatgctgcccgacctgctgggcctggacaagttcagaccccccctgctggagatgctggccagaagatggcaggacagatgcctggaggtgagagaggccgcccaggccctgctgctggccgagctgagaagaatcgagcaggccggcagaaaggaggccatcgacgcctgggccccctacctgccccagtacatcgaccacgtgatcagccccggcgtgaccagcgaggccgcccagaccatcaccaccgcccccgacgccagcggccccgaggccaaggtgcaggaggaggagcacgacctggtggacgacgacatcaccaccggctgcctgagcagcgtgccccagatgaagaagatcagcaccagctacgaggagagaagaaagcaggccaccgccatcgtgctgctgggcgtgatcggcgccgagttcggcgccgagatcgagccccccaagctgctgaccagacccagaagcagcagccagatccccgagggcttcggcctgaccagcggcggcagcaactacagcctggccagacacacctgcaaggccctgaccttcctgctgctgcagccccccagccccaagctgcccccccacagcaccatcagaagaaccgccatcgacctgatcggcagaggcttcaccgtgtgggagccctacatggacgtgagcgccgtgctgatgggcctgctggagctgtgcgccgacgccgagaagcagctggccaacatcaccatgggcctgcccctgagccccgccgccgacagcgccagaagcgccagacacgccctgagcctgatcgccaccgccagaccccccgccttcatcaccaccatcgccaaggaggtgcacagacacaccgccctggccgccaacacccagagccagcagaacatgcacaccaccaccctggccagagccaagggcgagatcctgagagtgatcgagatcctgatcgagaagatgcccaccgacgtggtggacctgctggtggaggtgatggacatcatcatgtactgcctggagggcagcctggtgaagaagaagggcctgcaggagtgcttccccgccatctgcagattctacatggtgagctactacgagagaaaccacagaatcgccgtgggcgccagacacggcagcgtggccctgtacgacatcagaaccggcaagtgccagaccatccacggccacaagggccccatcaccgccgtggccttcgcccccgacggcagatacctggccacctacagcaacaccgacagccacatcagcttctggcagatgaacaccagcctgctgggcagcatcggcatgctgaacagcgccccccagctgagatgcatcaagacctaccaggtgccccccgtgcagcccgccagccccggcagccacaacgccctgaagctggccagactgatctggaccagcaacagaaacgtgatcctgatggcccacgacggcaaggagcacagattcatggtgtag

SEQ ID NO: 229189 - DNA, 4374 bp, Artificial Sequence
  derived and/or modified sequence
atggccgggaactcattagtgctccccattgttctctggggcagaaaagcccctacccattgcatctctgccgtcctgctgacagatgatggagccactattgtgaccgggtgccacgatgggcaaatatgcctgtgggatttatccgtggaactacagatcaatcctcgtgccctgctgtttggtcacaccgcaagcattacctgcctatctaaggcctgtgcttcttccgacaagcagtacatagtctctgcttctgagtcaggcgaaatgtgtctgtgggatgtctcagatggccggtgtatcgaattcaccaagctggcctgtacacacaccggaattcagttttatcagtttagcgttggtaatcagagggagggccgcttgttgtgtcatggacattatccagaaattctcgtagtggatgcaacttccctggaagtgctttacagtttagtctctaagatatcccccgattggatctctagcatgtccatcattcgaagccatcggacacaagaagataccgtggtggccttatccgtgaccggaatattaaaggtttggatagtgacctctgaaattagtgatatgcaggacacagaaccgatctttgaggaggagtcaaagccgatctattgccagaattgtcagtccatctctttctgtgcttttacccagaggtcactcttggtcgtgtgttccaaatattggcgggtgttcgatgccggggactatagtctgctctgctccggcccgagtgagaacgggcagacctggacagggggtgatttcgttagcagcgacaaggtaattatctggactgagaacggccaatcctatatttacaaactgccagcctcctgtttacctgccagcgacagttttaggagcgatgtcgggaaggctgtcgagaacctgattcctcctgttcagcacattttgctcgatagaaaggacaaggaattgctaatctgccccccagttaccaggttcttctatggttgcagagagtatttccacaaactgttgattcagggggacagtagtggcagactcaacatatggaatatctcggacaccgcggataagcaaggatctgaagaggggctggcaatgaccacatctatcagcctgcaggaagcctttgataagcttaacccctgccctgcaggcataatcgatcagctgtccgttatccctaatagcaacgagcccttaaaggttaccgcgtctgtgtatattcctgcccacggcaggctcgtttgcgggcgagaggacggcagcatcgtcattgtgcctgctacccagaccgccatagtacagctgcttcagggagagcatatgctcaggcgcggctggccacctcacaggaccctgcgcggtcatagaaacaaggtgacgtgtttgctctatccacatcaggtttccgcccggtatgaccagcggtatctgatttcagggggagtggatttcagcgtaattatctgggacatcttcagtggcgagatgaaacacatcttctgcgttcacggaggggaaattacacaactgctcgttcctccagagaactgctctgccagagtccagcattgtatctgttctgtcgcaagcgaccattctgtgggcctgctgtcactcagggaaaagaagtgtattatgctcgcttctcgccatctcttcccgatacaggttatcaagtggcgcccaagtgacgactacctggttgtaggctgctccgatggcagtgtgtacgtgtggcagatggacaccggcgctttagaccgctgtgtgatgggcattacggccgtagagatcctgaacgcatgcgatgaggctgtgcctgccgcggtggacagcctgtcacaccctgctgtgaacctgaagcaagcgatgacccgcagatcactagcagccctgaagaatatggctcatcataagctgcagacactggcgaccaacctcctggcatccgaggcctcagacaagggtaacctgccaaaatacagtcataacagtctcatggttcaggccataaaaaccaatttgaccgacccagatattcatgtgctcttcttcgacgtagaagctctgattatccagttgctcactgaggaagcgtctcggccgaataccgccctaatctcgcccgagaatttgcagaaagcctctggctccagtgataaggggggaagcttcctgaccggcaaaagagccgccgtgctgtttcagcaggtgaaggagacaattaaagagaacattaaagagcacttgctggacgacgaggaagaagacgaagaaattatgcgccagagacgagaagagagcgatccggagtacagatcctcaaagtcaaagcccctcaccctgctggaatacaatctgaccatggataccgctaagctatttatgagctgcttacatgcctgggggctgaacgaggtactcgatgaggtctgcctggatagactgggcatgctgaagcctcactgcactgtgtcctttggcctcctgtctagaggaggacacatgtcactgatgctgcctggttacaatcagccagcatgtaagttaagtcatggaaagacggaagtaggccgcaagctgcccgcctctgagggggtgggcaaagggacctacggtgtgtcgagagctgtgacaactcagcatctgttgtctatcatctctctcgccaatactctaatgagtatgacaaacgcaacctttatcggagaccacatgaagaaagggcccacaagaccaccccgccccagcaccccggacctgtccaaagcgaggggcagcccaccgaccagctctaatatcgttcaggggcagatcaagcaggggtggtcccagctggcagctatgcactgtgtgatgctgcccgacctgctcggcctggacaaatttcggccgcccctcctggagatgctggcccgcaggtggcaggatagatgtttggaggttcgggaagccgctcaagcgttgctgctggccgagttgcgccggatagaacaggccggtcgcaaagaggctatcgatgcttgggccccttatttgccgcaatatatcgaccacgtgatctctcccggggtgacctcagaggctgctcagacaataactactgcccccgacgcctccgggccagaggctaaggtccaggaagaggagcacgatctggttgatgatgatattaccaccggctgtctctcaagcgttccacagatgaaaaagatttccacatcatacgaagaacggcggaagcaggcaaccgcaattgtgctcctgggagtgattggtgccgaattcggcgcggagatcgaaccacctaaactgcttacacggcctcgatcttcatctcagatccccgaggggtttggcttgacgtcaggaggtagcaattacagcctcgcacgccatacgtgtaaagccctcactttcctgctgctccagccaccctcccccaagcttccacctcactctacaataaggcgaacagctattgatttgattgggcgggggttcacagtctgggagccctatatggatgtaagcgccgtcctaatgggcctgctcgagttgtgtgctgacgctgagaagcagcttgccaatattacaatgggcttacctttatcaccagccgcagactctgctagatccgcacgacacgcactcagcctcatcgctaccgcgcggccccctgcatttattaccacaatcgctaaagaagtgcaccgccatacagccttggcagccaatacacagagtcagcagaacatgcatacgacaaccttagctagggcaaagggggaaatactcagagtcatcgagatcctgatcgaaaaaatgcccacggatgttgtcgacctattggtagaggtgatggatataattatgtactgcctggagggaagcctggtgaaaaaaaagggtcttcaagaatgctttcctgcaatttgtcgtttctacatggtgagctattacgaacgcaaccaccgaattgctgtgggcgctagacatggctcggtcgccctgtatgacatacgcaccgggaagtgccaaaccattcacggccacaaaggccctattacagccgttgccttcgctcctgacggacggtacctggccacttactctaatactgattcccacattagtttttggcagatgaatacatctttgcttggtagcatcgggatgctcaattccgctccgcaattgcggtgtattaaaacataccaggtgccccctgtgcagccagcttcccccggatcccacaatgcgttgaaactggcccgacttatctggacatctaaccgcaatgtgatcctgatggcacacgatggcaaagagcacagattcatggtgtag

SEQ ID NO: 229190 - DNA, 4374 bp, Artificial Sequence
  derived and/or modified sequence
atggcagggaactctctagtgttgccaatcgtcctgtggggccgaaaagcacctactcattgcatatccgccgtgttgcttactgatgatggagccacaatcgtgacagggtgccacgatgggcaaatctgcctgtgggacttgagcgtcgaattgcagatcaatcctcgcgcattactgtttggacatactgcgagcataacatgtctgtctaaagcttgcgcatcaagcgataaacagtacatcgtgagcgcttcggagtccggtgagatgtgtttgtgggacgtgtctgatggccgttgtattgagtttacaaaactcgcctgtactcatacgggtattcagttctatcagttctccgttgggaatcagcgtgagggacgcctgctgtgccatggccactaccccgagatcctggtcgtagacgcgacctcactggaggtgctgtatagtcttgtgtcgaagattagtcccgactggatttcttccatgagtattataaggagtcataggacccaggaagatacagtggtcgcgctctcagtgaccggaatcctaaaggtatggatcgtgacatccgagattagtgatatgcaggacactgagccaatcttcgaagaggagtccaagccaatatattgccaaaattgccaatcgataagcttctgtgcgttcacacagaggagcttgttagttgtttgcagcaagtattggagagtcttcgacgcaggagactactctctcctgtgctcgggaccctctgaaaatggccagacttggacggggggcgatttcgtgagttccgacaaggtgatcatttggacggaaaatgggcagtcatacatatacaagcttcctgcatcctgtctgcctgcctccgattcttttcgatccgacgtcggcaaggctgtggaaaatctgatccctccagttcagcatatcctcctcgacaggaaagataaagagcttctgatctgccctccagtcacacggtttttctacgggtgtcgcgaatatttccacaaattactaatccaaggagatagttccggcagactgaatatttggaatatcagtgacaccgccgataaacagggtagtgaggaaggtttagctatgaccacttctatttccctgcaggaagcgttcgataaactgaacccctgcccagccggaattattgaccaactttctgttattccaaattccaatgaaccccttaaagtgaccgcctcggtctacatccctgcccacggcagactggtttgtggacgcgaggatgggagcattgtaatcgtgcccgccacccagaccgcaatcgtccaacttctccagggggagcatatgctccgacgcgggtggcctccgcacagaacactacggggccaccgcaacaaggtcacctgcctattatatcctcatcaagtgtccgctagatatgaccaacgctatcttataagtggaggtgtcgacttttccgtaattatctgggacatttttagtggagaaatgaagcatatattttgtgtccacggaggtgaaatcacccagctcttggttccgccggaaaattgctccgcccgcgtccagcactgcatctgcagtgttgccagcgaccactccgtcggcctgttatcccttcgcgagaaaaaatgcattatgctggcaagtagacacctgtttcccatacaggtgataaaatggagaccaagtgacgattacttggtggtggggtgctccgacgggagcgtgtacgtttggcagatggacaccggcgcactggaccgatgtgtcatgggcatcactgccgtagagattttaaacgcttgtgacgaggctgtcccggcggccgtagacagcctgagccatccagccgtgaatctgaagcaggcaatgacgaggcgctctcttgcagcgcttaaaaacatggcccaccacaaactgcaaacgctggctaccaacctcctcgctagtgaggcttccgataaaggaaacctccccaagtattctcacaactctctaatggtgcaggccataaagaccaatctgacggacccagatatccatgtgctattctttgacgtggaggctctgattatccagctgctcaccgaggaagcatcaagaccaaacactgctctgatctctccagaaaacctccagaaggcatctgggtccagcgacaaaggcggctcctttctaacaggaaagcgggcagccgtgctgttccagcaggttaaggaaacgattaaagaaaacataaaagaacacctcttggacgatgaagaggaggatgaagagatcatgaggcaacggagggaagaatccgatccagagtatcggtctagtaaaagtaagcctctgacactcctagagtacaacctgacaatggacaccgctaagctgtttatgagttgcttacatgcatggggtcttaatgaggtgctcgatgaggtttgtctggacaggctagggatgctcaaaccacactgtactgtgtcatttggcctcctgtctcgcggcggtcacatgtctctgatgttgccaggttacaaccagcccgcctgtaaactctcacatgggaagacagaggtcggccggaagctacctgctagtgaaggcgtgggaaagggcacatatggtgtgtcacgggccgtgactacccagcatttgctgagtattatctctctcgccaatactctgatgtcgatgacaaatgccactttcatcggagaccacatgaagaaaggcccgacccggccccctaggccaagtacccccgatctgtctaaagcaaggggtagtccaccaaccagctctaatattgtccaagggcagataaagcaggggtggagccaattggccgccatgcactgcgtgatgctaccagatttgctcggtctagataagtttaggccaccgctcttggagatgctcgctaggaggtggcaggaccggtgtcttgaggtccgggaggcagcacaggcactgctgctcgctgagctgaggagaattgagcaggcaggaagaaaagaagccatcgatgcatgggctccttacttgccgcagtatattgatcatgtcatctccccaggagtgacttcagaggcagcccagactatcaccaccgcgcccgacgcatcagggcctgaagccaaagtgcaggaggaggaacatgatctcgttgatgacgacatcaccaccggctgtctgagctccgtgccccaaatgaaaaagatctctacaagttatgaggagcggagaaaacaggcaactgccatcgtactcctcggggtcattggcgctgagttcggtgctgagattgagccccctaagctgctgacacgcccaaggtcctccagccagattccagaaggctttggcttaaccagcggtgggagcaactattcattggctcgacatacctgcaaagccctcacattcttgctgctgcagccaccatcgccaaagctgcccccacacagcacaatccgtagaacggcgatcgacctgattggtagaggtttcactgtttgggaaccatacatggatgtgtctgccgtcctgatgggactgttggagttatgcgcagacgctgaaaagcagctggcaaacattaccatgggtttacccctgagccccgctgctgatagtgcccgatccgcaaggcatgccctgtctctcattgcgacggccaggccaccagcattcattactactattgcgaaagaggtccatcgccataccgccctggcggcgaatacccagtctcagcaaaatatgcatacaacaacactcgcacgggccaagggagagattctgagggtaatcgagatcctgatcgagaaaatgccaaccgacgttgttgatctgctcgttgaagtgatggatataattatgtattgtctggaggggagcctggtgaagaagaagggcctgcaggaatgtttcccagccatttgcagattttatatggtgtcttattacgaaaggaaccatcggatagcagtaggggcacgccacggcagtgtggccctttacgacatccgtacaggaaaatgccagaccattcatgggcacaaaggaccaataactgccgtcgcattcgccccagacggacggtatctggccacatattcaaacaccgatagtcacatctccttttggcagatgaacacctcgctactcggttcgattggaatgttgaactcagcaccgcagctgcggtgcataaagacctatcaagtccccccagtccaacctgccagccccggttcccacaatgctctgaagctcgcacgtcttatttggacaagcaatcgcaacgtcatcctgatggcccacgacggtaaagaacatcggtttatggtgtag

SEQ ID NO: 229191 - DNA, 4374 bp, Artificial Sequence
  derived and/or modified sequence
atggccggcaacagcctggtgctgcccatcgtgctgtggggcaggaaggcccccacccactgcatctctgctgtgctgctgacagatgatggagccaccatcgtgacaggctgccatgatggccagatctgcctgtgggacctgtctgtggagctgcagatcaacccccgggccctgctgtttggccacacagccagcatcacctgcctgagcaaggcctgtgccagcagtgacaagcagtacatcgtgtctgccagcgagagcggggagatgtgcctgtgggatgtgtctgatggccgctgcatcgagttcaccaagctggcctgcacccacacaggcatccagttctaccagttctctgtgggcaaccagcgggagggccgcctgctgtgccacggccactacccagagatcctggtggtggatgccaccagcctggaggtgctgtacagcctggtgtccaagatcagcccagactggatcagctccatgagcatcatccgcagccacaggacccaggaggacacagtggtggccctgtctgtgacaggcatcctgaaggtgtggatcgtgaccagcgagatcagtgacatgcaggacacagagcccatctttgaggaggagagcaagcccatctactgccagaactgccagagcatctccttctgtgccttcacccagaggagcctgctggtggtgtgcagcaagtactggagggtgtttgatgctggggactacagcctgctgtgcagcggccccagtgaaaatggccagacctggacaggaggagactttgtgtccagtgacaaggtgatcatctggacagaaaatggccagagctacatctacaagctgcctgccagctgcctgcctgccagtgacagcttcagaagtgatgtgggcaaggctgtggagaacctgatcccccctgtgcagcacatcctgctggacaggaaggacaaggagctgctgatctgcccccctgtgacccgcttcttctacggctgccgggagtacttccacaagctgctgatccagggcgacagcagcggccgcctgaacatctggaacatcagtgacacagctgacaagcagggcagcgaggagggcctggccatgaccaccagcatcagcctgcaggaggcctttgacaagctgaacccctgcccagctggcatcatcgaccagctgagcgtcatccccaacagcaatgagcccctgaaggtgacagcctctgtgtacatcccagcccacggccgcctggtgtgtggccgggaggatggcagcatcgtcatcgtgcctgccacccagacagccatcgtgcagctgctgcagggcgagcacatgctgcggcggggctggccaccccacaggaccctgcggggccacaggaacaaggtgacctgcctgctgtacccccaccaggtgtctgcccgctatgaccagcgctacctgatctctggaggagtggacttcagcgtcatcatctgggacatcttctctggagagatgaagcacatcttctgtgtgcatggaggagagatcacccagctgctggtgcccccagagaactgcagcgcccgggtgcagcactgcatctgcagcgtggccagtgaccacagcgtgggcctgctgagcctgcgggagaagaagtgcatcatgctggccagccgccacctgttccccatccaggtgatcaagtggaggcccagtgatgactacctggtggtgggctgcagtgatggctctgtgtatgtgtggcagatggacacaggagccctggacagatgtgtgatgggcatcacagctgtggagatcctgaatgcctgtgatgaagctgtgcctgctgctgtggacagcctgagccaccctgctgtgaacctgaagcaggccatgacccggcgcagcctggccgccctgaagaacatggcccaccacaagctgcagaccctggccaccaacctgctggccagcgaggccagtgacaagggcaacctgcccaagtacagccacaacagcctgatggtgcaggccatcaagaccaacctgacagatcctgacatccacgtgctcttctttgatgtggaggccctgatcatccagctgctgacagaggaggccagccggcccaacacagccctgatcagccctgagaacctgcagaaggccagcggcagcagtgacaagggcggcagcttcctgaccgggaagagagctgctgtgctcttccagcaggtgaaggagaccatcaaggagaacatcaaggagcacctgctggatgatgaggaggaggatgaggagatcatgaggcagaggcgggaggagagtgaccctgagtaccgcagcagcaagagcaagcccctgaccctgctggagtacaacctgaccatggacacagccaagctgttcatgagctgcctgcacgcctggggcctgaatgaggtgctggatgaggtgtgcctggaccggctgggcatgctgaagccccactgcaccgtgtcctttggcctgctgagcagaggaggccacatgagcctgatgctgcccggctacaaccagcctgcctgcaagctgagccacggcaagacagaggtgggcaggaagctgcctgccagcgagggcgtgggcaagggcacctacggcgtgtccagagctgtgaccacccagcacctgctgagcatcatcagcctggccaacaccctgatgtccatgaccaatgccaccttcatcggggaccacatgaagaagggccccaccaggcctccccggcccagcaccccagacctgagcaaggcccggggcagcccccccaccagcagcaacatcgtgcagggccagatcaagcagggctggagccagctggccgccatgcactgtgtgatgctgcctgacctgctgggcctggacaagttccggccccccctgctggagatgctggcccggcgctggcaggaccgctgcctggaggtgcgggaggccgcccaggccctgctgctggccgagctgcggagaattgagcaggccggcaggaaggaggccattgatgcctgggccccctacctgccccagtacatcgaccacgtgatcagccctggggtgaccagcgaggccgcccagaccatcaccacagccccagatgccagcggccctgaggccaaggtgcaggaggaggagcatgacctggtggatgatgacatcaccaccggctgcctgagctctgtgccccagatgaagaagatcagcaccagctatgaggagaggaggaagcaggccacagccatcgtgctgctgggcgtcatcggggctgagtttggagctgagattgagccccccaagctgctgacccggcccaggagcagcagccagatccctgagggcttcggcctgaccagcggcggcagcaactacagcctggcccggcacacctgcaaggccctgaccttcctgctgctgcagccccccagccccaagctgcccccccacagcaccatcagaagaacagccatcgacctgattggccggggcttcaccgtgtgggagccctacatggatgtgtctgctgtgctgatgggcctgctggagctgtgtgctgatgctgagaagcagctggccaacatcaccatgggcctgcccctgagccctgctgctgacagcgcccggagcgcccggcatgccctgagcctgattgccacagcccggcccccagccttcatcaccaccatcgccaaggaggtgcaccgccacacagccctggccgccaacacccagagccagcagaacatgcacaccaccaccctggcccgggccaagggggagatcctgcgggtgattgagatcctgattgagaagatgcccacagatgtggtggacctgctggtggaggtgatggacatcatcatgtactgcctggagggcagcctggtgaagaagaagggcctgcaggagtgcttccctgccatctgccgcttctacatggtgtcctactatgaaagaaaccacagaattgctgtgggcgcccggcacggctctgtggccctgtatgacatcagaacaggcaagtgccagaccatccacggccacaagggccccatcacagctgtggcctttgccccagatggccgctacctggccacctacagcaacacagacagccacatctccttctggcagatgaacaccagcctgctgggcagcatcggcatgctgaacagcgccccccagctgcgctgcatcaagacctaccaggtgccccctgtgcagcctgccagccctggcagccacaatgccctgaagctggcccggctcatctggaccagcaacagaaatgtcatcctgatggcccatgatggcaaggagcaccgcttcatggtgtag

SEQ ID NO: 229192 - DNA, 4374 bp, Artificial Sequence
  derived and/or modified sequence
atggccggcaacagcctggtgctgcccatcgtgctgtggggccggaaagcacctactcactgcatctctgctgttcttctgacagacgatggtgcaaccatcgtgactggctgccatgatggacaaatttgcttgtgggacttgtcagtggagctccagatcaaccctcgagccttgcttttcggacacacagctagtataacctgcctgagtaaggcttgtgcgtcttcagataaacaatacattgtttccgctagtgagagcggcgagatgtgcctttgggatgtgtccgacggacgctgcattgagttcacaaaattggcttgcacacatacaggcatccagttttatcaattctctgtcggaaatcagcgcgaggggaggctgttgtgccacgggcactatccagagatcctcgtcgtagacgcaacctctcttgaagtgttgtacagcctggtgagcaaaattagtccagactggatttcatctatgagtatcattaggagccatagaacacaggaagataccgtggtggcactgtcagttactggtatcctcaaagtgtggattgtgacatccgagattagtgacatgcaggacaccgagcccatctttgaggaagagtctaagccaatctattgccagaattgtcagagcataagcttctgcgcatttacccaaagaagcttgctggttgtctgttctaaatactggcgagttttcgacgcaggtgattactccttactgtgttctggcccaagcgaaaatggacaaacctggacaggtggtgactttgtgtcaagcgacaaggtcattatctggactgagaacggccagtcctacatttataaactcccggccagttgtttgcctgcgagcgatagttttcgaagtgacgtcggcaaggctgtggagaatctcattccacccgtgcagcacattcttctcgaccgtaaggataaggagcttctcatttgtcctcctgttacacgcttcttttatggttgccgcgagtactttcacaagctactgatccaaggagactctagcgggagactgaatatctggaacataagtgatactgcagacaagcagggctcagaagaaggcttagccatgacaacgtcaattagcctccaagaagcttttgataagctgaatccttgcccggcagggatcattgaccagctgtcggtgatcccaaatagtaacgagcctttgaaggtgacggctagcgtgtatatccctgcgcatggcaggctcgtatgtggaagagaggacggaagcattgtgatagtcccagctactcagacagccatcgtgcagcttctgcagggtgagcacatgctgcgtaggggctggcctccacacagaaccttgaggggacataggaataaggtgacttgcctgctttatccacaccaggtcagcgctaggtacgatcaacggtacctgataagtgggggcgtcgacttttctgtcatcatatgggacatattctccggggaaatgaaacacatcttttgtgttcacggcggggagattactcagctgctggttccacccgaaaattgttcagccagggtccagcattgcatttgcagtgtggcttcagaccactccgtcggcctactgagcctgagagaaaagaagtgtatcatgctggctagtcgccatcttttcccgatacaggtgatcaaatggcgccccagcgatgactatctggtagtcggttgttccgatggaagcgtctatgtgtggcagatggacacaggagcactcgataggtgcgtcatggggattacagccgtcgagatcctgaatgcttgcgacgaagccgtacctgccgccgtggattccctgtcccaccctgccgtcaatcttaagcaggccatgacccgccggtcactcgcagccctcaaaaatatggctcaccataaattgcaaacactggctaccaacctcctagcgtctgaagcctctgacaagggtaaccttcctaaatattcgcataactcactgatggtgcaggccatcaaaacgaacctcactgacccagatatccacgtgctgttcttcgatgtcgaggccctaattatccagttgttgacagaagaagccagccggcctaacacagccctcatctcacccgagaatttacagaaagcgagcggaagcagtgataagggaggcagcttcctgacaggcaagagagccgccgtgttgtttcagcaggtcaaggaaactatcaaagaaaacattaaagaacacctgttggacgatgaggaagaagacgaggagattatgaggcagaggcgcgaagagagtgatccagaataccggagctctaagtctaaaccccttactcttctggagtacaatcttacaatggataccgctaaactatttatgtcctgcctccacgcatgggggcttaatgaggttctggacgaggtgtgcttggaccgtttggggatgttgaaacctcattgtaccgtgagttttggattactctctcggggcggccatatgagcctaatgcttccaggatataaccagccagcgtgtaagctcagtcacgggaaaacggaagtgggccgaaagttgcccgctagtgagggcgtcggcaaagggacatatggcgtgtcacgcgcggtgacaacccagcatcttcttagcatcattagtttggctaatactctgatgagcatgaccaatgccacctttatcggagatcacatgaaaaagggccccacgcgcccacctagaccttcaacccccgacctaagcaaggctaggggtagtccacccacctctagcaatatcgttcaaggccagatcaagcagggctggtcccagctggctgccatgcactgcgtcatgcttccagatctcctgggcttggataagttccgaccacctctgttggagatgctcgccagacgctggcaagatcgatgcctggaggtgcgagaggccgctcaggcccttctcctagccgagctacgccgcatagaacaggcggggaggaaagaagctattgatgcctgggcaccttatctgccacagtacatagatcacgtgataagccccggggttactagcgaggccgcccagaccatcaccactgccccagacgcgtccggcccagaagcgaaggtccaggaggaggaacatgatttggtagatgacgacatcacgacgggttgtctgtcatctgttccccagatgaagaagatttctacgtcatacgaagaaaggcggaagcaggcaactgctattgtgcttctgggagtgatcggggctgagttcggcgcagaaattgaacccccaaagctgctgacccgccccaggtcatccagtcagatccccgaaggattcggtctaacctccggcggctctaattatagcctggctaggcatacatgcaaggctctgactttccttttattacaacccccaagccccaagcttccaccgcatagcaccattaggaggaccgcgatagaccttatcggacgtggattcaccgtgtgggagccgtacatggacgtttccgccgtgctcatgggactgctcgagctatgtgctgatgccgagaagcagttagcgaatatcactatgggcctgccactctcgcctgctgccgattccgcaagatccgcacggcatgcactgagcctaatagctaccgctcgacctcctgcctttatcactaccattgccaaggaagtacacagacacacagccttagccgccaatacacagtcacagcagaacatgcataccaccacactggccagggcgaagggtgagattttgcgcgtcattgaaatcctgatagagaaaatgcctaccgacgtggtggacctgttagtggaagtcatggacattatcatgtactgtttagagggctctctagtcaaaaaaaaaggcttgcaggaatgtttccccgccatctgtagattctacatggtgtcctactatgagcgaaaccatagaatagccgtgggtgcacggcacggttccgttgccctgtatgacatccgaaccggcaaatgtcaaaccatccatggccataagggtccgattaccgctgtcgctttcgcgcctgatgggcgctatctggctacatattcaaacaccgacagccatatctccttttggcagatgaacacttctctgctggggtctattggtatgctgaacagtgccccgcaactgcgatgcattaagacatatcaggttccccctgtgcagccagctagccctggatcccacaatgccctgaagttagccaggctaatctggacatctaatcggaacgtgattttgatggctcatgacggtaaggaacacaggtttatggtgtag

SEQ ID NO: 229193 - DNA, 4374 bp, Artificial Sequence
  derived and/or modified sequence
atggccggcaacagcctggtgctgcccatcgtgctgtggggccggaaagccccaactcattgcattagcgccgtcttactgaccgatgacggtgccaccattgtgacagggtgtcacgatggacagatctgcctttgggacctgagcgtcgagctgcagatcaatcctcgggcactcctgtttgggcacacagccagtatcacctgcctgagcaaagcctgtgcaagtagtgataagcaatatatcgtgtctgcgagcgagtctggtgagatgtgtctatgggacgtgtctgatggaagatgcatagaatttactaaactcgcctgcacacacaccggaatccaattttatcagttttctgtaggaaatcaaagggagggtcggttgttgtgtcacgggcactacccagagatcctggtagtggatgccacatcattggaagtcctctatagcttggtctcgaaaattagtcctgattggatttccagcatgtccatcattcgatcccatcgcactcaagaggatacagtggtagctctttcagtgaccggaattctcaaagtatggatcgttactagtgagatctccgacatgcaagatacggagccaatcttcgaagaggaatcaaagcctatatattgtcagaactgccagagcatttccttttgcgcctttacccagcgcagcttactggtagtgtgctccaaatactggagagtctttgatgctggtgactacagccttctttgctcagggccaagcgagaatggacaaacgtggaccgggggggacttcgtaagcagtgataaggtaatcatctggacagaaaacggtcagagttacatttacaaactgcccgcaagctgcttgcccgccagtgactctttcaggtccgacgtggggaaggccgtcgaaaatctgatccctcctgtgcagcacatcctgctggacaggaaggataaggaacttctgatatgtccccctgtcacacggttcttttacggttgcagagaatattttcataagctcctgatacaaggcgatagtagcgggaggctgaacatttggaacatttcagacacggccgataaacagggatctgaggaggggttggcgatgacaacatccataagcctccaggaggcttttgataagctgaatccttgtcctgcaggtatcattgaccagctgagcgttattccgaactctaacgagcctctgaaggtgaccgcctcagtgtatatcccagcacatgggcgcctcgtgtgtggccgcgaggacgggagtatagtcatcgtccctgcaacacagacagctatcgtccagttactgcagggagagcatatgctgcgcagaggctggcccccccatcgcaccctgcgcggtcacagaaacaaagtcacatgtctgctatacccacatcaggtgagcgctagatacgaccaacggtacctgatctcaggaggggtggacttttccgtaatcatctgggatatctttagcggcgagatgaagcacattttctgtgttcatggtggcgagataactcagctgctggtgccacctgagaactgcagcgccagggtccagcactgtatctgtagcgtggcttcggaccattccgtggggcttctgtctttacgggagaaaaaatgcattatgttggccagtaggcatctttttccaattcaagtaattaaatggagaccctctgatgattacctggtcgtgggatgctctgacgggagtgtctacgtgtggcagatggataccggggcattggataggtgcgtcatgggcataacagctgtcgaaatcctgaacgcgtgtgatgaggctgtcccggccgctgtggactccctgtcacacccagctgtgaacctgaaacaagccatgactcgcaggagcctggccgcgctcaagaatatggcccatcataaactgcaaacgctcgccacgaatctgctggcgagcgaggcttcagacaaggggaatttgcccaaatactcacataactcacttatggtgcaggcgattaaaactaaccttacggatcctgacattcacgtcttattttttgatgtggaagctttaatcattcagctgctgaccgaggaggccagccgaccaaacacggctctgatctctccagagaaccttcagaaggcgagcggttcctctgacaaaggtggctcctttctaaccggtaaacgggccgccgtactgtttcagcaggtgaaggagactatcaaggagaacattaaggagcacttactcgacgacgaggaagaagacgaagaaataatgagacaaagacgggaggaatccgaccccgaatatcgttccagcaagtctaagcctctgacactgctggagtataatttgaccatggataccgctaagctgtttatgtcctgcctccatgcctggggcctaaacgaggtgctcgacgaggtctgtctcgaccgtctgggcatgctgaagccacactgcacggtgtccttcggactgctttcgagaggggggcacatgagcttgatgctgcccggatataatcagcccgcctgcaagctgtctcacggtaagaccgaggtgggaagaaagctacctgcctccgaaggagtggggaaaggaacgtatggagtgagtcgggctgtgacaactcagcacctgctgtcgatcatctctcttgccaacactctgatgagtatgacaaacgccacatttattggggaccacatgaaaaagggaccaacacggccaccaagaccgtccactcctgatttgtctaaggcacgggggagtccacccacttctagtaatattgtgcaagggcagatcaagcagggctggagccagttagctgcgatgcactgcgtcatgttaccagaccttctgggactcgacaagttcagaccccccttgctggagatgctggccaggaggtggcaggataggtgtctcgaggtgagagaggccgctcaggcattactgctggctgagctgcggaggattgagcaggccggccggaaggaggctattgatgcctgggcaccctatctccctcagtacattgatcacgtgatcagtcccggcgtgacaagcgaagccgcacagactattaccacggcacccgacgcgtctggtccagaggcaaaggtccaagaggaagagcatgaccttgttgatgatgatatcacaacaggttgcttatcatcagtgccacaaatgaaaaagatatctacttcgtatgaggaacgcagaaagcaggctactgctatagttttactgggcgttataggagccgagtttggggcagagattgagccacctaagctgctaacaaggccccgctctagctctcaaataccagagggattcggtttgacctctggcggcagtaattactccctggcaaggcacacttgtaaggccctgacctttttgctacttcaacctcccagccccaaattacccccgcactccacaatccggagaacagcgattgatttgattggtaggggtttcaccgtatgggagccctacatggatgtcagcgccgttttgatgggacttctggagttgtgtgctgatgccgagaagcagctggctaacatcacgatggggttacccctgtctccagcagctgatagtgcacgctctgcacgtcacgcgctgtcactgatcgctactgcccgtccaccagcatttattacaaccatcgccaaagaagtccaccgccatacagcattggcagcgaacactcagagccaacaaaacatgcatacaacaactctcgctcgcgccaaaggagaaatcctgcgggttattgagatcctgattgagaagatgcccacagacgtcgtggatctgctggtggaggtgatggatatcatcatgtattgtttggagggttcattggtgaaaaaaaagggactgcaggagtgctttcctgccatctgtcggttctatatggtgagctactatgagcgaaatcacagaattgccgttggtgctaggcacggatctgtggccctctatgacatcaggactggaaaatgtcagacgatccatggccacaaaggcccaattaccgccgtagcattcgccccagacggaaggtacctggccacctacagtaacactgattctcacatctctttctggcagatgaacacttccctgctgggctctatcggcatgctgaactcggccccccagctccgctgtattaaaacatatcaagtgccacccgttcagccggctagccccggctcgcacaatgccctgaaattagctcggctcatatggactagtaacagaaatgtgattctgatggcacacgacggcaaggagcaccggttcatggtatag

SEQ ID NO: 229194 - DNA, 4374 bp, Artificial Sequence
  derived and/or modified sequence
atggccggaaactccctcgttctaccaattgtgttatggggtagaaaagccccaacccattgtatttccgctgtcctccttactgatgatggtgctaccattgttaccggctgtcatgacggacaaatctgtctgtgggatctgtctgtagaactacagattaacccgagggcactgttattcggccacactgccagtatcacctgcctcagtaaggcttgtgctagttctgacaagcaatatattgtgtcggcttctgagtctggcgagatgtgcttgtgggatgtttctgatggcaggtgcattgagtttactaagctcgcttgcactcataccgggatacagttttatcagtttagtgttggaaaccagagagagggaaggcttctgtgccacggtcactatcctgagatcctggtggtcgacgccaccagcctggaagtcctatactcgctggtcagcaaaatatcgcccgattggatctctagcatgtctatcatccggtcccatagaacacaggaagacacagtggtggctctgagcgtgactggaatcctcaaagtgtggattgttacctcagagatctccgacatgcaggacacagaacccatcttcgaagaggaaagtaagccgatatactgccagaattgccagtctatctccttctgtgcattcacccagagaagcctgctagtggtgtgctcaaagtactggagggtcttcgacgcaggggactactccttactttgtagtgggccatcagagaatggccaaacttggaccggcggagatttcgtgtcatcagacaaagttatcatttggaccgaaaatggccaaagctacatttataagttgcctgccagctgtttaccagccagcgattcattcaggagcgatgttggcaaggccgtcgaaaacctgattcctccggtacagcacatcctcctggatcggaaggacaaggagctgcttatttgcccacctgtgacccggttcttctatggatgtcgcgagtactttcataagctgctcatacagggagactccagcggcaggctgaacatctggaatatttcggacacagcagataaacaaggatcagaggagggtctcgccatgaccacctccatttccctccaagaagccttcgataagctgaatccttgccccgctggaattattgaccaactatctgtcatacctaactcaaatgaaccacttaaggtgaccgcctctgtgtacatccctgcccacggacgtctggtgtgtggacgtgaggacgggagtattgtcatcgtaccagccacccagaccgctatcgtgcagctgcttcagggggagcacatgctgaggaggggctggccacctcatagaaccctgcggggacaccggaacaaagttacatgtctactctaccctcatcaggtgtctgctagatacgatcaaagatatttgatctctggtggagttgatttttcagtgatcatctgggacatttttagcggcgaaatgaaacacatcttttgtgtgcacggcggtgagatcactcagctgcttgtgccaccagaaaactgttccgctcgggtgcaacactgcatctgcagtgtggcgagcgaccactcggtaggccttctttcacttcgggagaaaaagtgtatcatgcttgcttctcgtcatttgttccctattcaggtaatcaaatggcggccttccgacgactacctagtagtcgggtgttcagatgggtccgtgtatgtgtggcagatggacacaggagcactcgacagatgcgtcatgggcatcactgctgtcgaaatcctaaatgcttgtgatgaggccgtgcctgcagccgtggattccttgtctcatcccgctgtgaatctgaaacaggcaatgactcggagatccctcgcggctcttaagaatatggctcaccacaaactacagaccctcgctacaaatctgctcgccagtgaggcttccgataagggaaatctgccaaaatactcccacaattcgctaatggtccaggccatcaagacaaaccttacggatcccgacatccacgtgctgttcttcgatgttgaggccctgataattcaactgctgacagaggaagcatcccggccaaatacagcattaatctcgccggaaaaccttcaaaaggcctccggctctagcgacaagggcggatccttcttgaccgggaaaagggcagcagtgctcttccagcaggtgaaggaaactattaaggagaacataaaagagcacctgctcgacgatgaggaagaagacgaggaaattatgcgacagcgcagagaagagtccgaccccgagtatcggagcagcaagagcaaacccctcacacttttagagtacaacctcacgatggacacagcaaagcttttcatgtcatgccttcacgcttggggcctgaacgaggtgctggacgaggtgtgcctggaccgcctcggaatgctgaaaccgcattgcaccgtgtcctttgggctactgtcacgcggtggtcatatgtctctcatgctgccgggttacaaccaaccggcttgcaagctgtcgcacgggaagaccgaggtgggacgtaagcttccggcttctgaaggagtgggaaaaggcacctacggtgtctcaagagccgtaactacacagcatctactttccatcatttccttggcaaatactctgatgtccatgaccaacgcaactttcattggagatcatatgaaaaagggaccaacccggccacccaggccgagcactcccgacctgtctaaagcgaggggatcgccacctacatcaagtaatatcgtacaggggcagatcaaacaggggtggtcccaattagccgcaatgcactgcgtcatgttgccggacctgttggggcttgacaagtttcgtccacccctgcttgaaatgttagctcgacgatggcaagaccgttgcttagaggtgagagaggcagctcaagcgctcctgttagcagagctgagaagaatcgaacaggccggtcggaaggaagcgatcgatgcttgggctccttacctgccacagtatattgaccacgttatctcacccggtgtcacatccgaggcagcccagactatcacaactgccccagacgcgtctggccctgaggccaaggttcaagaggaggagcacgacctggtcgacgacgacattaccaccgggtgcctgtcatcggtgccccagatgaaaaaaatttcgacttcttatgaggaaagacgtaagcaagccacagcaatcgttctcctgggtgtcatcggcgcagagttcggggctgaaatagaaccaccaaagctccttactcgcccacggtcctccagccagatcccagaaggattcggcttgacaagcggtgggagtaactactcactcgcgcgacacacatgtaaggctttaacgttccttctgctccagccgccatctcccaagctgccaccacattcaacgatcaggcgaacagccatagatctgatcggaagggggttcaccgtgtgggagccttacatggacgtcagtgccgttctgatgggtcttcttgagttgtgcgctgacgccgagaaacagttagccaacatcacaatgggattacctctttctccggctgcagattctgcaaggtccgccagacatgccctgtccttaatcgcgactgctcggccaccagcatttattacgaccatagccaaagaggtgcaccggcacaccgcccttgctgccaatacgcaatcccagcagaatatgcacaccactactctcgcacgcgctaaaggagaaattctgcgggtcattgaaatcctgattgaaaaaatgccaacagacgttgtcgatctgctcgtagaggtaatggacatcataatgtattgcttagagggtagcctggttaaaaagaagggactccaggaatgcttccccgctatctgcaggttctacatggtgtcatactacgagaggaaccatcggatcgcggtgggggctcggcacggctctgtggctttgtacgacatcaggacagggaaatgccagactatacatggccacaaagggcctataaccgcagtcgccttcgcccctgatggaaggtatctggctacctattccaatacagactcccacattagcttttggcaaatgaatacatccttgctgggttctatcggcatgcttaatagcgcccctcagctgcgatgcatcaagacctatcaggttcccccagtgcagcccgcatcccctggttctcataacgccttgaagctggcaagactgatctggacctccaatcgcaacgtgatcctgatggcccacgatggaaaggagcatagattcatggtctag

SEQ ID NO: 229195 - DNA, 4374 bp, Artificial Sequence
  derived and/or modified sequence
atggccggaaatagtctggtgctgccaatcgtgctgtggggccgaaaggctccaacccactgtatcagcgccgtactcctaaccgatgatggagctactatagtgactgggtgccatgacggacagatttgcctgtgggacctgagcgttgaactgcagatcaatccgagagcacttctttttgggcacaccgcatccattacgtgtctgtctaaagcgtgtgcttccagcgataaacagtacatcgttagcgcttcggagtccggagaaatgtgtctgtgggacgtgtccgacgggagatgtatagaatttacaaaacttgcttgtacgcacacgggcatacagttctaccaattttctgtgggtaaccaacgtgaagggagactgctgtgtcacggtcactatcctgaaatccttgtggtagatgctacatccctggaagttttgtactctctcgtgtccaagatctcgccggattggatcagttccatgtccattattaggtcccacaggacacaggaagatacggtagtagccctcagcgtgaccgggatcctgaaggtgtggattgtgacaagcgaaatctcagatatgcaggatactgagcctattttcgaagaagagtctaagccgatctactgtcagaattgccagtcaatctccttctgcgctttcacccagcgatctctcctcgtagtctgttccaagtactggagggtttttgacgctggcgactatagtctgctgtgcagcggacccagcgagaatggccagacttggaccgggggagacttcgtgagttccgataaggtgataatttggacggaaaacgggcaatcgtacatttacaaactgcccgcttcctgtttgccggcttctgactctttccggagcgacgtaggtaaggcagttgaaaacttgatccctccggtgcagcacatcctgttggacaggaaagataaggagctgctgatctgccctccggtgactaggtttttttatggctgtcgcgagtacttccacaaactgctcattcagggagacagttctggaagattgaatatttggaacattagtgacacagcagacaaacagggatccgaggagggcctggccatgacaacatccattagcctgcaggaggcttttgacaaactgaatccctgtcccgcaggaatcatcgatcagctttccgtgatcccaaattccaacgaacctttaaaagtgacagcctccgtgtacatccccgctcacgggcgactggtatgtggtcgtgaggacgggtctattgtcatagtccccgctacacagaccgcgattgtgcaactgctgcagggagaacatatgctgagacgcggatggccccctcaccgaactctgcgcggacatcgcaacaaagtaacttgtctgctgtatccacatcaggtgagcgcccgatacgatcagcgatatcttatttcgggcggagttgatttctccgtgatcatctgggacatattttctggggagatgaaacacatcttttgcgtccacggaggggaaataacgcagctgctggtgccccctgaaaactgttctgctagagtgcagcactgtatttgctcagtagcctccgatcacagtgttggactgctgtctctgagggagaaaaaatgtataatgctggcctcaaggcacttgttccctattcaggttatcaagtggcgtccgagtgatgattacctggtggttgggtgtagcgacgggagcgtctatgtttggcagatggacaccggtgccctcgataggtgtgtcatgggaatcactgccgtagaaatcttaaacgcttgcgacgaggcggtccccgctgctgtcgactctttgagccaccccgcagttaacctaaagcaggctatgacacggaggagcctggccgctctgaaaaatatggcacatcacaagctccagacactggccaccaatctactggcgagtgaagcgagtgataagggaaacctaccaaaatatagtcataactcgctgatggttcaagccatcaaaaccaatctgacggaccctgacatccatgtgttgtttttcgatgtcgaagctctcatcattcagttactgacagaggaagcatcacggcctaacacagcgctcatcagtcccgaaaacctgcaaaaggcttcgggctcctctgacaaggggggttcctttctcactggcaaacgggctgccgttctcttccaacaagtcaaggagactataaaagagaacatcaaagagcatctgttggatgatgaggaggaggacgaggagattatgcggcagcggagagaggaaagcgacccagaatatcggtctagcaagagcaagcctcttacactgctggaatacaatctgacaatggatacggccaaattattcatgtcttgcctgcatgcgtgggggctaaacgaagtcctcgatgaagtgtgcctagatagactgggcatgcttaagccccactgtacagtaagcttcggtctgctgtcacgcggtggacatatgtcgctgatgctccctggatataaccaaccagcctgcaagctgtcccatggtaaaactgaggtcggtcgaaaattgcctgcctccgaaggagtcggaaaagggacctatggcgtgagtcgggctgtgacaacccaacatctgcttagcatcatcagcctggccaatacattgatgagcatgactaacgccacatttattggcgatcatatgaagaagggcccaactcggccacctcggccaagcacacccgacctgagtaaggcgcgtggctcacccccaaccagctctaatatcgtgcaggggcagatcaaacagggctggtcccagttggcagctatgcattgcgtcatgctgcctgacctgctgggcctcgacaagtttcggcctccactgctggaaatgcttgcaagaaggtggcaagatcggtgtctcgaggtgcgggaagctgctcaggctttactgctggccgagctacggcgaatagagcaggctggacggaaggaagccatcgacgcctgggccccttacctcccgcagtatatcgaccatgtgatttcccccggtgtcacctccgaggcagcgcagaccatcactactgccccagacgcctctggaccggaagcgaaagtgcaggaagaggaacatgacctggtagacgatgatattacaaccgggtgtctgtcttctgtgcctcagatgaaaaagatctctacttcatacgaagagagacggaaacaggcaacagccatcgtcctgctgggggtaataggagctgagttcggagcggaaatagagcccccaaagttgctgacacgtcccagatcttcctcccagatccccgagggattcggcttaacgagcggtggttcaaattattccctggcacgccacacatgtaaggccctaactttcctgctgcttcagcctccaagcccaaaactccctccccattccactatccgcagaactgccatagatctgatcgggaggggcttcactgtctgggagccgtacatggacgtgtcagctgtcctgatggggcttctggagctttgcgccgacgccgagaaacaactggctaacataacgatgggattacccttgtcccccgcagctgattctgctaggagcgctaggcacgcactctccctgatcgccactgctcgaccacctgcttttatcacaaccatcgccaaagaggtgcacaggcatacggccctcgcggctaatacgcagtctcagcaaaatatgcacactacaactctcgcgagagcaaaaggagaaatcctgcgggtcattgaaatccttatcgagaaaatgccaactgacgttgtggatctacttgtggaggttatggatatcataatgtactgcttggagggctctttggtgaagaaaaaaggactccaagagtgtttcccggcaatctgccgattctacatggtctcctactatgagcgaaatcacagaatcgccgtgggagcgcgacacggcagcgttgcgctctacgatatcaggaccggtaagtgccaaactatccacgggcataagggcccaattacggccgttgcattcgccccagatggccgttatcttgccacttattctaatacggattctcatatcagtttctggcagatgaacacgagcctgctggggtccatcggcatgctgaactcagctcctcagcttcggtgcataaaaacatatcaggtcccccctgtgcaacccgcatctccaggatcccacaatgcactgaaactggcacgtctcatttggaccagcaataggaacgtgattctgatggcccacgacggtaaggagcataggtttatggtgtag

SEQ ID NO: 229196 - DNA, 7183 bp, Artificial Sequence
  derived and/or modified sequence
ggcggcaccggcaccttgcagtatcactggggagacggcggctgtatagcgcttgccgccccacggattatcccagcaggatctacgcaccccgcatcctccgtagttccgccctatccttgtcctccttggctggggcgcccaccggcggtctgataggctacatcgcggcatgagatgaagctgtgacaggtttgaaaacacaaacacaatggcaggaaacagccttgttctacccattgttctttggggtcgaaaagcgcccacacattgcatctcagccgtacttttaacagatgatggggccacgatcgtaacaggatgtcacgacggacaaatatgtctctgggatctttcagtagaactgcaaattaatcctcgagcactgttgtttggtcatacagcatcaatcacttgtttgtctaaagcttgtgcttccagtgacaaacagtatattgtgagtgcatctgaaagtggagagatgtgcctctgggatgtgagtgatggcagatgtattgaatttacaaaattagcttgcacacatactggcatacagttctaccagttctctgttgggaatcagcgagaaggaaggcttttatgccacggacattaccctgaaatccttgttgtggatgctaccagccttgaagtattatactccttagtatcaaagatatcaccagactggattagctccatgagtattattcgatcccaccgaacacaagaggacacagtggtagcactctcggtgactggcatcctgaaggtctggattgttacctcggaaataagtgacatgcaggatactgagccaatatttgaggaggaatccaaaccaatttattgtcagaattgccaaagcatctctttttgtgcatttacacaaaggtcacttttggttgtgtgttccaaatattggagggtgttcgatgccggagactattccttgttgtgttcaggtcctagtgaaaatggacagacatggaccgggggggactttgtctcatcagataaagtcatcatttggacagaaaatgggcaaagttatatttacaaactacctgccagttgccttccagctagtgattcattccgcagtgatgtggggaaggcagttgaaaatttaattcctcctgtacaacatatcctcttggatcgaaaagataaagagttgctaatttgtcctcctgttactcggttcttctatggatgcagagaatatttccataaactgttaattcagggtgattcttctggaaggttgaatatttggaacatatcagacacagctgataaacagggaagtgaagaagggctggcaatgacaacttctattagtttgcaagaggcatttgataaactgaatccttgtcctgctggaattatagatcagctgagtgtgattcccaatagtaatgaacctcttaaagtaactgcaagtgtgtacataccagcacatggacgacttgtttgtggtcgtgaagatggaagcatagttattgtacctgccacacagacggccatagtacagctgttgcaaggggaacacatgctcagaagaggttggccacctcacagaacactccgtggtcatcggaacaaagtcacatgtttgctatatcctcatcaggtctcagctcggtatgatcaaagatacctgatatctggaggtgtggatttttcagtcataatttgggacatattttctggagaaatgaaacatatcttctgtgttcatggtggtgagattactcaacttctagttccacctgaaaactgtagtgcaagagtacagcactgcatctgctctgtagccagtgaccactcagtaggacttctaagtttgcgagagaaaaaatgcataatgttggcatctcgtcacctttttcctattcaagtaatcaaatggaggccttctgatgattacctggtggtggggtgttcagatggttctgtgtacgtctggcaaatggatactggtgcattggatcgttgtgtgatggggataacagcagttgagattctaaacgcttgtgatgaagctgttcctgctgctgttgattcacttagtcatccagcagtcaacctaaaacaagctatgacgagacgtagtcttgctgctcttaaaaatatggcccatcataagctacaaacccttgcaactaacctcttggcttctgaggcatctgacaagggaaatttacctaaatattctcataactccctgatggttcaagcaataaagacaaacctaacagacccggacatacatgtgctattctttgatgtggaagcgttgattattcaactcctgactgaagaagcctctaggccgaatactgctcttatttccccagagaatttgcaaaaagcatctggcagttcagacaaagggggctcttttttaactggaaaacgagcagcagttctcttccaacaagtgaaagaaacgatcaaagagaacatcaaggaacacctccttgatgatgaagaggaggatgaggagataatgaggcagagaagggaagaaagtgatcctgaatatcggtccagcaaatcaaagccattgaccctattagaatataatttaactatggacactgcaaagctgtttatgtcctgccttcacgcctggggtttgaatgaagtactggatgaagtttgcctggatcgccttggaatgctgaaaccccactgcaccgtatcgtttggcctcttgtcaagaggaggccatatgtcactgatgctgccgggttataatcagcctgcttgtaaactgtcacatgggaaaacagaagtaggaaggaagctgccagcgtctgagggagtaggaaagggaacttacggagtgtcccgtgccgtcaccacacagcatctcctgtctatcatttctttggcaaatactttaatgagtatgaccaatgcaacttttattggtgatcatatgaagaagggtcctaccaggccacctagaccaagcaccccagacctttctaaggcaaggggttcccctccaacttccagtaatattgtgcaaggacagattaaacaaggttggagtcagttagctgctatgcactgtgttatgctgccagacctactgggattggataaatttaggcctccccttctggagatgctggcccgaagatggcaagatcgatgcttggaggtgagagaagccgcgcaggccctgcttctggcggaactgagaagaattgagcaggcaggcaggaaggaagccattgatgcctgggctccttacttacctcagtacatagaccacgtcatatcacctggagtcacatcagaagccgcgcagactatcaccacggctcctgatgcctcagggcctgaagcaaaagtccaggaggaagagcatgaccttgttgacgatgacatcaccactggttgcttatcaagtgtcccacaaatgaaaaaaatttctacatcttacgaggaaagacggaagcaagctaccgctattgttttacttggagtaataggagctgaatttggtgctgaaattgaacctcctaaactattgaccagacctcgaagctctagccaaattcctgagggattcgggttgactagtggtggatccaactactcgctggccagacatacttgcaaggcactgacgtttcttctgctacagcctccaagccccaaacttcctccacacagcactatccgaagaacagccattgatctgattggacgtgggttcactgtttgggagccttacatggatgtgtccgctgttctgatggggcttctcgaactttgtgccgatgccgagaaacaacttgccaacatcacaatggggttgcctctgagcccagcagctgactcggcccgctctgcgaggcatgccctctcgctcattgccaccgccagaccacccgccttcatcaccaccatagccaaagaggtacacagacatacggctcttgcagcaaatacccaatcacagcagaatatgcacacaacaactcttgcacgagctaaaggggaaattttgagagtcattgaaattcttattgaaaagatgcccacagatgttgtggatcttctcgtggaggttatggacatcattatgtactgccttgaaggatctttagttaaaaagaaaggtcttcaagaatgtttcccagccatctgcaggttctacatggtcagctattatgagcggaatcacagaatagcagttggagctcgccatggttcagtggccctgtacgacatccggactggaaaatgtcagacaatccatggacacaagggaccaatcactgcagtggcttttgctcctgatggaagatatcttgccacctactcaaacactgacagccacatttctttttggcagatgaacacgtcactgctgggaagcatcggcatgctgaactcggcacctcagctgcgctgcattaaaacctaccaggtgccccctgtgcagcccgcgtcccccggctcccacaatgccctcaagctggcccggctcatctggacttccaaccgcaacgtcatcctcatggcccatgacgggaaggagcaccgcttcatggtctaatgctgctgcctgccgccgtgactgcgttttagttctctaaattatccaagccgatgttgctctgtccttcctcacaccagattgttcccaggggcctgcccaccccagtgccatccagtggcacggccgggtcttgtcacttgtgcatgcttctcaggggcagaacccgctcgtgccatctgtcgattcagaggcacgcacacatgctctgcaggatgtggccatcctgtcaccaggtagtttttccctgccagagatggcaggggaaagccagtggttcctgggaacgctcttgttgcttggtgcaacagaagcacaaaaatcaataaacactgtgattgcactcccagcccagatcagcatttttagccatctcaaccgcacctctgaagtgctgcttgaatctggccgttctgacactgggtgttgaggtcatgtggcagtcctcacgattgaaattattgccctttgaattacctaaaatattgtttaccaaaaagattctgtgtttacatgttcttttcttctggtgattgctaggaaattactcaatccaatttcctagggtttagctaccaccttctttatcaacagctaaccaatttgagattcatgattaattatgtacacaaaaatattttccttgtagaaaatagttttccagacacttagccttctgaagtgctcatctcttgcttaaatgatagtctatttagtagtttaaaataaaaataatcactccctatgatctagttaatgtaattatccagtcactgtaactaatctcttgaagggacttttgtgataaagagccaagttcagaagcatagcgtgtaccgaaaatgaagactctcctatctactgctacagatcctgttgaagaaagagcttacccctttcccccggaaaacttgcaatcctgtagttcccatatgtgtggcatatgtcagttatgaaattattataattcagccttcaaactactactgatcaactaaaggaaagctaataaggtatttcttttaaacaagtattctggaaaagtaataactatggcacaaatgttcaggagtgtatataaaaatatgtgggctctcgatttatttgagcaaacattgcaatgagggtgttcattatgcttctaagtaagctttaactagaccactttcttcttatgtcagattgtgctggttctagctcataataatgaaaaaaatagaattatattttgtatgaattgtttctaacaaaccttgatctgtatatacttgtgaggggttgtttggttgcctaattgttgattggttggttagttgggcaaaatcatttattacatgcaaaaatagaaaattatttgttaaattcagagaaaatatgtgaagtttacaaaggaaccaaaatgataatgggagaatttagtcttaaaagtttaggttgtcagagtttatctgatatacaaaaaagtaggatcaaagtctaggaacaaacattggttatttcactgaaacagatttttaaagagcatattaagaaattaagaccattagatcatctctttcataatgatatgatgttatttccattgacggcaaatctatactgttccttggttttagagttgggtattctttcaaaagtgaatttaggcacatgcatgtacattgtatttataaagattatatatgtagtttccaaggaagaaacaaagacctatacagtttagactttatttgtttggtgaacgtgctgttgtgtttggcatagctagagaaatgtaaggtaaaaggctcactttgttttccagtgggtccagagtcttctctatacccaacatatgtttactttatgaacttaaatggaaattaatttattgtagactacatctctatttggaatgatgaggtaaatgtataccttagcattttctttaacaaaaatgttctgtgtgtcaggaaagaggtgtgagagtggtaggcagcctgccgcaaacacacggatggctccccccgccacgaaggttgagaacaaagccagggggcccagaggagcaatagccctgggccacaagcgtgggtaggcctttcacgtattccgtctgcacaggcaaccaaggccagtagaaagctatggctgcaaaaccctggggtggacgatgtttgatgattagacggtcatctctaactactaaactaatatctgcattcttgttaacataaatctctccttggctattttaatagccacagtcccaaacttcatcccagcttagatttctcagcactgaggtaaactctgcattgtcatcccagcgtacacctttaatgttttattgatttcactggcactgtatttggacctgtccttgtatatgtagagacatatgtggcttcattggtaatttacaagcaaaagatgacatgacgtgacacctgtatgaaaatgtgatgattgaactccctgtgtacagcgagtgaattaaaatgtctgcctctccagacatttcttaatgattccacttaatagactctatgtgtgctgaatgttcctgtgtacatatgtgtgttaaataaaacaattgtattgaagactgtttttctc

SEQ ID NO: 229197 - DNA, 6978 bp, Artificial Sequence
  derived and/or modified sequence
atggcaggaaacagccttgttctacccattgttctttggggtcgaaaagcgcccacacattgcatctcagccgtacttttaacagatgatggggccacgatcgtaacaggatgtcacgacggacaaatatgtctctgggatctttcagtagaactgcaaattaatcctcgagcactgttgtttggtcatacagcatcaatcacttgtttgtctaaagcttgtgcttccagtgacaaacagtatattgtgagtgcatctgaaagtggagagatgtgcctctgggatgtgagtgatggcagatgtattgaatttacaaaattagcttgcacacatactggcatacagttctaccagttctctgttgggaatcagcgagaaggaaggcttttatgccacggacattaccctgaaatccttgttgtggatgctaccagccttgaagtattatactccttagtatcaaagatatcaccagactggattagctccatgagtattattcgatcccaccgaacacaagaggacacagtggtagcactctcggtgactggcatcctgaaggtctggattgttacctcggaaataagtgacatgcaggatactgagccaatatttgaggaggaatccaaaccaatttattgtcagaattgccaaagcatctctttttgtgcatttacacaaaggtcacttttggttgtgtgttccaaatattggagggtgttcgatgccggagactattccttgttgtgttcaggtcctagtgaaaatggacagacatggaccgggggggactttgtctcatcagataaagtcatcatttggacagaaaatgggcaaagttatatttacaaactacctgccagttgccttccagctagtgattcattccgcagtgatgtggggaaggcagttgaaaatttaattcctcctgtacaacatatcctcttggatcgaaaagataaagagttgctaatttgtcctcctgttactcggttcttctatggatgcagagaatatttccataaactgttaattcagggtgattcttctggaaggttgaatatttggaacatatcagacacagctgataaacagggaagtgaagaagggctggcaatgacaacttctattagtttgcaagaggcatttgataaactgaatccttgtcctgctggaattatagatcagctgagtgtgattcccaatagtaatgaacctcttaaagtaactgcaagtgtgtacataccagcacatggacgacttgtttgtggtcgtgaagatggaagcatagttattgtacctgccacacagacggccatagtacagctgttgcaaggggaacacatgctcagaagaggttggccacctcacagaacactccgtggtcatcggaacaaagtcacatgtttgctatatcctcatcaggtctcagctcggtatgatcaaagatacctgatatctggaggtgtggatttttcagtcataatttgggacatattttctggagaaatgaaacatatcttctgtgttcatggtggtgagattactcaacttctagttccacctgaaaactgtagtgcaagagtacagcactgcatctgctctgtagccagtgaccactcagtaggacttctaagtttgcgagagaaaaaatgcataatgttggcatctcgtcacctttttcctattcaagtaatcaaatggaggccttctgatgattacctggtggtggggtgttcagatggttctgtgtacgtctggcaaatggatactggtgcattggatcgttgtgtgatggggataacagcagttgagattctaaacgcttgtgatgaagctgttcctgctgctgttgattcacttagtcatccagcagtcaacctaaaacaagctatgacgagacgtagtcttgctgctcttaaaaatatggcccatcataagctacaaacccttgcaactaacctcttggcttctgaggcatctgacaagggaaatttacctaaatattctcataactccctgatggttcaagcaataaagacaaacctaacagacccggacatacatgtgctattctttgatgtggaagcgttgattattcaactcctgactgaagaagcctctaggccgaatactgctcttatttccccagagaatttgcaaaaagcatctggcagttcagacaaagggggctcttttttaactggaaaacgagcagcagttctcttccaacaagtgaaagaaacgatcaaagagaacatcaaggaacacctccttgatgatgaagaggaggatgaggagataatgaggcagagaagggaagaaagtgatcctgaatatcggtccagcaaatcaaagccattgaccctattagaatataatttaactatggacactgcaaagctgtttatgtcctgccttcacgcctggggtttgaatgaagtactggatgaagtttgcctggatcgccttggaatgctgaaaccccactgcaccgtatcgtttggcctcttgtcaagaggaggccatatgtcactgatgctgccgggttataatcagcctgcttgtaaactgtcacatgggaaaacagaagtaggaaggaagctgccagcgtctgagggagtaggaaagggaacttacggagtgtcccgtgccgtcaccacacagcatctcctgtctatcatttctttggcaaatactttaatgagtatgaccaatgcaacttttattggtgatcatatgaagaagggtcctaccaggccacctagaccaagcaccccagacctttctaaggcaaggggttcccctccaacttccagtaatattgtgcaaggacagattaaacaaggttggagtcagttagctgctatgcactgtgttatgctgccagacctactgggattggataaatttaggcctccccttctggagatgctggcccgaagatggcaagatcgatgcttggaggtgagagaagccgcgcaggccctgcttctggcggaactgagaagaattgagcaggcaggcaggaaggaagccattgatgcctgggctccttacttacctcagtacatagaccacgtcatatcacctggagtcacatcagaagccgcgcagactatcaccacggctcctgatgcctcagggcctgaagcaaaagtccaggaggaagagcatgaccttgttgacgatgacatcaccactggttgcttatcaagtgtcccacaaatgaaaaaaatttctacatcttacgaggaaagacggaagcaagctaccgctattgttttacttggagtaataggagctgaatttggtgctgaaattgaacctcctaaactattgaccagacctcgaagctctagccaaattcctgagggattcgggttgactagtggtggatccaactactcgctggccagacatacttgcaaggcactgacgtttcttctgctacagcctccaagccccaaacttcctccacacagcactatccgaagaacagccattgatctgattggacgtgggttcactgtttgggagccttacatggatgtgtccgctgttctgatggggcttctcgaactttgtgccgatgccgagaaacaacttgccaacatcacaatggggttgcctctgagcccagcagctgactcggcccgctctgcgaggcatgccctctcgctcattgccaccgccagaccacccgccttcatcaccaccatagccaaagaggtacacagacatacggctcttgcagcaaatacccaatcacagcagaatatgcacacaacaactcttgcacgagctaaaggggaaattttgagagtcattgaaattcttattgaaaagatgcccacagatgttgtggatcttctcgtggaggttatggacatcattatgtactgccttgaaggatctttagttaaaaagaaaggtcttcaagaatgtttcccagccatctgcaggttctacatggtcagctattatgagcggaatcacagaatagcagttggagctcgccatggttcagtggccctgtacgacatccggactggaaaatgtcagacaatccatggacacaagggaccaatcactgcagtggcttttgctcctgatggaagatatcttgccacctactcaaacactgacagccacatttctttttggcagatgaacacgtcactgctgggaagcatcggcatgctgaactcggcacctcagctgcgctgcattaaaacctaccaggtgccccctgtgcagcccgcgtcccccggctcccacaatgccctcaagctggcccggctcatctggacttccaaccgcaacgtcatcctcatggcccatgacgggaaggagcaccgcttcatggtctaatgctgctgcctgccgccgtgactgcgttttagttctctaaattatccaagccgatgttgctctgtccttcctcacaccagattgttcccaggggcctgcccaccccagtgccatccagtggcacggccgggtcttgtcacttgtgcatgcttctcaggggcagaacccgctcgtgccatctgtcgattcagaggcacgcacacatgctctgcaggatgtggccatcctgtcaccaggtagtttttccctgccagagatggcaggggaaagccagtggttcctgggaacgctcttgttgcttggtgcaacagaagcacaaaaatcaataaacactgtgattgcactcccagcccagatcagcatttttagccatctcaaccgcacctctgaagtgctgcttgaatctggccgttctgacactgggtgttgaggtcatgtggcagtcctcacgattgaaattattgccctttgaattacctaaaatattgtttaccaaaaagattctgtgtttacatgttcttttcttctggtgattgctaggaaattactcaatccaatttcctagggtttagctaccaccttctttatcaacagctaaccaatttgagattcatgattaattatgtacacaaaaatattttccttgtagaaaatagttttccagacacttagccttctgaagtgctcatctcttgcttaaatgatagtctatttagtagtttaaaataaaaataatcactccctatgatctagttaatgtaattatccagtcactgtaactaatctcttgaagggacttttgtgataaagagccaagttcagaagcatagcgtgtaccgaaaatgaagactctcctatctactgctacagatcctgttgaagaaagagcttacccctttcccccggaaaacttgcaatcctgtagttcccatatgtgtggcatatgtcagttatgaaattattataattcagccttcaaactactactgatcaactaaaggaaagctaataaggtatttcttttaaacaagtattctggaaaagtaataactatggcacaaatgttcaggagtgtatataaaaatatgtgggctctcgatttatttgagcaaacattgcaatgagggtgttcattatgcttctaagtaagctttaactagaccactttcttcttatgtcagattgtgctggttctagctcataataatgaaaaaaatagaattatattttgtatgaattgtttctaacaaaccttgatctgtatatacttgtgaggggttgtttggttgcctaattgttgattggttggttagttgggcaaaatcatttattacatgcaaaaatagaaaattatttgttaaattcagagaaaatatgtgaagtttacaaaggaaccaaaatgataatgggagaatttagtcttaaaagtttaggttgtcagagtttatctgatatacaaaaaagtaggatcaaagtctaggaacaaacattggttatttcactgaaacagatttttaaagagcatattaagaaattaagaccattagatcatctctttcataatgatatgatgttatttccattgacggcaaatctatactgttccttggttttagagttgggtattctttcaaaagtgaatttaggcacatgcatgtacattgtatttataaagattatatatgtagtttccaaggaagaaacaaagacctatacagtttagactttatttgtttggtgaacgtgctgttgtgtttggcatagctagagaaatgtaaggtaaaaggctcactttgttttccagtgggtccagagtcttctctatacccaacatatgtttactttatgaacttaaatggaaattaatttattgtagactacatctctatttggaatgatgaggtaaatgtataccttagcattttctttaacaaaaatgttctgtgtgtcaggaaagaggtgtgagagtggtaggcagcctgccgcaaacacacggatggctccccccgccacgaaggttgagaacaaagccagggggcccagaggagcaatagccctgggccacaagcgtgggtaggcctttcacgtattccgtctgcacaggcaaccaaggccagtagaaagctatggctgcaaaaccctggggtggacgatgtttgatgattagacggtcatctctaactactaaactaatatctgcattcttgttaacataaatctctccttggctattttaatagccacagtcccaaacttcatcccagcttagatttctcagcactgaggtaaactctgcattgtcatcccagcgtacacctttaatgttttattgatttcactggcactgtatttggacctgtccttgtatatgtagagacatatgtggcttcattggtaatttacaagcaaaagatgacatgacgtgacacctgtatgaaaatgtgatgattgaactccctgtgtacagcgagtgaattaaaatgtctgcctctccagacatttcttaatgattccacttaatagactctatgtgtgctgaatgttcctgtgtacatatgtgtgttaaataaaacaattgtattgaagactgtttttctcacaata

SEQ ID NO: 229198 - protein, 530 aa, Artificial Sequence
  derived and/or modified sequence
MGRHVATSCHVAWLLVLISGCWGQVNRLPFFTNHFFDTYLLISEDTPVGSSVTQLLAQDMDNDPLVFGVSGEEASRFFAVEPDTGVVWLRQPLDRETKSEFTVEFSVSDHQGVITRKVNIQVGDVNDNAPTFHNQPYSVRIPENTPVGTPIFIVNATDPDLGAGGSVLYSFQPPSQFFAIDSARGIVTVIRELDYETTQAYQLTVNATDQDKTRPLSTLANLAIIITDVQDMDPIFINLPYSTNIYEHSPPGTTVRIITAIDQDKGRPRGIGYTIVSGNTNSIFALDYISGVLTLNGLLDRENPLYSHGFILTVKGTELNDDRTPSDATVTTTFNILVIDINDNAPEFNSSEYSVAITELAQVGFALPLFIQVVDKDENLGLNSMFEVYLVGNNSHHFIISPTSVQGKADIRIRVAIPLDYETVDRYDFDLFANESVPDHVGYAKVKITLINENDNRPIFSQPLYNISLYENVTVGTSVLTVLVSPRFTAGPLSSPGPTVVRHPEGFCPRDLSNQGRRHPQIPELCLLVY

SEQ ID NO: 229199 - protein, 530 aa, Artificial Sequence
  derived and/or modified sequence
MGRHVATSCHVAWLLVLISGCWGQVNRLPFFTNHFFDTYLLISEDTPVGSSVTQLLAQDMDNDPLVFGVSGEEASRFFAVEPDTGVVWLRQPLDRETKSEFTVEFSVSDHQGVITRKVNIQVGDVNDNAPTFHNQPYSVRIPENTPVGTPIFIVNATDPDLGAGGSVLYSFQPPSQFFAIDSARGIVTVIRELDYETTQAYQLTVNATDQDKTRPLSTLANLAIIITDVQDMDPIFINLPYSTNIYEHSPPGTTVRIITAIDQDKGRPRGIGYTIVSGNTNSIFALDYISGVLTLNGLLDRENPLYSHGFILTVKGTELNDDRTPSDATVTTTFNILVIDINDNAPEFNSSEYSVAITELAQVGFALPLFIQVVDKDETWGLNSMFEVYLVGNNSHHFIISPTSVQGKADIRIRVAIPLDYETVDRYDFDLFANESVPDHVGYAKVKITLINENDNRPIFSQPLYNISLYENVTVGTSVLTVLVSPRFTAGPLSSPGPTVVRHPEGFCPRDLSNQGRRHPQIPELCLLVY

SEQ ID NO: 229200 - protein, 445 aa, Artificial Sequence
  derived and/or modified sequence
MDNDPLVFGVSGEEASRFFAVEPDTGVVWLRQPLDRETKSEFTVEFSVSDHQGVITRKVNIQVGDVNDNAPTFHNQPYSVRIPENTPVGTPIFIVNATDPDLGAGGSVLYSFQPPSQFFAIDSARGIVTVIRELDYETTQAYQLTVNALAIIITNLPYSTNIYEHSPPGTTVRIITAIDQDKGRPRGIGYTIVSGNTNSIFALDYISGVLTLNGLLDRENPLYSHGFILTVKGTELNDDRTPSDATVTTTFNILVIDINDNAPEFNSSEYSVAITELAQVGFALPLFIQVVDKDEGLNSMFEVYLVGNNSHHFIISPTSVQGKADIRIRVAIPLDYETVDRYDFDLFANESVPDHVGYAKVKITLINENDNRPIFSQPLYNISLYENVTVGTSVLTVLVSPRFTAGPLSSPGPTVVRHPEGFCPRDLSNQGRRHPQIPELCLLVY

SEQ ID NO: 229201 - DNA, 1593 bp, Artificial Sequence
  derived and/or modified sequence
atggggaggcatgtggcaacctcctgtcacgtggcctggctcctggttctgattagcggatgttggggacaggttaacaggctcccattctttacaaatcacttttttgacacatatctacttatctcggaagatactccagttgggagcagcgtgacacagctgttggctcaggacatggataacgaccccttagtctttggtgtctctggcgaagaagcaagcagattttttgccgtggagccagatacaggggtcgtttggcttagacagcctctggaccgagagactaagtccgaattcactgtggaatttagtgtcagtgatcaccagggcgtgatcacaagaaaggtgaacatccaggttggtgacgtaaatgataatgctcctacgtttcacaaccagccctactccgtccggattcccgagaacacacccgtgggaacacctatcttcatcgtaaacgccacagatcccgaccttggggcaggcggcagtgtgctctactcttttcagcctccgtctcaattcttcgcaattgacagtgccagaggcatcgtgacagtgatccgagaattagactatgagacgacacaagcctatcaattgactgtcaatgcgacagaccaggacaaaacacgacccttaagcaccctggctaatctggctataattattacagacgtgcaagacatggacccgattttcattaatctgccgtactcgacgaacatttatgagcacagccctcccggcacgactgtcaggattatcactgcaatagaccaggacaaaggacgaccccgaggtatcggctataccatagtcagcggcaatacgaacagcatcttcgccctggattatatttccggcgtcctgacccttaatggactactcgaccgggaaaatccactgtatagtcatggcttcatactcaccgtgaaagggactgagctgaatgatgacagaacgccatcagatgccacagtcacgactacatttaatattctcgtgattgatataaatgataacgccccagagtttaactcgtccgagtactccgtggccatcaccgaactcgcgcaagttggattcgctctgccattattcattcaggtggtagacaaggacgaaaacttaggcctcaactctatgtttgaggtttacctggtaggcaataactctcaccactttatcatttctcccacctccgtacaggggaaggcggacatccgcatccgagtggccatccctctagattacgaaaccgttgaccgatatgacttcgacctcttcgccaatgaatctgtgcccgaccatgtgggttatgccaaagttaaaataacgttgataaacgagaacgacaaccgcccgatttttagccagcccctgtataatatttctctttatgaaaacgttaccgtcggcacgtctgtactgacagtcctggtttcccctcgtttcaccgccggcccacttagctctcctgggcccacagtcgtacggcatccagagggcttttgccccagagatttatccaaccaaggaagacggcatccccaaataccagagctgtgtctgctcgtttactag

SEQ ID NO: 229202 - DNA, 1593 bp, Artificial Sequence
  derived and/or modified sequence
atggggaggcatgtcgccactagttgccacgtggcgtggcttctggtcctgatatctggttgctggggccaggttaaccgcctgccattcttcacgaaccacttctttgatacatatctgctgatcagtgaagacacgcccgttggaagtagtgtcacccaactcctggctcaggatatggataatgaccctttagttttcggagtgagtggcgaggaggccagtaggttcttcgcggttgagcccgataccggcgtggtctggctccggcagccacttgacagggagactaaatccgagttcaccgtggaatttagcgtgtctgaccatcagggagtgatcactcggaaagtaaatattcaagtgggagatgtgaatgataacgctccaacttttcacaaccaaccttatagcgtgcggattcctgaaaacacccccgtcggcacgcccattttcatagtaaacgccaccgatcctgacctgggggccggtggaagcgtgctgtactcttttcagcccccttcccagttttttgcaatcgactccgcacgcggcatagtgaccgtgattcgggaacttgattacgagacaacccaagcttaccaactgaccgtaaacgcgacagatcaagataagactagacccttaagcaccttagccaatcttgctatcatcataacggacgtgcaggatatggaccccatttttatcaatttgccctacagtaccaacatttatgaacacagtccccctggcaccaccgttagaatcataacggctatcgaccaagataagggacgccccaggggcatcggatacaccatagtgagtgggaacacgaatagcatctttgcattggattatatttccggtgtgttgacgctcaacgggctgcttgacagggaaaatcctctctacagtcatgggtttatcctgacagtgaaaggaaccgagctgaacgacgacagaaccccttcagatgcgaccgtgaccaccacctttaacatcttggtaatcgacatcaacgataacgcccccgagttcaattcatctgagtatagcgtcgccataaccgagttagcacaagtagggttcgctcttcccctgttcatacaagtggtggacaaagatgagacttggggccttaacagcatgtttgaggtttatctagtcggaaataactcgcatcacttcataatcagcccgacttctgtgcagggaaaggctgatattagaatcagggtcgcgattcccctggactacgagaccgtggatagatatgatttcgacttatttgctaatgaatcagtccctgatcacgtgggctacgccaaagtgaaaattaccctcatcaacgagaatgataaccggcctatctttagtcaacccctctataatatttcgctgtatgagaatgtcactgtgggcacgtcggttctgaccgtgctggtttcaccaaggttcacagctgggcctctgagctcccctggcccgaccgtggtaaggcacccagagggattttgcccgcgggacctgtctaatcaaggtcgccggcacccccagattccagagctctgtctactggtctactag

SEQ ID NO: 229203 - DNA, 1338 bp, Artificial Sequence
  derived and/or modified sequence
atggacaacgatccattggtctttggagtctccggcgaagaggcaagcagattcttcgctgtcgaacctgatactggagtggtctggctgcgacagccgctcgaccgtgagaccaagagcgagttcacggtggagttctctgtatcagaccaccagggcgtgatcactagaaaagtcaacattcaggtgggagacgtgaatgacaatgctcctacgtttcataatcagccttattctgtaagaattcctgaaaacacacctgttggtacccctattttcatcgtaaatgcgacagaccctgatctgggagcaggcggctccgtgctgtacagcttccagcccccgtcacagttctttgccattgacagcgcaaggggcatcgtgactgtcatcagagaacttgactacgaaactacgcaagcctaccagctcactgtcaacgctctcgctattatcataactaacctcccatacagtactaatatttatgagcattctccgcccggtaccactgtgaggattatcaccgccattgaccaggacaaggggcgtccgcggggaatcgggtacaccattgtttcagggaatactaactctattttcgcgttggactacatctccggagttctgacactgaacgggttgttggatagggagaatcccctgtacagccacggattcattctgactgtcaaggggactgaactgaacgatgatcgcaccccttctgatgccactgtcacaactactttcaacatcctggtgattgatatcaacgacaatgcgcccgagtttaattccagtgaatatagtgttgctatcaccgagctggcccaggtcggcttcgccctacctctgttcatccaggtggtggataaggacgaggggctgaactccatgtttgaagtgtatttggtaggtaataacagccatcattttatcatatctcccacaagtgtccagggcaaagcggacatacggataagagtagctatcccccttgattatgagaccgtagaccggtatgactttgacttatttgccaacgagtcggttccagaccacgtgggatatgccaaggtgaaaatcaccctcataaacgagaatgacaatcgacctattttctcacagcccttatacaacatctctctgtacgaaaatgtgactgtcgggaccagtgtcttgacggtcttggtgtccccaaggttcactgccggtccactgagctcccctggacctactgtagtacggcacccggagggattttgcccccgggatctgtctaatcaagggcgccggcaccctcagatccctgagctctgcctgttggtctactag

SEQ ID NO: 229204 - DNA, 1593 bp, Artificial Sequence
  derived and/or modified sequence
atgggccgccacgtggccaccagctgccacgtggcctggctgctggtgctgatcagcggctgctggggccaggtgaaccggctgcccttcttcaccaaccacttctttgacacctacctgctgatcagcgaggacacccctgtgggcagctctgtgacccagctgctggcccaggacatggacaatgaccccctggtgtttggagtgtctggagaggaggccagccgcttctttgctgtggagccagacaccggggtggtgtggctgcggcagcccctggaccgggagaccaagtctgagttcaccgtggagttctctgtgtctgaccaccagggcgtcatcaccaggaaggtgaacatccaggtgggagatgtgaatgacaatgcccccaccttccacaaccagccctacagcgtgcgcatccctgagaacacccctgtgggcacccccatcttcatcgtgaatgccacagatcctgacctgggcgccggcggctctgtgctgtacagcttccagccccccagccagttctttgccatcgacagcgcccggggcatcgtgaccgtcatccgggagctggactatgagaccacccaggcctaccagctgactgtgaatgccacagaccaggacaagacccggcccctgagcaccctggccaacctggccatcatcatcacagatgtgcaggacatggaccccatcttcatcaacctgccctacagcaccaacatctatgagcacagccccccaggcaccaccgtgcgcatcatcacagccatcgaccaggacaagggccggccccggggcatcggctacaccatcgtgtctggcaacaccaacagcatctttgccctggactacatcagcggcgtgctgaccctgaatggcctgctggaccgggagaaccccctgtacagccacggcttcatcctgactgtgaagggcacagagctgaatgatgacaggacccccagtgatgccaccgtgaccaccaccttcaacatcctggtgattgacatcaatgacaatgcccctgagttcaacagcagcgagtacagcgtggccatcacagagctggcccaggtgggctttgccctgcccctcttcatccaggtggtggacaaggatgagaacctgggcctgaacagcatgtttgaggtgtacctggtgggcaacaacagccaccacttcatcatcagccccacctctgtgcagggcaaggctgacatccgcatccgggtggccatccccctggactatgaaacagtggacagatatgactttgacctgtttgccaatgaatctgtgcctgaccacgtgggctacgccaaggtgaagatcaccctcatcaatgaaaatgacaaccggcccatcttcagccagcccctgtacaacatcagcctgtatgaaaatgtgacagtgggcacctctgtgctgactgtgctggtgagcccccgcttcaccgctggccccctgagcagccctggccccaccgtggtgcgccaccctgagggcttctgcccccgggacctgagcaaccagggcagaagacacccccagatccctgagctgtgcctgctggtgtactag

SEQ ID NO: 229205 - DNA, 1593 bp, Artificial Sequence
  derived and/or modified sequence
atgggccgccacgtggccaccagctgccacgtggcctggctgctggtgctgatcagcggctgctggggccaggtgaaccggctgcccttcttcaccaaccacttctttgacacctacctgctgatcagcgaggacacccctgtgggcagctctgtgacccagctgctggcccaggacatggacaatgaccccctggtgtttggagtgtctggagaggaggccagccgcttctttgctgtggagccagacaccggggtggtgtggctgcggcagcccctggaccgggagaccaagtctgagttcaccgtggagttctctgtgtctgaccaccagggcgtcatcaccaggaaggtgaacatccaggtgggagatgtgaatgacaatgcccccaccttccacaaccagccctacagcgtgcgcatccctgagaacacccctgtgggcacccccatcttcatcgtgaatgccacagatcctgacctgggcgccggcggctctgtgctgtacagcttccagccccccagccagttctttgccatcgacagcgcccggggcatcgtgaccgtcatccgggagctggactatgagaccacccaggcctaccagctgactgtgaatgccacagaccaggacaagacccggcccctgagcaccctggccaacctggccatcatcatcacagatgtgcaggacatggaccccatcttcatcaacctgccctacagcaccaacatctatgagcacagccccccaggcaccaccgtgcgcatcatcacagccatcgaccaggacaagggccggccccggggcatcggctacaccatcgtgtctggcaacaccaacagcatctttgccctggactacatcagcggcgtgctgaccctgaatggcctgctggaccgggagaaccccctgtacagccacggcttcatcctgactgtgaagggcacagagctgaatgatgacaggacccccagtgatgccaccgtgaccaccaccttcaacatcctggtgattgacatcaatgacaatgcccctgagttcaacagcagcgagtacagcgtggccatcacagagctggcccaggtgggctttgccctgcccctcttcatccaggtggtggacaaggatgagacctggggcctgaacagcatgtttgaggtgtacctggtgggcaacaacagccaccacttcatcatcagccccacctctgtgcagggcaaggctgacatccgcatccgggtggccatccccctggactatgaaacagtggacagatatgactttgacctgtttgccaatgaatctgtgcctgaccacgtgggctacgccaaggtgaagatcaccctcatcaatgaaaatgacaaccggcccatcttcagccagcccctgtacaacatcagcctgtatgaaaatgtgacagtgggcacctctgtgctgactgtgctggtgagcccccgcttcaccgctggccccctgagcagccctggccccaccgtggtgcgccaccctgagggcttctgcccccgggacctgagcaaccagggcagaagacacccccagatccctgagctgtgcctgctggtgtactag

SEQ ID NO: 229206 - DNA, 1338 bp, Artificial Sequence
  derived and/or modified sequence
atggacaatgaccccctggtgtttggagtgtctggagaggaggccagccgcttctttgctgtggagccagacacaggagtggtgtggctgcggcagcccctggaccgggagaccaagtctgagttcaccgtggagttctctgtgtctgaccaccagggcgtcatcaccaggaaggtgaacatccaggtgggagatgtgaatgacaatgcccccaccttccacaaccagccctacagcgtgcgcatccctgagaacacccctgtgggcacccccatcttcatcgtgaatgccacagatcctgacctgggcgctgggggctctgtgctgtacagcttccagccccccagccagttctttgccattgattctgcccggggcatcgtgaccgtcatccgggagctggactatgagaccacccaggcctaccagctgactgtgaatgccctggccatcatcatcaccaacctgccctacagcaccaacatctatgagcacagccccccaggcaccaccgtgcgcatcatcacagccatcgaccaggacaagggccggccccggggcatcggctacaccatcgtgtctggcaacaccaacagcatctttgccctggactacatctctggagtgctgaccctgaatggcctgctggaccgggagaaccccctgtacagccacggcttcatcctgactgtgaagggcacagagctgaatgatgacaggacccccagtgatgccaccgtgaccaccaccttcaacatcctggtgattgacatcaatgacaatgcccctgagttcaacagcagcgagtacagcgtggccatcacagagctggcccaggtgggctttgccctgcccctcttcatccaggtggtggacaaggatgagggcctgaacagcatgtttgaggtgtacctggtgggcaacaacagccaccacttcatcatcagccccacctctgtgcagggcaaggctgacatccgcatccgggtggccatccccctggactatgagaccgtggacagatatgactttgacctgtttgccaatgaatctgtgcctgaccacgtgggctacgccaaggtgaagatcaccctcatcaatgaaaatgacaaccggcccatcttcagccagcccctgtacaacatcagcctgtatgaaaatgtgacagtgggcacctctgtgctgactgtgctggtgagcccccgcttcaccgctggccccctgagcagccctggccccaccgtggtgcgccaccctgagggcttctgcccccgggacctgagcaaccagggccgccgccacccccagatccctgagctgtgcctgctggtgtactag

SEQ ID NO: 229207 - DNA, 1593 bp, Artificial Sequence
  derived and/or modified sequence
atgggccggcacgtggccaccagctgccacgtggcctggctgctggtgttgatttcaggttgttggggccaggttaaccgtcttccctttttcacgaatcatttctttgacacatacctgctgatcagcgaggacacacccgtgggctctagcgtgacccagttgttagcacaggatatggacaacgacccactggtgtttggcgtttctggggaggaggcctcaagattctttgcagtggaaccagatacaggcgttgtttggctcagacagcctctggatcgagagactaagtccgagttcaccgtagagtttagtgtgagcgaccaccagggcgtgatcactagaaaggtcaatatccaggttggcgatgttaacgacaatgcccccacctttcacaatcagccttattccgtaagaatcccagagaatacacctgtcgggactccaatctttattgtcaacgccactgatccagacctgggggcaggcggctccgttctgtatagttttcagcccccatcccaatttttcgcgatcgatagcgcgagaggcatagtcactgtcatccgagagctcgattacgagactacccaggcttatcaactgacagtcaacgcaacagaccaagataagactcggccactctctactctcgctaatctcgccatcatcattaccgacgtacaggacatggaccctatctttattaacctgccctacagcactaacatctacgagcatagcccccctggtacgaccgtgcgcattatcacagcgatcgaccaggacaagggcagacctaggggtatcgggtatacaatcgtaagcgggaatactaatagtatatttgctttggactatatctcgggggtgctgaccctcaatggtcttcttgatcgcgagaatccactgtactctcacggtttcatcttgacagtgaagggcaccgagcttaacgatgatcgaactccctcagatgccaccgtgaccactactttcaatattttggtcatagacatcaacgataacgctcccgaatttaacagtagcgaatattctgtcgccattacggaactggcgcaggtcgggttcgcccttcccctgtttatccaggtagtggataaggacgagaatctggggttaaattctatgttcgaggtctatcttgtaggcaataactctcaccatttcattatcagcccaacaagtgtacaggggaaagcagacattagaattagagttgcaattcctctcgattatgaaaccgtggatcgatatgacttcgatctttttgccaacgaaagtgtgcccgatcacgtgggctacgccaaagttaagataacccttatcaatgaaaatgacaaccgacctattttcagccagcccctgtataatataagcctctacgaaaacgtaacagtcgggacgtcagtgttgactgtgcttgtttcacccaggttcacagctggccctctgagcagccccgggccaacagtggttcgccatccggaaggattttgccctagagacttatccaatcaagggcgtagacacccccagattcccgagttatgtctacttgtctactag

SEQ ID NO: 229208 - DNA, 1593 bp, Artificial Sequence
  derived and/or modified sequence
atgggccggcacgtggccaccagctgccacgtggcctggctgctggtgctgatatcagggtgctggggtcaggtcaacaggttgcccttcttcaccaatcactttttcgatacctacctgctgattagcgaggacactcctgtcggatcctcagtgacccagctcctggcccaggatatggacaacgacccactcgtctttggcgtgagcggcgaggaagccagcagattttttgcggtggaacctgataccggagtggtgtggctgcgtcagcctttggatcgcgagaccaagagcgaatttactgtcgagttctcagtgtcggatcatcaaggtgtcattacaaggaaagtaaacatacaggtgggcgacgtgaacgataatgcccctacttttcataaccagccttactctgtacggattcccgaaaacacacccgtcggaacacctatcttcattgtcaatgccacagatccggacctgggtgctgggggcagtgtgctttattcatttcagccgcccagccaattcttcgctatcgactccgcgcgaggaatcgtgaccgttatcagggaattagattatgagacgacgcaagcgtaccagctgaccgtaaacgcaactgaccaagataaaacccgccctctcagtacattggctaatttggccatcatcataactgatgtccaggatatggatcccatatttatcaaccttccgtactctactaacatatacgaacattcgccacctgggaccactgtgaggatcatcaccgcgatagaccaagacaaaggaagaccacgtggtattggttataccatagtgagcggaaataccaattctatcttcgctctagattacatttcaggggttttgacgcttaacggcctcctggatcgggagaatcccctctactctcacggtttcatcctgactgttaaagggacggagctcaacgacgaccgaacaccctccgacgccaccgtgactactacttttaacattctcgtgatcgatattaacgacaacgcccctgaattcaattcctctgagtattccgtggctataacagagctagcccaagtgggctttgccctacccctcttcatccaggtggttgacaaggatgagacttggggcctgaacagtatgttcgaagtgtatcttgtcgggaataatagccatcatttcataatttccccaacctccgtgcagggcaaggccgatatccgaatcagagttgcgatcccactggactacgagacagtcgatcgctatgattttgacctctttgccaacgaatcagttcctgatcacgttggctacgccaaagtcaagatcactctgattaacgagaacgacaacagacctatctttagccagcccctctataatatcagcctgtacgagaatgtgaccgtggggacaagtgtcctgaccgttctggtgtcaccgcggttcacagccggtcctctcagcagcccaggtcccactgtggtgagacacccagaggggttctgtcctcgggatctgtctaaccaaggaagaagacacccccagataccagaactctgcttactcgtgtattag

SEQ ID NO: 229209 - DNA, 1338 bp, Artificial Sequence
  derived and/or modified sequence
atggacaacgaccccctggtgttcggcgtgagcggcgaggaggccagccgattctttgccgtggagccggataccggcgtggtgtggctgcggcagcccctcgatagggagacaaaaagtgagttcaccgtagaattcagcgttagtgatcatcagggggtcattacaaggaaggttaacattcaggtcggagacgtcaacgacaacgctcctacgttccacaaccagccttacagcgtgaggatccccgagaacactcctgtaggaacaccaatatttatcgtcaacgcaacagatcccgacttgggtgccggagggagcgtgctctattccttccagcccccatcacaattttttgccattgactccgcgagaggaattgtgacagtcataagggaattagactacgagacgacacaggcctatcagttaacagtcaatgcactggccattatcatcacaaatctgccctatagcactaacatctatgaacatagcccgccaggcacaaccgttagaatcataacagcgattgatcaagataaagggcggccaaggggaataggatataccatagtgtctggaaatacaaactctatttttgcgttggattacatctcaggtgtgctcactcttaatggcctcctggacagggagaatccactgtacagtcacggcttcattttaaccgtcaagggtacagagctgaacgacgaccgcactccaagtgatgctacagtgactacaacatttaatatcttggtgatcgacatcaatgacaacgctcctgagtttaacagctcagagtactctgtggctataactgaacttgcgcaggtaggattcgcccttccgcttttcattcaggtggtggataaggacgagggccttaacagcatgttcgaggtgtacctcgtcggcaacaactctcatcacttcatcatctcccccaccagcgtccagggtaaggcagacattagaataagggtggctatcccgctcgactacgaaacggtggacaggtacgactttgacctcttcgcaaatgaaagcgtgcctgatcatgtagggtatgctaaagtgaagattaccctgattaatgagaatgacaaccgacccattttctcgcagccgctgtataatatatctctttacgaaaacgtgactgttgggacctctgtccttacggtgttggtttccccccgcttcacagctggtccactcagctcacccggaccaacagtagttcgccacccggagggcttctgtcctcgggacctatccaatcaggggaggagacacccacagatccctgagctatgtttgctggtgtattag

SEQ ID NO: 229210 - DNA, 1593 bp, Artificial Sequence
  derived and/or modified sequence
atggggagacacgtggcaacaagctgtcatgttgcctggttgttggtcttgatcagcggatgctggggccaggttaaccgcttaccattctttacaaatcacttctttgacacgtatctccttatttctgaagacacgccagtcggctcctctgttactcagctgctggcccaagacatggataatgacccccttgtgttcggagtcagcggagaagaagccagtaggttttttgcagtcgagcccgacactggtgtcgtgtggctgaggcagccccttgaccgggagacaaaatctgagttcaccgtggaattctcagtcagcgaccaccagggagtgattacacgaaaggtgaatatccaggttggggacgtgaatgacaacgcgcctacgttccataaccagccttacagtgttcgaattcccgaaaacacaccagttggaaccccaatcttcatcgtaaatgccacagatcccgacctgggagccggagggtcagtcctgtacagcttccagccccctagtcagtttttcgcgatagacagtgcacgaggcattgttactgtcatccgggagctggactatgaaaccactcaggcgtatcaattgacagtaaatgctactgaccaggataagactcgcccactcagtactctggccaatttagctattataattacagatgtgcaggacatggatcctatatttatcaatctcccctactccaccaacatctacgagcatagcccacctggaaccacagttaggatcatcaccgccatcgatcaggacaaggggcgacctcgtggcattggctatacaatagtgtccgggaatacaaattcaatctttgcgttggattacatttccggtgtgctgacacttaacgggttactagaccgggaaaatccactctatagtcacggatttatcttaactgtgaaggggactgaactcaacgatgaccggacgcctagtgacgcaacagttacaacaacattcaacattcttgtaattgatattaatgacaacgcaccagaatttaactcgagtgaatactccgtggccatcacagaattggctcaggtgggattcgccctgccactgtttattcaggtggtggataaagatgaaaacttaggtctcaattctatgttcgaggtttacctggtgggtaataactcacatcacttcattatttctccaacttctgtgcagggcaaagccgacattcgcataagggtggcaatcccgttagactacgagacagtcgatagatacgacttcgatctgttcgccaacgagtccgttcctgaccacgtgggttatgcgaaggtgaaaatcactctcatcaacgagaatgacaacagaccaatctttagtcagcccctgtacaacatttcattgtatgagaacgtgacagtaggcacgagtgtactgacggtcttagttagccctcgattcacagctggacctctgtcatccccgggtccaaccgtggtgaggcatcctgagggattttgccccagagacctgtctaaccaagggaggcggcaccctcagattccggagctgtgtttgcttgtgtactag

SEQ ID NO: 229211 - DNA, 1593 bp, Artificial Sequence
  derived and/or modified sequence
atgggtagacacgtcgcgacatcctgtcatgtggcttggctgctggtgctgatttcgggttgttggggccaagtgaatcgccttccattttttactaatcactttttcgatacgtacttacttatcagcgaagacacacccgtcgggtcatccgttactcaactgcttgcccaggacatggacaacgacccgctagtcttcggcgtctcgggggaagaagccagccgtttctttgctgtggagcccgacacaggggtcgtatggctgcgccagccattggatcgcgagaccaaaagcgagtttacagtggagttttctgtctcagaccaccagggggtgataacacggaaggtgaatatacaggtgggtgacgtcaatgacaacgcccctacgttccataatcagccctacagtgtaaggatacccgagaacactccagtggggacgcctatctttattgtgaatgcaactgaccccgatctgggagctgggggttccgtcctttacagcttccagccaccttcccagttcttcgcaatagactcagcacggggtatcgtgactgtaatccgggagcttgattatgagaccactcaagcctatcaacttaccgtcaatgcaactgatcaggacaagacccgcccactgtcaacactggccaatcttgccattatcatcactgatgttcaggacatggacccaatcttcatcaacttgccatactctaccaacatatacgagcatagtcctcctgggactaccgttaggattattactgccattgatcaagacaagggccgacccaggggcattggctacacaattgtgtccggcaacaccaattctatattcgcattagattatatctcaggtgttctgacgcttaacggcttgctcgaccgagagaatcctctctacagccacggattcattttgacagtgaagggcactgagttgaacgacgaccgcacaccctccgatgctacagttactaccaccttcaacattctcgtgatcgatattaatgacaacgcacctgagttcaattcctccgagtactccgtagccattaccgagttagcccaggtagggtttgcacttcccctgttcatacaagtggtcgataaggacgagacctggggattgaattcaatgtttgaggtctatctcgtcgggaataattcccaccactttataatttcccctacaagtgtgcaaggaaaagccgatattaggatccgagtggccatcccactcgattatgagacggttgaccggtacgattttgacctgttcgccaatgagtctgtccctgaccatgtgggttatgctaaggtcaaaatcaccctcataaatgagaacgacaaccggccaatcttttctcagcccctgtacaatatcagcttgtacgagaatgttacggtggggacaagtgtgcttacggtcctcgtatctccccgatttaccgctggtccattaagctccccaggcccaactgtggtgcgtcatcccgagggcttctgtccgagagatctgagcaatcaggggagaaggcaccctcaaattcccgagctttgcttacttgtgtattag

SEQ ID NO: 229212 - DNA, 1338 bp, Artificial Sequence
  derived and/or modified sequence
atggacaacgaccctctggttttcggtgtcagcggtgaagaagcaagtagattttttgcagtggaaccagacaccggggtcgtctggttgaggcagccactagatagagagacaaaatccgaattcacggtggagttcagcgtctcagaccaccagggggtgatcaccagaaaggtgaacatccaggtcggggacgtcaacgacaatgcgcctacatttcacaatcagccctatagtgtgcgcatccctgagaacacgcccgtgggaactcccatctttattgtgaatgcaaccgaccccgacctcggcgcagggggttcagtactgtactcatttcaaccacccagtcagttcttcgctatagatagcgccaggggaatagtgaccgttatcagggagcttgactatgaaacaacacaagcttaccagctgaccgtgaatgccctggccattatcatcaccaatctgccgtattcaacaaatatttatgagcacagccctccaggtaccactgtaaggatcattactgcaatagatcaagacaaaggccgaccaaggggcatcggatatactatcgtctcgggtaacactaactccatctttgctctcgactatatctcaggggtgctcaccttgaacgggctactcgaccgcgagaatcccctgtatagtcacggctttatcttgaccgttaaaggtacagagctcaacgacgaccgaactccgtctgatgctaccgttacaaccacatttaacatcctcgttattgacatcaatgacaacgctccagagttcaatagtagtgagtactctgttgctattaccgaactcgctcaagttgggtttgctctccccctgttcattcaggtcgtggacaaggatgaaggtctgaattccatgtttgaggtctatttggtgggcaataactcgcaccacttcattatctctcccaccagtgtgcagggaaaagcagatatccgtattagagtcgcaattccgttagattatgagacagtcgatagatatgacttcgatctttttgccaacgagtctgtgcccgatcatgtggggtatgccaaagtgaagataactctgatcaacgagaacgacaaccgccctatctttagccagcccctgtacaacatctcgctctacgaaaatgtcacagtgggtacaagcgtccttactgtgttggtttccccacgattcaccgcaggacctctgtcgtccccaggcccaactgtcgtgcgccatccagagggattttgtcctagggacttgagcaatcagggtaggcgccatccccagataccagaattgtgcctcctcgtgtattag

SEQ ID NO: 229213 - DNA, 1759 bp, Artificial Sequence
  derived and/or modified sequence
cgggagagagggacgcgggctgcaggcgcgatgcttggctagaggacgcgtccgacggcggccggacgctgaggtggtcggggctagtcagcccggcctgggcatggagcgcggggtggcagagcctctggacgtttggggcgcgcccagtccgagcccccggcgcgcctgaagttgcgagcggcgagcggcgagcggcgagcggcccgcggagacccaggagctgccggcacgccgcggatgagccttcgcgccggcgggaagacgcggcggtggccagggccagagcaggcggcccgcgggggccgatccggcggagagcagagcccgaggcgaggcgaggcgcggcgccgctgcacacacgcacacggttcttctgtgacccagttgctggcccaagacatggacaatgaccccctggtgtttggcgtgtctggggaggaggcctctcgcttctttgcagtggagcctgacactggcgtggtgtggctccggcagccactggacagagagaccaagtcagagttcaccgtggagttctctgtcagcgaccaccagggggtgatcacacggaaggtgaacatccaggttggggatgtgaatgacaacgcgcccacatttcacaatcagccctacagcgtccgcatccctgagaatacaccagtggggacgcccatcttcatcgtgaatgccacagaccccgacttgggggcagggggcagcgtcctctactccttccagcccccctcccaattcttcgccattgacagcgcccgcggtatcgtcacagtgatccgggagctggactacgagaccacacaggcctaccagctcacggtcaacgccttggccatcatcatcaccaacctgccttacagcaccaacatctacgagcattctcctccgggcacgacggtgcgcatcatcaccgccatagaccaggataaaggacgtccccggggcattggctacaccatcgtttcagggaataccaacagcatctttgccctggactacatcagcggagtgctgaccttgaatggcctgctggaccgggagaaccccctgtacagccatggcttcatcctgactgtgaagggcacggagctgaacgatgaccgcaccccatctgacgctacagtcaccacgaccttcaatatcctggttattgacatcaatgacaatgccccggagttcaacagctccgagtacagcgtggccatcactgagctggcacaggtcggctttgcccttccactcttcatccaggtggtggacaaggatgagggcctgaacagcatgtttgaggtgtacttggtggggaacaactcccaccacttcatcatctccccgacctccgtccaggggaaggcggacattcgtattcgggtggccatcccactggactacgagaccgtggaccgctacgactttgatctctttgccaatgagagtgtgcctgaccatgtgggctatgccaaggtgaagatcactctcatcaatgaaaatgacaaccggcccatcttcagccagccactgtacaacatcagcctgtacgagaacgtcaccgtggggacctctgtgctgacagtcctggtgagtccccgcttcactgcagggccactgagctctccagggccgactgtggtgaggcacccagagggattttgtccaagggacctcagcaatcagggaaggaggcacccccaaatccctgagctgtgtttgttggtgtattaaataaagtttttggactctt

SEQ ID NO: 229214 - DNA, 1593 bp, Artificial Sequence
  derived and/or modified sequence
atgggcagacacgtggccaccagctgccacgtggcctggctgctggtgctgatcagcggctgctggggccaggtgaacagactgcccttcttcaccaaccacttcttcgacacctacctgctgatcagcgaggacacccccgtgggcagcagcgtgacccagctgctggcccaggacatggacaacgaccccctggtgttcggcgtgagcggcgaggaggccagcagattcttcgccgtggagcccgacaccggcgtggtgtggctgagacagcccctggacagagagaccaagagcgagttcaccgtggagttcagcgtgagcgaccaccagggcgtgatcaccagaaaggtgaacatccaggtgggcgacgtgaacgacaacgcccccaccttccacaaccagccctacagcgtgagaatccccgagaacacccccgtgggcacccccatcttcatcgtgaacgccaccgaccccgacctgggcgccggcggcagcgtgctgtacagcttccagccccccagccagttcttcgccatcgacagcgccagaggcatcgtgaccgtgatcagagagctggactacgagaccacccaggcctaccagctgaccgtgaacgccaccgaccaggacaagaccagacccctgagcaccctggccaacctggccatcatcatcaccgacgtgcaggacatggaccccatcttcatcaacctgccctacagcaccaacatctacgagcacagcccccccggcaccaccgtgagaatcatcaccgccatcgaccaggacaagggcagacccagaggcatcggctacaccatcgtgagcggcaacaccaacagcatcttcgccctggactacatcagcggcgtgctgaccctgaacggcctgctggacagagagaaccccctgtacagccacggcttcatcctgaccgtgaagggcaccgagctgaacgacgacagaacccccagcgacgccaccgtgaccaccaccttcaacatcctggtgatcgacatcaacgacaacgcccccgagttcaacagcagcgagtacagcgtggccatcaccgagctggcccaggtgggcttcgccctgcccctgttcatccaggtggtggacaaggacgagaacctgggcctgaacagcatgttcgaggtgtacctggtgggcaacaacagccaccacttcatcatcagccccaccagcgtgcagggcaaggccgacatcagaatcagagtggccatccccctggactacgagaccgtggacagatacgacttcgacctgttcgccaacgagagcgtgcccgaccacgtgggctacgccaaggtgaagatcaccctgatcaacgagaacgacaacagacccatcttcagccagcccctgtacaacatcagcctgtacgagaacgtgaccgtgggcaccagcgtgctgaccgtgctggtgagccccagattcaccgccggccccctgagcagccccggccccaccgtggtgagacaccccgagggcttctgccccagagacctgagcaaccagggcagaagacacccccagatccccgagctgtgcctgctggtgtactag

SEQ ID NO: 229215 - DNA, 1593 bp, Artificial Sequence
  derived and/or modified sequence
atgggcagacacgtggccaccagctgccacgtggcctggctgctggtgctgatcagcggctgctggggccaggtgaacagactgcccttcttcaccaaccacttcttcgacacctacctgctgatcagcgaggacacccccgtgggcagcagcgtgacccagctgctggcccaggacatggacaacgaccccctggtgttcggcgtgagcggcgaggaggccagcagattcttcgccgtggagcccgacaccggcgtggtgtggctgagacagcccctggacagagagaccaagagcgagttcaccgtggagttcagcgtgagcgaccaccagggcgtgatcaccagaaaggtgaacatccaggtgggcgacgtgaacgacaacgcccccaccttccacaaccagccctacagcgtgagaatccccgagaacacccccgtgggcacccccatcttcatcgtgaacgccaccgaccccgacctgggcgccggcggcagcgtgctgtacagcttccagccccccagccagttcttcgccatcgacagcgccagaggcatcgtgaccgtgatcagagagctggactacgagaccacccaggcctaccagctgaccgtgaacgccaccgaccaggacaagaccagacccctgagcaccctggccaacctggccatcatcatcaccgacgtgcaggacatggaccccatcttcatcaacctgccctacagcaccaacatctacgagcacagcccccccggcaccaccgtgagaatcatcaccgccatcgaccaggacaagggcagacccagaggcatcggctacaccatcgtgagcggcaacaccaacagcatcttcgccctggactacatcagcggcgtgctgaccctgaacggcctgctggacagagagaaccccctgtacagccacggcttcatcctgaccgtgaagggcaccgagctgaacgacgacagaacccccagcgacgccaccgtgaccaccaccttcaacatcctggtgatcgacatcaacgacaacgcccccgagttcaacagcagcgagtacagcgtggccatcaccgagctggcccaggtgggcttcgccctgcccctgttcatccaggtggtggacaaggacgagacctggggcctgaacagcatgttcgaggtgtacctggtgggcaacaacagccaccacttcatcatcagccccaccagcgtgcagggcaaggccgacatcagaatcagagtggccatccccctggactacgagaccgtggacagatacgacttcgacctgttcgccaacgagagcgtgcccgaccacgtgggctacgccaaggtgaagatcaccctgatcaacgagaacgacaacagacccatcttcagccagcccctgtacaacatcagcctgtacgagaacgtgaccgtgggcaccagcgtgctgaccgtgctggtgagccccagattcaccgccggccccctgagcagccccggccccaccgtggtgagacaccccgagggcttctgccccagagacctgagcaaccagggcagaagacacccccagatccccgagctgtgcctgctggtgtactag

SEQ ID NO: 229216 - DNA, 1338 bp, Artificial Sequence
  derived and/or modified sequence
atggacaacgaccccctggtgttcggcgtgagcggcgaggaggccagcagattcttcgccgtggagcccgacaccggcgtggtgtggctgagacagcccctggacagagagaccaagagcgagttcaccgtggagttcagcgtgagcgaccaccagggcgtgatcaccagaaaggtgaacatccaggtgggcgacgtgaacgacaacgcccccaccttccacaaccagccctacagcgtgagaatccccgagaacacccccgtgggcacccccatcttcatcgtgaacgccaccgaccccgacctgggcgccggcggcagcgtgctgtacagcttccagccccccagccagttcttcgccatcgacagcgccagaggcatcgtgaccgtgatcagagagctggactacgagaccacccaggcctaccagctgaccgtgaacgccctggccatcatcatcaccaacctgccctacagcaccaacatctacgagcacagcccccccggcaccaccgtgagaatcatcaccgccatcgaccaggacaagggcagacccagaggcatcggctacaccatcgtgagcggcaacaccaacagcatcttcgccctggactacatcagcggcgtgctgaccctgaacggcctgctggacagagagaaccccctgtacagccacggcttcatcctgaccgtgaagggcaccgagctgaacgacgacagaacccccagcgacgccaccgtgaccaccaccttcaacatcctggtgatcgacatcaacgacaacgcccccgagttcaacagcagcgagtacagcgtggccatcaccgagctggcccaggtgggcttcgccctgcccctgttcatccaggtggtggacaaggacgagggcctgaacagcatgttcgaggtgtacctggtgggcaacaacagccaccacttcatcatcagccccaccagcgtgcagggcaaggccgacatcagaatcagagtggccatccccctggactacgagaccgtggacagatacgacttcgacctgttcgccaacgagagcgtgcccgaccacgtgggctacgccaaggtgaagatcaccctgatcaacgagaacgacaacagacccatcttcagccagcccctgtacaacatcagcctgtacgagaacgtgaccgtgggcaccagcgtgctgaccgtgctggtgagccccagattcaccgccggccccctgagcagccccggccccaccgtggtgagacaccccgagggcttctgccccagagacctgagcaaccagggcagaagacacccccagatccccgagctgtgcctgctggtgtactag

SEQ ID NO: 229217 - protein, 367 aa, Artificial Sequence
  derived and/or modified sequence
MDKEYVGFAALPNQLHRKSVKKGFDFTLMVAGESGLGKSTLINSLFLTNLYEDRQVPEASARLTQTLAIERRGVEIEEGGVKVKLTLVDTPGFGDSVDCSDCWLPVVKFIEEQFEQYLRDESGLNRKNIQDSRVHCCLYFISPFGRGLRPLDVAFLRAVHEKVNIIPVIGKADALMPQETQALKQKIRDQLKEEEIHIYQFPECDSDEDEDFKRQDAEMKESIPFAVVGSCEVVRDGGNRPVRGRRYSWGTVEVENPHHCDFLNLRRMLVQTHLQDLKEVTHDLLYEGYRARCLQSLARPGARDRASRSKLSRQSATEIPLPMLPLADTEKLIREKDEELRRMQEMLEKMQAQMQQSQAQGEQSDAL

SEQ ID NO: 229218 - DNA, 1104 bp, Artificial Sequence
  derived and/or modified sequence
atggacaaagagtacgtggggttcgccgccttacctaaccagttacacagaaagtccgtcaagaaggggtttgatttcacgctcatggttgccggcgaatcagggctggggaaaagcacccttattaattcactgtttctgactaacctctatgaagaccgtcaggtgcctgaggcctctgctaggttgacgcagacactggcaatcgagcgccggggggttgagattgaggaaggcggcgttaaggtcaaacttacgttggtggacactcccgggttcggtgactccgtcgattgctcagactgctggctcccagttgtaaagtttatagaagaacaattcgaacagtacctgagggatgagagcggcctgaatcgcaagaacattcaggacagcagagttcactgctgcttgtacttcatatcgccattcggaaggggcctccgacccctggatgtggcctttcttcgcgcagtgcacgagaaagtcaatattattcctgtcatcgggaaagctgatgcattaatgccgcaggaaactcaggcactgaagcagaaaattcgggaccagttgaaggaggaagaaattcacatctatcagttccctgaatgcgactccgatgaggacgaagattttaagaggcaggatgcagaaatgaaggaaagcattccattcgccgtggttggaagctgcgaagtcgttagagacggtggcaacagacccgtccgtggccggcgttacagctggggaactgtggaggtggagaacccacaccactgtgacttccttaatctgcgcagaatgctcgtgcagacacatcttcaggacctcaaagaggtgacacatgacctgctatacgaagggtaccgagcaagatgcttgcagtctctggcaaggcctggtgcccgtgacagggccagcaggagtaagctttccagacagagcgctaccgaaattcccctacctatgctccccctggccgacactgagaagctgataagagagaaggatgaggaactacggaggatgcaagaaatgcttgagaagatgcaggcccagatgcagcagagccaggcccagggagagcagtccgatgccctctag

SEQ ID NO: 229219 - DNA, 1104 bp, Artificial Sequence
  derived and/or modified sequence
atggataaagaatacgtgggctttgcagccctgcccaatcagctgcaccgtaagagtgttaaaaaaggctttgactttacccttatggtggccggcgagtccggattggggaaatctacactcatcaactctttgtttctgacaaacctctacgaagacagacaagtgcctgaggcatctgctagattgactcagaccctggcaatagaaaggagaggggtcgagatcgaagagggtggtgtcaaagtgaagctgaccttggtggacacccccggatttggagattccgttgactgttctgactgctggcttcctgttgtgaaatttattgaggagcagtttgagcagtacctgcgcgacgaatccggtctgaatcggaaaaatatccaagattcccgggtgcattgttgtctctatttcatttcaccttttggcagagggttacggcccctggacgtggccttcctcagggctgttcacgaaaaggtgaatataattcctgtcatcgggaaagcagacgccctgatgcctcaggagacccaggccctgaagcagaagatacgcgatcaactaaaggaagaggagattcacatctaccagtttcccgagtgcgattccgatgaggacgaggactttaagagacaagatgctgagatgaaggaatcaattccctttgccgtagtgggaagctgcgaggtcgtgcgcgatggaggaaatcgccctgtgcggggtaggcgctactcctggggtaccgtcgaggtggagaaccctcaccattgcgactttcttaacctgcggagaatgttagtccaaacccacctgcaagaccttaaggaggtgacacacgacctgctgtacgagggctaccgggctagatgcctccagtcacttgccagacccggcgcccgtgaccgtgccagcagatctaaactgtccagacagagtgctactgaaatccccctgccgatgctgcctctggctgacacagagaagctgatcagggagaaagacgaagagctccgcaggatgcaggaaatgctcgagaagatgcaagctcaaatgcaacagtcacaggcccagggcgaacagtccgatgcactgtag

SEQ ID NO: 229220 - DNA, 1104 bp, Artificial Sequence
  derived and/or modified sequence
atggacaaggagtatgtgggctttgctgccctgcccaaccagctgcacaggaagtctgtgaagaagggctttgacttcaccctgatggtggccggggagagcggcctgggcaagagcaccctcatcaacagcctcttcctgaccaacctgtatgaggaccggcaggtgcctgaggccagcgcccggctgacccagaccctggccattgaaagaagaggagtggagattgaggagggcggcgtgaaggtgaagctgaccctggtggacaccccaggctttggagacagcgtggactgcagcgactgctggctgcctgtggtgaagttcatcgaggagcagtttgagcagtacctgagagatgagagcggcctgaacaggaagaacatccaggacagccgggtgcactgctgcctgtacttcatcagccccttcggccggggcctgcggcccctggatgtggccttcctgcgggctgtgcatgagaaggtgaacatcatccctgtgattggcaaggcagatgccctgatgccccaggagacccaggccctgaagcagaagatccgggaccagctgaaggaggaggagatccacatctaccagttcccagaatgtgacagtgatgaagatgaggacttcaagaggcaggatgctgagatgaaggagagcatcccctttgctgtggtgggcagctgtgaggtggtgagagatggcggcaacagacctgtgcggggccgccgctacagctggggcaccgtggaggtggagaacccccaccactgtgacttcctgaacctgcggaggatgctggtgcagacccacctgcaggacctgaaggaggtgacccatgacctgctgtatgagggctaccgggcccgctgcctgcagagcctggcccggcctggggcccgggaccgggccagccgcagcaagctgagccggcagagcgccacagagatccccctgcccatgctgcccctggccgacacagagaagctgatccgggagaaggatgaggagctgcggaggatgcaggagatgctggagaagatgcaggcccagatgcagcagagccaggcccagggcgagcagagtgatgccctgtag

SEQ ID NO: 229221 - DNA, 1104 bp, Artificial Sequence
  derived and/or modified sequence
atggacaaggagtacgtgggcttcgccgccctgcccaaccagctgcaccgcaaatcagtaaaaaaaggatttgattttactctcatggtggcgggcgaatccggcctggggaagagtaccctgatcaatagtttgtttttaactaacttatatgaggatcgacaggtacctgaagcctctgcaaggcttacccagaccctcgccattgagaggcggggtgtcgagatcgaagagggcggtgtaaaggtgaaactaaccctggtggacacgccaggctttggcgactcggtcgattgttccgattgctggctgcctgtggtcaaatttatagaggagcagtttgagcagtatctcagggatgaaagcgggctgaatcgtaagaatatccaagactctcgcgttcactgctgtctttactttatttctcctttcggcagaggtttaagacccctggacgttgctttcctgcgcgccgttcacgaaaaagttaacatcattccagtgatcgggaaagccgacgccctgatgccccaggagacacaggccctgaagcaaaaaataagagatcagctgaaagaggaagaaatccacatctaccagttccccgagtgtgatagtgacgaagacgaggatttcaaacgtcaagacgctgagatgaaggagagtatccccttcgcagtcgtgggttcttgcgaggtggttcgcgacggcggaaaccgtcccgtgcgaggccggaggtacagttggggcacagtggaggtggaaaatcctcaccattgcgacttccttaatctgagaaggatgctcgtacagactcacctgcaggacttgaaggaggtaacacacgacctgttgtatgaagggtaccgggcaaggtgcctgcaatcattggccagacccggggcccgtgatcgagccagccggagcaagttatctagacagtccgctacggagataccactgccaatgctacctcttgctgacacagagaagctgattcgagaaaaagatgaggaactgagacgaatgcaggagatgttagaaaaaatgcaggcacaaatgcagcagtctcaggcccagggagagcaatcggacgctctgtag

SEQ ID NO: 229222 - DNA, 1104 bp, Artificial Sequence
  derived and/or modified sequence
atggacaaggagtacgtgggcttcgccgccctgcccaaccagctgcatcgcaagagcgtgaagaagggctttgattttactctcatggttgctggagaatctgggttgggaaagagtacactgatcaattccttgtttctgacaaacctgtatgaggatcggcaggttccagaggcaagcgccaggctcacgcagactctggccatcgagcggagaggtgtggaaattgaggaaggtggagtcaaggtgaaactgaccttggtggatacaccaggctttggtgattctgtggactgctcagactgctggctgcctgttgttaagttcatcgaagagcagtttgagcagtatcttagagatgagtcaggcctcaacaggaagaacattcaggatagccgggtgcactgctgcttgtacttcattagcccattcggccgtggcctgagacctctggacgttgccttcttgcgcgccgtgcacgagaaggtgaatataataccggtcattgggaaagccgatgcactgatgccacaggaaacacaggccttaaaacaaaaaatccgcgatcagcttaaagaagaggaaattcatatttatcagttccctgagtgtgactccgacgaggatgaagactttaaaagacaggatgcggaaatgaaagaaagtatcccctttgcagtggtcggctcctgcgaagtagtaagagatggaggcaatcgaccagtgcgtggaagacgctacagctggggaaccgtagaagtcgagaatccccaccactgcgacttcctgaacctgcgaaggatgttagtgcagacccatctccaggacctgaaagaagtgactcatgacctgctttacgaaggttaccgggccaggtgtctgcaaagcctcgctcggcctggtgccagggatagggcctctcgctccaagctttctcgccagtccgctactgaaatcccactcccgatgctcccgctcgcggatactgagaagcttattagagagaaagatgaagagctccgaaggatgcaggaaatgctggaaaagatgcaggcccagatgcaacagtcccaggctcagggcgagcagtcagatgctctctag

SEQ ID NO: 229223 - DNA, 1104 bp, Artificial Sequence
  derived and/or modified sequence
atggacaaggaatatgtagggtttgctgcactgcctaatcagttgcatcgaaagtctgtaaagaaggggtttgatttcaccctgatggtggcaggcgagagtgggctgggcaagtcgacattaatcaactccctgttcctaaccaacctatatgaggaccgccaggtcccagaggcctccgcacgactgacccagaccctcgccatcgagcggcgaggcgtcgagatcgaggagggcggagtaaaggtgaaactcaccttggttgatacccctggatttggcgatagcgtggactgttccgactgttggttaccggtcgttaagttcatagaggagcaatttgagcagtatctcagagatgagtccgggctgaacaggaaaaatatccaggattcgagggtacactgctgtctctactttattagcccctttgggcgtggactcagaccactggatgtagctttcttgagagctgtgcacgaaaaagtgaacataatcccggtgatcgggaaagcagacgctctgatgcctcaagaaacacaagcccttaagcagaagatccgagatcaactgaaagaggaagagatacatatttatcagttcccagaatgcgactctgacgaagacgaagacttcaagcggcaagacgctgagatgaaggagagtatacccttcgccgtggtcggatcttgcgaggtggtgcgcgatggcggtaaccgccctgtgcgtgggaggagatacagctgggggacggtcgaggtggaaaatccccatcattgtgattttttaaatctcaggcgcatgcttgtacagacacacctgcaggatctgaaagaggtgacgcacgatttgctttacgagggctaccgcgctcgctgtctgcagagtctggctcgacccggtgcacgagaccgagccagccgatcgaaattgagtcgccaatccgccacagaaatcccgctgcctatgttgcctctcgctgatactgagaaactcattcgtgagaaggacgaggagctccggagaatgcaggagatgctcgagaaaatgcaggcccaaatgcaacagtctcaggctcagggggaacagagtgatgccttatag

SEQ ID NO: 229224 - DNA, 1104 bp, Artificial Sequence
  derived and/or modified sequence
atggacaaggagtatgtggggtttgctgcgttacccaatcagctgcatcgaaagagtgtgaaaaaagggtttgactttacgctgatggttgcgggtgagtcagggctggggaaaagtaccctgattaactccctgttcctgaccaacttatacgaggaccgccaggtgccagaggccagcgcacgactgacacaaactcttgccatagaaagacggggtgtggagatagaagagggcggagtaaaagtcaaactgaccctggtggatacccccggattcggagactccgttgattgcagcgactgctggcttccagtcgttaagtttatagaggagcagttcgagcagtacctccgggatgagtccgggctgaaccgtaagaacatccaggacagtcgagtccattgttgtctctactttatttccccttttgggaggggactgagacctctcgatgtggccttcttgagggccgtgcatgaaaaggttaatattatccccgtgataggaaaggccgatgcactaatgccacaagagacacaagcactcaagcagaagatcagggatcaactgaaggaggaggagatccacatatatcaatttcctgaatgtgactccgatgaggatgaagactttaagaggcaggatgcggaaatgaaagagagtatacccttcgcggtggttggctcatgcgaagttgtccgtgacgggggtaatcgcccagtacggggacgccgatacagctgggggaccgtggaggttgagaacccacatcattgtgactttctcaacctgcgacggatgcttgtgcaaacgcatctccaggatttgaaagaggtgacacacgatttgctctatgagggctatagagcacggtgcctccagtcacttgccagacccggtgctagagacagggcctcaagaagtaaactttcacgccagagcgccacggagattcctctgcccatgctgccactcgccgataccgaaaagctgattcgcgagaaagatgaagaattgcgcaggatgcaggaaatgctggagaaaatgcaggcccagatgcaacagtcacaggcccaaggcgagcagtccgacgccctttag

SEQ ID NO: 229225 - DNA, 1592 bp, Artificial Sequence
  derived and/or modified sequence
ccctgctaacaaagggagccacttccttcctctctgcacataccccatgtctcaccacgatgatggagctacagtgggacttggaatccagatgtgtgaaggatggagggttgaagccgcactcagcttcctgccccaccagaggaagtggggagagacggcaggtgcagtgatggctggcggagtcatggacaaggagtacgtgggttttgctgccctccccaaccagctgcaccgcaagtctgtcaagaaggggtttgacttcacgctaatggtggcaggggagtcaggcctagggaaatccaccctcatcaacagcctcttcctcaccaacctctatgaggatcgccaggtgccagaggccagtgctcgcttgacacagaccctggccattgagcgccggggcgtagagattgaggaagggggtgtgaaagtgaagctgacccttgtggacacacctggctttggggactcagtggactgctctgactgctggcttccggtggtgaaattcatcgaggagcaatttgagcagtaccttagggatgagagtggcctgaaccggaagaacatccaggactcccgagtccactgctgcctctacttcatctcacccttcggccgggggctccggcccctagatgtggccttcctccgggcagtacacgagaaagtcaacatcatcccagtcattggcaaagcggatgctctgatgccccaggaaacccaggccctcaagcagaagatccgggatcagttgaaggaagaggagatccacatctaccagttccccgaatgtgactctgatgaagatgaagacttcaagaggcaggatgcagagatgaaggaaagcatcccttttgcagtcgtgggatcatgcgaggtggtgagggatggcgggaaccggccggtgaggggacgccgctactcctgggggaccgtggaggtggagaacccacatcactgcgatttcctgaacctgcgacggatgctggtgcagacacacctgcaggacctgaaagaggtgacgcacgatctgctctacgagggctaccgggcccgctgcctacagagcctggcccggcctggggctcgcgatcgagccagccgcagtaagctttcccgccagagcgccacagagatcccgctgcccatgctgcctctggcggacaccgagaagctgatccgcgagaaagacgaagagctgcgccgcatgcaagagatgctggagaagatgcaggcccaaatgcagcagagccaggcccagggcgagcagtcagacgccctctgaggccacgccccgcccggccttacctcggctccgccttcagtcggcctcttgtccaatccccgcgccccacactgcccagcgccccccgggacctccgcgggtgccgccctcgcgcgggctagggggaggttctcccagcctgagtccgtagccccgccccggcgctggtcccgcccacccagacaccgcccacttcccggcccggggcctgcacaatctccgaccgcatcactgtcttccggagtcccccttcttctcccagactctgtcttcaataaaaactgagcttcccgcggccacg

SEQ ID NO: 229226 - DNA, 1589 bp, Artificial Sequence
  derived and/or modified sequence
ccctgctaacaaagggagccacttccttcctctctgcacataccccatgtctcaccacgatgatggagctacagtgggacttggaatccagatgtgtgaaggatggagggttgaagccgcactcagcttcctgccccaccagaggaagtggggagagacggcaggtgcagtgatggctggcggagtcatggacaaggagtacgtgggttttgctgccctccccaaccagctgcaccgcaagtctgtcaagaaggggtttgacttcacgctaatggtggcaggggagtcaggcctagggaaatccaccctcatcaacagcctcttcctcaccaacctctatgaggatcgccaggtgccagaggccagtgctcgcttgacacagaccctggccattgagcgccggggcgtagagattgaggaagggggtgtgaaagtgaagctgacccttgtggacacacctggctttggggactcagtggactgctctgactgctggcttccggtggtgaaattcatcgaggagcaatttgagcagtaccttagggatgagagtggcctgaaccggaagaacatccaggactcccgagtccactgctgcctctacttcatctcacccttcggccgggggctccggcccctagatgtggccttcctccgggcagtacacgagaaagtcaacatcatcccagtcattggcaaagcggatgctctgatgccccaggaaacccaggccctcaagcagaagatccgggatcagttgaaggaagaggagatccacatctaccagttccccgaatgtgactctgatgaagatgaagacttcaagaggcaggatgcagagatgaaggaaagcatcccttttgcagtcgtgggatcatgcgaggtggtgagggatggcgggaaccggccggtgaggggacgccgctactcctgggggaccgtggaggtggagaacccacatcactgcgatttcctgaacctgcgacggatgctggtgcagacacacctgcaggacctgaaagaggtgacgcacgatctgctctacgagggctaccgggcccgctgcctacagagcctggcccggcctggggctcgcgatcgagccagccgcagtaagctttcccgccagagcgccacagagatcccgctgcccatgctgcctctggcggacaccgagaagctgatccgcgagaaagacgaagagctgcgccgcatgcaagagatgctggagaagatgcaggcccaaatgcagcagagccaggcccagggcgagcagtcagacgccctctgaggccacgccccgcccggccttacctcggctccgccttcagtcggcctcttgtccaatccccgcgccccacactgcccagcgccccccgggacctccgcgggtgccgccctcgcgcgggctagggggaggttctcccagcctgagtccgtagccccgccccggcgctggtcccgcccacccagacaccgcccacttcccggcccggggcctgcacaatctccgaccgcatcactgtcttccggagtcccccttcttctcccagactctgtcttcaataaaaactgagcttcccgcggcc

SEQ ID NO: 229227 - DNA, 1104 bp, Artificial Sequence
  derived and/or modified sequence
atggacaaggagtacgtgggcttcgccgccctgcccaaccagctgcacagaaagagcgtgaagaagggcttcgacttcaccctgatggtggccggcgagagcggcctgggcaagagcaccctgatcaacagcctgttcctgaccaacctgtacgaggacagacaggtgcccgaggccagcgccagactgacccagaccctggccatcgagagaagaggcgtggagatcgaggagggcggcgtgaaggtgaagctgaccctggtggacacccccggcttcggcgacagcgtggactgcagcgactgctggctgcccgtggtgaagttcatcgaggagcagttcgagcagtacctgagagacgagagcggcctgaacagaaagaacatccaggacagcagagtgcactgctgcctgtacttcatcagccccttcggcagaggcctgagacccctggacgtggccttcctgagagccgtgcacgagaaggtgaacatcatccccgtgatcggcaaggccgacgccctgatgccccaggagacccaggccctgaagcagaagatcagagaccagctgaaggaggaggagatccacatctaccagttccccgagtgcgacagcgacgaggacgaggacttcaagagacaggacgccgagatgaaggagagcatccccttcgccgtggtgggcagctgcgaggtggtgagagacggcggcaacagacccgtgagaggcagaagatacagctggggcaccgtggaggtggagaacccccaccactgcgacttcctgaacctgagaagaatgctggtgcagacccacctgcaggacctgaaggaggtgacccacgacctgctgtacgagggctacagagccagatgcctgcagagcctggccagacccggcgccagagacagagccagcagaagcaagctgagcagacagagcgccaccgagatccccctgcccatgctgcccctggccgacaccgagaagctgatcagagagaaggacgaggagctgagaagaatgcaggagatgctggagaagatgcaggcccagatgcagcagagccaggcccagggcgagcagagcgacgccctgtag

SEQ ID NO: 229228 - protein, 677 aa, Artificial Sequence
  derived and/or modified sequence
MHHLLEQSADMATALLAGEKLRELILPGAQDDKAGALAALLLQLKLELPFDRVVTIGTVLVPILLVTLVFTKNFAEEPIYCYTPHNFTRDQALYARGYCWTELRDALPGVDASLWPSLFEHKFLPYALLAFAAIMYVPALGWEFLASTRLTSELNFLLQEIDNCYHRAAEGRAPKIEKQIQSKGPGITEREKREIIENAEKEKSPEQNLFEKYLERRGRSNFLAKLYLARHVLILLLSAVPISYLCTYYATQKQNEFTCALGASPDGAAGAGPAVRVSCKLPSVQLQRIIAGVDIVLLCVMNLIILVNLIHLFIFRKSNFIFDKLHKVGIKTRRQWRRSQFCDINILAMFCNENRDHIKSLNRLDFITNESDLMYDNVVRQLLAALAQSNHDATPTVRDSGVQTVDPSANPAEPDGAAEPPVVKRPRKKMKWIPTSNPLPQPFKEPLAIMRVENSKAEKPKPARRKTATDTLIAPLLDRSAHHYKGGGGDPGPGPAPAPAPPPAPDKKHARHFSLDVHPYILGTKKAKAEAVPAALPASRSQEGGFLSQAEDCGLGLAPAPIKDAPLPEKEIPYPTEPARAGLPSGGPFHVRSPPAAPAVAPLTPASLGKAEPLTILSRNATHPLLHINTLYEAREEEDGGPRLPQDVGDLIAIPAPQQILIATFDEPRTVVSTVEF

SEQ ID NO: 229229 - protein, 354 aa, Artificial Sequence
  derived and/or modified sequence
MNLIILVNLIHLFIFRKSNFIFDKLHKVGIKTRRQWRRSQFCDINILAMFCNENRDHIKSLNRLDFITNESDLMYDNVVRQLLAALAQSNHDATPTVRDSGVQTVDPSANPAEPDGAAEPPVVKRPRKKMKWIPTSNPLPQPFKEPLAIMRVENSKAEKPKPARRKTATDTLIAPLLDRSAPDKKHARHFSLDVHPYILGTKKAKAEAVPAALPASRSQEGGFLSQAEDCGLGLAPAPIKDAPLPEKEIPYPTEPARAGLPSGGPFHVRSPPAAPAVAPLTPASLGKAEPLTILSRNATHPLLHINTLYEAREEEDGGPRLPQDVGDLIAIPAPQQILIATFDEPRTVVSTVEF

SEQ ID NO: 229230 - DNA, 2034 bp, Artificial Sequence
  derived and/or modified sequence
atgcaccacctgctggagcagagcgccgacatggccaccgccctgctggccggcgagaagctgagagagctgatcctgcccggcgcccaggacgacaaggccggcgccctggccgccctgctgctgcagctgaagctggagctgcccttcgacagagtggtgaccatcggcaccgtgctggtgcccatcctgctggtgaccctggtgttcaccaagaacttcgccgaggagcccatctactgctacaccccccacaacttcaccagagaccaggccctgtacgccagaggctactgctggaccgagctgagagacgccctgcccggcgtggacgccagcctgtggcccagcctgttcgagcacaagttcctgccctacgccctgctggccttcgccgccatcatgtacgtgcccgccctgggctgggagttcctggccagcaccagactgaccagcgagctgaacttcctgctgcaggagatcgacaactgctaccacagagccgccgagggcagagcccccaagatcgagaagcagatccagagcaagggccccggcatcaccgagagagagaagagagagatcatcgagaacgccgagaaggagaagagccccgagcagaacctgttcgagaagtacctggagagaagaggcagaagcaacttcctggccaagctgtacctggccagacacgtgctgatcctgctgctgagcgccgtgcccatcagctacctgtgcacctactacgccacccagaagcagaacgagttcacctgcgccctgggcgccagccccgacggcgccgccggcgccggccccgccgtgagagtgagctgcaagctgcccagcgtgcagctgcagagaatcatcgccggcgtggacatcgtgctgctgtgcgtgatgaacctgatcatcctggtgaacctgatccacctgttcatcttcagaaagagcaacttcatcttcgacaagctgcacaaggtgggcatcaagaccagaagacagtggagaagaagccagttctgcgacatcaacatcctggccatgttctgcaacgagaacagagaccacatcaagagcctgaacagactggacttcatcaccaacgagagcgacctgatgtacgacaacgtggtgagacagctgctggccgccctggcccagagcaaccacgacgccacccccaccgtgagagacagcggcgtgcagaccgtggaccccagcgccaaccccgccgagcccgacggcgccgccgagccccccgtggtgaagagacccagaaagaagatgaagtggatccccaccagcaaccccctgccccagcccttcaaggagcccctggccatcatgagagtggagaacagcaaggccgagaagcccaagcccgccagaagaaagaccgccaccgacaccctgatcgcccccctgctggacagaagcgcccaccactacaagggcggcggcggcgaccccggccccggccccgcccccgcccccgcccccccccccgcccccgacaagaagcacgccagacacttcagcctggacgtgcacccctacatcctgggcaccaagaaggccaaggccgaggccgtgcccgccgccctgcccgccagcagaagccaggagggcggcttcctgagccaggccgaggactgcggcctgggcctggcccccgcccccatcaaggacgcccccctgcccgagaaggagatcccctaccccaccgagcccgccagagccggcctgcccagcggcggccccttccacgtgagaagcccccccgccgcccccgccgtggcccccctgacccccgccagcctgggcaaggccgagcccctgaccatcctgagcagaaacgccacccaccccctgctgcacatcaacaccctgtacgaggccagagaggaggaggacggcggccccagactgccccaggacgtgggcgacctgatcgccatccccgccccccagcagatcctgatcgccaccttcgacgagcccagaaccgtggtgagcaccgtggagttctag

SEQ ID NO: 229231 - DNA, 1065 bp, Artificial Sequence
  derived and/or modified sequence
atgaacctgatcatcctggtgaacctgatccacctgttcatcttcagaaagagcaacttcatcttcgacaagctgcacaaggtgggcatcaagaccagaagacagtggagaagaagccagttctgcgacatcaacatcctggccatgttctgcaacgagaacagagaccacatcaagagcctgaacagactggacttcatcaccaacgagagcgacctgatgtacgacaacgtggtgagacagctgctggccgccctggcccagagcaaccacgacgccacccccaccgtgagagacagcggcgtgcagaccgtggaccccagcgccaaccccgccgagcccgacggcgccgccgagccccccgtggtgaagagacccagaaagaagatgaagtggatccccaccagcaaccccctgccccagcccttcaaggagcccctggccatcatgagagtggagaacagcaaggccgagaagcccaagcccgccagaagaaagaccgccaccgacaccctgatcgcccccctgctggacagaagcgcccccgacaagaagcacgccagacacttcagcctggacgtgcacccctacatcctgggcaccaagaaggccaaggccgaggccgtgcccgccgccctgcccgccagcagaagccaggagggcggcttcctgagccaggccgaggactgcggcctgggcctggcccccgcccccatcaaggacgcccccctgcccgagaaggagatcccctaccccaccgagcccgccagagccggcctgcccagcggcggccccttccacgtgagaagcccccccgccgcccccgccgtggcccccctgacccccgccagcctgggcaaggccgagcccctgaccatcctgagcagaaacgccacccaccccctgctgcacatcaacaccctgtacgaggccagagaggaggaggacggcggccccagactgccccaggacgtgggcgacctgatcgccatccccgccccccagcagatcctgatcgccaccttcgacgagcccagaaccgtggtgagcaccgtggagttctag

SEQ ID NO: 229232 - DNA, 2034 bp, Artificial Sequence
  derived and/or modified sequence
atgcatcatttactggagcagtctgccgatatggctactgccctgctcgcgggcgagaagttaagggagttaatcctgccaggcgcccaggatgacaaagcaggagcactcgcggcgctcctgctgcaactaaagttggagctcccattcgacagagtcgtcacaattggcacagtacttgtcccaattctactggtgacacttgtattcacaaagaattttgcagaggaaccaatatattgttatacaccccacaactttacacgagaccaggcactctacgctcgcgggtactgttggacagaactacgagatgcgttacccggggtggatgccagcctctggccaagtctgttcgaacacaagttcctcccatatgccttactggcttttgccgctatcatgtatgttccagccctcggatgggagttccttgcatctacaaggctaactagcgagttgaacttcctgttgcaggaaatcgacaactgctatcatcgcgctgcagagggtagggctccgaaaattgaaaaacagatacagtctaaagggccaggcatcaccgagcgggaaaagcgagaaattatcgagaacgccgagaaagagaaatcccctgaacaaaacctgttcgagaagtatttagagcgccgcggtcgatcgaattttctggcaaagctgtatctggctcgccacgtgctgatattactccttagtgcagttccaattagttacctgtgtacctactatgctacacagaagcagaatgaattcacctgcgctctaggcgccagcccagatggcgccgcgggtgccggccccgcagtgcgggtaagctgcaagctgccttccgtacagttgcagcggattatcgctggcgtcgatattgtcctcctgtgcgttatgaaccttatcattttggtgaatctgattcacctgttcatcttcaggaagtctaactttatctttgataagctgcataaggtgggcatcaagacccgcagacagtggcgtagatcgcaattttgcgatatcaatattctcgccatgttttgtaatgagaatcgcgatcacataaagtctctgaatcgtctggacttcattacgaatgaatctgacctcatgtatgacaatgttgttagacaactcttagctgcactggcccagtccaatcatgatgccacaccgacagtccgggactctggggtgcagacggtcgacccaagcgccaatcccgccgagcccgatggagcggccgagcccccagtcgtgaaaagaccgcgcaaaaagatgaagtggatacccacttctaatccacttccacagccctttaaggagccccttgccatcatgcgtgtggaaaacagcaaagccgagaaacctaagcccgctcgccgcaaaacggcaaccgacacactcatcgcgcccctgctggacaggtctgcccaccactataagggaggcggtggagatcctgggccagggcccgcacccgcccccgcgccccctcctgcccccgataaaaaacatgccagacacttctcactcgatgtgcacccctatatccttggcactaaaaaagcaaaagcagaagctgtccccgccgcacttcccgccagtaggtctcaagagggaggctttttatcacaggcggaagactgtggcttggggttggccccagccccgattaaagatgctccattaccagaaaaggaaataccgtatcctaccgaacccgcgagagccgggttgccaagtgggggccctttccacgtgaggagccctcctgccgcccccgctgtggcgcctctgactcctgctagccttgggaaagccgaaccgcttaccatattgagtagaaacgcgacccatcccctgctgcatatcaataccctgtacgaggctcgagaggaggaagatggaggcccgagactgccgcaggatgtcggagacctcatcgctatccctgccccccagcagatcctcatcgccaccttcgatgagccgaggacagtggtgtctactgtcgagttctag

SEQ ID NO: 229233 - DNA, 1065 bp, Artificial Sequence
  derived and/or modified sequence
atgaacctgatcatcctggtaaaccttattcacctgtttatattcagaaaatcgaacttcattttcgataagctgcacaaagtaggcattaagacccgacggcagtggaggcgtagccagttttgtgatatcaacattctggccatgttttgcaatgagaacagagaccacattaaaagcctcaatagactagatttcattaccaacgagtccgatttaatgtacgacaacgtagtgcgacagctactagcagctctagctcagagtaaccatgatgccacccccaccgtgcgggattccggcgtgcagacagttgacccatccgcgaatccggctgagccggacggagcggctgaaccgcctgtagttaagcggccacgcaagaaaatgaagtggattcctaccagcaatccattgcctcagcccttcaaggagcctttggccataatgcgagtggagaattccaaggccgagaagcctaagcctgccaggcgcaaaacggctacagacactctcattgccccgttgcttgatcgatccgcgcccgacaaaaagcacgctcgacattttagcctcgatgtccatccctacatcctcggtactaaaaaagccaaagctgaagccgtgccagctgctctgcctgccagccgctcacaggaaggcggattcctttcccaggccgaagactgcggtctggggctcgccccggcaccaatcaaagatgcacctctgccagagaaggagataccgtaccccacagaacccgcacgcgccggccttcctagtggaggccctttccacgtccgctccccccccgctgctcccgccgtcgcccctttgacaccagcgagcctaggtaaggcggagcccctcaccatcctgagcaggaacgccactcaccctctgctgcatattaacactctgtacgaggcacgcgaggaagaagacggcggaccaaggctgccgcaggacgttggcgacttgattgcaattccagccccacagcagattctgattgcaactttcgatgaaccccggaccgtcgtctctactgtggagttctag

SEQ ID NO: 229234 - DNA, 2034 bp, Artificial Sequence
  derived and/or modified sequence
atgcaccacctgctggagcagagcgctgacatggccacagccctgctggccggggagaagctgcgggagctgatcctgcccggggcccaggatgacaaggccggggccctggccgccctgctgctgcagctgaagctggagctgccctttgacagagtggtgaccatcggcaccgtgctggtgcccatcctgctggtgaccctggtgttcaccaagaactttgctgaggagcccatctactgctacaccccccacaacttcacccgggaccaggccctgtatgcccggggctactgctggacagagctgagagatgccctgcccggggtggatgccagcctgtggcccagcctgtttgagcacaagttcctgccctatgccctgctggcctttgctgccatcatgtatgtgcctgccctgggctgggagttcctggccagcacccggctgaccagcgagctgaacttcctgctgcaggagattgacaactgctaccacagagctgctgagggccgggcccccaagattgagaagcagatccagagcaaaggacctggcatcacagagcgggagaagcgggagatcattgaaaatgctgagaaggagaagagccctgagcagaacctgtttgagaagtacctggagcggcggggccgcagcaacttcctggccaagctgtacctggcccggcacgtgctgatcctgctgctgtctgctgtgcccatctcctacctgtgcacctactatgccacccagaagcagaatgagttcacctgtgccctgggcgccagcccagatggagctgctggagctggccctgctgtgcgggtgtcctgcaagctgcccagcgtgcagctgcagaggatcatcgccggcgtggacatcgtgctgctgtgtgtgatgaacctgatcatcctggtgaacctgatccacctgttcatcttcaggaagagcaacttcatctttgacaagctgcacaaggtgggcatcaagacccggcggcagtggaggaggagccagttctgtgacatcaacatcctggccatgttctgcaatgaaaatagagaccacatcaagagcctgaaccggctggacttcatcaccaatgaaagtgacctgatgtatgacaacgtggtgcggcagctgctggccgccctggcccagagcaaccatgatgccacccccaccgtgcgggacagcggcgtgcagacagtggaccccagcgccaacccagctgagccagatggagctgctgagccccctgtggtgaagaggcccaggaagaagatgaagtggatccccaccagcaaccccctgccccagcccttcaaggagcccctggccatcatgagggtggagaacagcaaggccgagaagcccaagccagcccggaggaagacagccacagacaccctgattgcccccctgctggacagaagtgcccaccactacaagggcggcggcggggaccccggccctggccctgccccagccccagcccctcctccagccccagacaagaagcacgcccggcacttcagcctggatgtgcacccctacatcctgggcaccaagaaggccaaggccgaggccgtgcctgctgccctgcctgccagccgcagccaggagggcggcttcctgagccaggccgaggactgtggcctgggcctggccccagcccccatcaaggatgcccccctgcctgagaaggagatcccctaccccacagagcccgcccgggccggcctgcccagcggcggccccttccacgtgcgcagccccccagctgccccagctgtggcccccctgaccccagccagcctgggcaaggccgagcccctgaccatcctgagcagaaatgccacccaccccctgctgcacatcaacaccctgtatgaggcccgggaggaggaggatggcggcccccggctgccccaggatgtgggggacctgattgccatcccagccccccagcagatcctgattgccacctttgatgagcccaggacagtggtgtccacagtggagttctag

SEQ ID NO: 229235 - DNA, 1065 bp, Artificial Sequence
  derived and/or modified sequence
atgaacctgatcatcctggtgaacctgatccacctgttcatcttcaggaagagcaacttcatctttgacaagctgcacaaggtgggcatcaagacccggcggcagtggaggaggagccagttctgtgacatcaacatcctggccatgttctgcaatgaaaatagagaccacatcaagagcctgaaccggctggacttcatcaccaatgaaagtgacctgatgtatgacaacgtggtgcggcagctgctggccgccctggcccagagcaaccatgatgccacccccaccgtgcgggacagcggcgtgcagacagtggaccccagcgccaacccagctgagccagatggagctgctgagccccctgtggtgaagaggcccaggaagaagatgaagtggatccccaccagcaaccccctgccccagcccttcaaggagcccctggccatcatgagggtggagaacagcaaggccgagaagcccaagccagcccggaggaagacagccacagacaccctgattgcccccctgctggacagaagtgccccagacaagaagcacgcccggcacttcagcctggatgtgcacccctacatcctgggcaccaagaaggccaaggccgaggccgtgcctgctgccctgcctgccagccgcagccaggagggcggcttcctgagccaggccgaggactgtggcctgggcctggccccagcccccatcaaggatgcccccctgcctgagaaggagatcccctaccccacagagcccgcccgggccggcctgcccagcggcggccccttccacgtgcgcagccccccagctgccccagctgtggcccccctgaccccagccagcctgggcaaggccgagcccctgaccatcctgagcagaaatgccacccaccccctgctgcacatcaacaccctgtatgaggcccgggaggaggaggatggcggcccccggctgccccaggatgtgggggacctgattgccatcccagccccccagcagatcctgattgccacctttgatgagcccaggacagtggtgtccacagtggagttctag

SEQ ID NO: 229236 - DNA, 2034 bp, Artificial Sequence
  derived and/or modified sequence
atgcaccacctgctggagcagagcgccgacatggccaccgccctgctcgccggcgaaaagctaagggagttaatcttgcccggggctcaggatgacaaggccggagcgctggccgctcttttacttcaattgaaactcgagttgccattcgacagggtcgtgaccattggaactgtcttggttcctattttactcgtgacactggtttttacaaaaaatttcgcagaggagcccatttactgctacacccctcacaactttaccagagaccaggcgttgtacgcacgcggctattgctggacagagctgcgggacgcgcttcccggcgtcgatgcctccttgtggccatcactgtttgagcacaagttcctgccatacgccctcctggcgtttgcagctattatgtatgtgcccgcgctgggttgggaattcctggcttctacccggctcaccagtgaactaaatttcctgttgcaggaaattgacaactgctaccatcgcgccgcagaaggcagagccccgaagatagaaaaacaaatccagtccaaaggaccaggaatcaccgagagagagaagagagaaattatagagaatgctgagaaagaaaaatctccagaacagaacctgttcgaaaagtacctagagcgtcgcggaaggtctaactttctcgctaagctgtatctcgcccgacacgtacttatcctcctgctgagtgccgttcctatttcctatttatgtacttactatgctacacaaaaacaaaacgagttcacatgcgccctgggtgcatctccagatggagcggctggagcaggccctgccgttcgggtgtcatgcaaactcccgagtgtgcaattgcagcggatcatcgctggggtggatattgttttgctctgcgtgatgaacttaattatcttagtcaacttgatccatttgttcatcttcaggaaaagcaattttatctttgacaaattgcacaaagtgggaatcaaaacaagacgacagtggaggaggtcccagttctgtgatatcaatattctggccatgttttgcaacgagaacagggaccatatcaaatctctgaatcgtctggactttattactaatgagtccgatttgatgtatgacaatgtggtgagacagctcctggcggccttggcccagagcaaccacgacgcgacaccaacagtgagggatagtggagtgcagaccgtagacccatctgcgaaccccgctgagcccgatggtgcagcagagcccccggttgtcaaacgcccaagaaaaaaaatgaaatggattcccacctccaacccacttccacagcctttcaaagaacctctagccatcatgcgtgtggagaattcaaaggctgagaagccgaagcccgcccgcaggaagaccgcaactgacactcttattgctccacttctggaccgaagtgcccaccactataaaggcggcggcggagatcccggccccggtcccgcgcccgcaccagcccccccccctgccccggacaaaaaacatgcacgccactttagtctcgacgtccatccttatatcttgggtacaaagaaagcgaaggcagaggctgtgccggcggcactgccggcaagtaggtcccaggaaggcgggtttcttagccaggccgaggattgtggccttgggcttgcgccagcgcccatcaaggacgcccctctgcctgagaaagagattccttatccaacagagccggccagagctggcctgcccagtggagggcccttccacgttcggtctccaccagcagccccggccgtggctccattaacgccggcctctttaggcaaagctgagccattaaccatcctgtctcggaatgccacccatcccctactccacatcaacaccctgtatgaagcccgtgaagaggaggacggggggcctcgcctgcctcaggatgtgggggatctcatcgccattcccgcaccacagcaaattctaattgccactttcgacgaaccgcgtaccgtggtgtcaactgtagaattctag

SEQ ID NO: 229237 - DNA, 1065 bp, Artificial Sequence
  derived and/or modified sequence
atgaacctgatcatcctggtgaacctgatccacctgttcatcttccggaagtccaacttcatttttgataagctgcataaggtcgggatcaaaactcgcaggcagtggagacggtcacaattttgtgacatcaatatcctggcaatgttttgcaacgaaaaccgggaccatattaagtctctaaacaggttggactttatcacaaacgaatcagatctgatgtacgacaacgttgtgagacagctcctggcagctctggcacagtctaaccacgacgcaacccctaccgttagagactctggcgtgcagaccgttgatccatccgccaacccggccgaacctgacggggcagcagaaccgccggtcgtgaagaggccacgtaagaagatgaaatggatccctacatccaatccattgcctcaaccttttaaggaaccactggcgattatgcgagttgagaatagcaaagcagagaaacctaaaccagcacgccgcaagactgccacagacacactcatcgcaccactcctggaccggagcgctcccgataaaaaacacgctagacacttctccctagacgtacacccttacatcctagggactaaaaaggcaaaggccgaggctgtgcctgccgcactcccagctagcagatcccaggagggtggctttctgagccaggcggaggattgcggactgggcttagcccccgccccaattaaagacgcgcccctacccgaaaaagagataccttatcctactgaacccgcccgggccggcctcccatctggggggccctttcacgtaagaagtccaccagcagcaccagctgttgctccacttacgccagcaagtctggggaaggccgaacctctgaccattctgagccgtaacgcaacccatcctttactacatatcaacaccttatatgaggctagggaggaggaagacggaggaccaagactgcctcaagacgttggggatctgatagcaatacccgcaccacagcagatcttaatcgctacgttcgatgagccaagaacggtggtctctactgtggaattttag

SEQ ID NO: 229238 - DNA, 3051 bp, Artificial Sequence
  derived and/or modified sequence
atgcaccacctcctggagcagtcggcggacatggcgaccgcgctgctggcgggagagaagctgcgggagctgatcctgccgggcgcgcaggacgacaaggcgggcgcgctggccgcgctgcttctgcagctgaagctggagctgccgttcgaccgggtggtcaccatcggcaccgtgctggtgcccatcctgctggtcaccctggtcttcaccaagaacttcgcagaggaacccatttactgttacaccccgcacaacttcacgcgcgaccaggcgctgtacgcccgcggctactgctggacggagctgcgggacgcgctgcccggcgtggacgccagcctgtggccgtcgctgtttgagcacaagttcctgccctacgcgctgctggccttcgccgccatcatgtacgtgcccgcgctgggctgggagttcctggcctccacgcgcctcacctccgagctcaacttcctgctgcaggagatcgacaactgttaccaccgggcggccgagggccgcgcgcccaagatcgagaagcagatccagtccaagggcccgggcatcacggagcgcgagaagcgcgagatcatcgagaacgcggagaaggagaagagcccggagcagaacctgttcgagaagtacctggagcgccgcggccgcagcaacttcctggccaagctgtacctggcgcggcacgtgctgatcctgctgctgagcgccgtgcccatctcctacctgtgcacctactacgccacgcagaagcagaacgagttcacctgcgcgctgggcgcgtccccggacggggcggcaggtgcggggcccgcggtgcgcgtgagctgcaagctcccgtccgtgcaactgcagcgcatcatcgcgggcgtggacatcgtgctgctgtgcgtcatgaacctcatcatcctcgtcaacctcatccacctcttcatcttccgcaagagcaacttcatcttcgacaagctgcacaaggtgggcatcaagacgcgccggcagtggcgccgctcgcagttctgcgacatcaacatcctggccatgttctgcaacgagaaccgcgaccacatcaagtcgctcaaccggctggacttcatcaccaacgagagcgacctcatgtacgacaacgtggtccggcagctgctggcggcgctggcgcagtccaaccacgacgccacccccacggtgcgcgactcgggggtgcagaccgtggaccccagcgccaaccccgccgagcccgacggcgccgccgagccgcccgtggtcaagcggccgcgcaagaagatgaagtggatccccaccagcaacccgcttccgcagcccttcaaggagccgctggccatcatgcgcgtggagaacagcaaggcggagaagccgaagcccgcgcgcaggaagacggccacggacacgctgatcgcgccgctgctggaccgctccgcccaccactacaagggcggagggggcgacccgggccccggccccgcccctgcccccgccccgccgcccgcccctgacaagaagcacgcgcgccacttctccctggacgtgcacccctacatcctcggcaccaagaaggccaaggccgaggcggtgcccgccgccctgcccgcctcccggagccaggaggggggcttcctgtcccaggcggaggactgtgggctaggcctggccccggcgcccatcaaagatgctccgctccccgagaaggaaatcccgtaccccacagagccagcccgggcagggcttccctcggggggcccgttccacgtccgctcacctcccgccgcccctgctgtggcccctctgacaccagccagcctgggcaaggcggagcccctcaccatcctgagccgaaacgccacacacccgctgctgcacatcaacacgctgtacgaggcccgggaggaggaggacgggggcccccgcctgccgcaggacgtgggggacctcatcgccatccctgccccacagcagatcctcatcgccaccttcgacgagccgagaacggtcgtgagtactgtggagttttgagggatggcaccgtccaggccgccgagagcccctctgcctgtgtcgtgtggcctggccagcctcccggtggacaccagccctgcgtggacgtggcctgtgcttcgcccgcactgcgcgcatccccaacctctgtccgcatgcctggggccttcgcccccacgtgctcgacaggggaacccgcccggacggcatcgccaggcactggctggggtggggaaaggtggcccagtggagccggtggccaggaaggctgaagcccgcttcccatgctcctgcatcaggtgcccagccgtgggtgggggccctgaggtgaagagtttatttttttagtccgtttcgtcctggccccgggctgtggcgagacagcccaactcccccagcccagctcccccagcccagagccagggaagaggaaggtggggccagtcccaccagtggggtggccacgcccatggggtcacatgctcaggggtcaccccctgcagggacctgatgccctcgggtgggagggaccgaggtccaccctcgggtcaaaggtcaacgtgcactttctccttgtcgcctgacagacattttattttactaagactgctgtaccgaacaagcatatttatcatcaggagacaggatgggtttaaagcaggatggtgtgtgtgtgaacgggcatgagcagaggtgagcgtgagcgagcgggtgtgtatgtacgagtgtgcacgtgtgtgcgtgtgcacagagggtgtggtgccagcttgagtgggagtgtgtgagtgtgagcaggcgggcgagtgcgtgagtgcacgccagcgcgtggcccatgtatgaggagtgaaggggcccaacgcaataaccacgtcccccacccgggccccccgccgcggctgaggccacatggcttcctgtgggagccccggccggcacccggctggtcccaccccaaatacctcagccatggagaccatgtcatgcagaattaacaaggtagcaccgagcatatcaataaatattattctgataatc

SEQ ID NO: 229239 - DNA, 2239 bp, Artificial Sequence
  derived and/or modified sequence
atggcgaccgcgctgctggcgggagagaagctgcgggagctgatcctgccgggcgcgcaggacgacaaggcgggcgcgctggccgcgctgcttctgcagctgaagctggagctgccgttcgaccgggtggtcaccatcggcaccgtgctggtgcccatcctgctggtcaccctggtcttcaccaagaacttcgcagggtggacgctcttctctggctcctgggattggctgtgaggacaaaacataaaggaacccatttactgttacaccccgcacaacttcacgcgcgaccaggcgctgtacgcccgcggctactgctggacggagctgcgggacgcgctgcccggcgtggacgccagcctgtggccgtcgctgtttgagcacaagttcctgccctacgcgctgctggccttcgccgccatcatgagatcgacaactgttaccaccgggcggccgagggccgcgcgcccaagatcgagaagcagatccagtccaagggcccgggcatcacggagcgcgagaagcgcgagatcatcgagaacgcggagaaggagaagagcccggagcagaacctgttcgagaagtacctggagcgccgcggccgcagcaacttcctggccaagctgtacctggcgcggcacgtgctgatcctgctgctgagcgccgtgcccatctcctacctgtgcacctactacgccacgcagaagcagaacgagttcacctgcgcgctgggcgcgtccccggacggggcggcaggtgcggggcccgcggtgcgcgtgagctgcaagctcccgtccgtgcaactgcagcgcatcatcgcgggcgtggacatcgtgctgctgtgcgtcatgaacctcatcatcctcgtcaacctcatccacctcttcatcttccgcaagagcaacttcatcttcgacaagctgcacaaggtgggcatcaagacgcgccggcagtggcgccgctcgcagttctgcgacatcaacatcctggccatgttctgcaacgagaaccgcgaccacatcaagtcgctcaaccggctggacttcatcaccaacgagagcgacctcatgtacgacaacgtggtccggcagctgctggcggcgctggcgcagtccaaccacgacgccacccccacggtgcgcgactcgggggtgcagaccgtggaccccagcgccaaccccgccgagcccgacggcgccgccgagccgcccgtggtcaagcggccgcgcaagaagatgaagtggatccccaccagcaacccgcttccgcagcccttcaaggagccgctggccatcatgcgcgtggagaacagcaaggcggagaagccgaagcccgcgcgcaggaagacggccacggacacgctgatcgcgccgctgctggaccgctccgcccctgacaagaagcacgcgcgccacttctccctggacgtgcacccctacatcctcggcaccaagaaggccaaggccgaggcggtgcccgccgccctgcccgcctcccggagccaggaggggggcttcctgtcccaggcggaggactgtgggctaggcctggccccggcgcccatcaaagatgctccgctccccgagaaggaaatcccgtaccccacagagccagcccgggcagggcttccctcggggggcccgttccacgtccgctcacctcccgccgcccctgctgtggcccctctgacaccagccagcctgggcaaggcggagcccctcaccatcctgagccgaaacgccacacacccgctgctgcacatcaacacgctgtacgaggcccgggaggaggaggacgggggcccccgcctgccgcaggacgtgggggacctcatcgccatccctgccccacagcagatcctcatcgccaccttcgacgagccgagaacggtcgtgagtactgtggagttttgagggatggcaccgtccaggccgccgagagcccctctgcctgtgtcgtgtggcctggccagcctcccggtggacaccagccctgcgtggacgtggcctgtgcttcgcccgcactgcgcgcatccccaacctctgtccgcatgcctggggccttcgcccccacgtgctcgacaggggaacccgcccggacggcatcgccaggcactggctggggtggggaaaggtggcccagtggagccggtggccaggaaggctgaagcccgcttcccatgctcctgcatcaggtgcccagccgtgggtgggggccctgaggtgaagagtttattttt

SEQ ID NO: 229240 - DNA, 2034 bp, Artificial Sequence
  derived and/or modified sequence
atgcatcacttactggagcagtcagctgatatggctaccgccctgctggctggcgagaagctacgtgaattaatactgcccggagcgcaggatgataaagcaggcgcactggctgccctactgcttcagctcaaactagagctgcctttcgatagagtggtgactatcggcacagtcctggttccaatactgctcgttactctggtctttacgaagaactttgccgaggagcctatatactgctacacaccacataatttcacccgtgatcaggccctctacgccagaggttattgttggactgaactcagagatgcgttgccaggggtggacgcctcactttggccttcgctatttgaacacaaatttctgccatacgcacttctcgcgtttgctgcgattatgtatgttcccgctctgggctgggagttccttgcctcaacccgcctcaccagcgaactgaatttcttgctccaggaaatcgataattgctaccatcgtgcggcagaaggaagagcccctaagatcgaaaaacagattcaatcaaagggtcctggaataactgaacgagaaaagcgagaaatcatagagaacgccgaaaaggagaagagtccagaacagaaccttttcgagaaatacttggagcgcagagggcgtagcaacttccttgccaagctctaccttgccagacacgtgttaatcctgctgctttctgccgtacctatttcctacctctgcacatattatgccacccaaaagcagaacgaatttacctgtgctttaggtgccagcccagacggagccgctggagctgggcctgcagtgcgggtttcatgcaagctccctagcgtgcagttgcagagaatcatagcaggggtggacatcgttctcctctgcgttatgaacctcataattcttgttaacctgatccatttattcatcttccggaaaagcaattttatttttgacaaactgcacaaggtcggaatcaagactcggagacaatggaggagatctcaattctgcgacattaacatcctcgccatgttctgcaacgagaatagagaccacatcaaatccttgaatagactggacttcatcactaatgagtcggacctgatgtatgacaacgtagtgagacagctcctcgcggcactcgctcagagcaatcacgacgccacacccacagtacgggattctggtgtgcagacagtggacccctctgccaatcccgcagaacccgacggcgctgccgagcccccagtggtgaaacggcctcggaaaaaaatgaaatggattcccaccagcaacccgctgccacagccatttaaggagccattagccatcatgcgggtggaaaattccaaagctgagaagcctaaacctgcacggaggaagaccgcgacagataccttgattgccccactcctcgacaggagcgctcaccactataaaggcggagggggtgacccaggccctggtccagcccctgcacccgcacctccacccgctcccgataaaaagcacgcccgacattttagcttggacgtgcacccctacattctgggcaccaagaaagccaaagctgaagcggtgcccgctgccttgccagctagtaggagccaagaaggcggtttcttgtctcaagcggaggactgcgggctcgggctggcacccgcaccgatcaaggacgcgccactccccgaaaaggagattccctatcccactgaacccgctcgagcaggtctgccatccggtggaccgtttcatgtgcggtcaccaccagctgctcccgctgtggcccctctgactccagcctccttgggcaaagctgagccactgacaattctgtcccggaatgcaacccaccctcttctgcacatcaacacactgtacgaagcccgtgaggaagaggatggaggcccaaggttgcctcaagacgtgggagatcttatagcgatcccggcacctcaacaaatcctgatagccacttttgatgagcctagaacagtggtgtcgaccgtcgaattctag

SEQ ID NO: 229241 - DNA, 1065 bp, Artificial Sequence
  derived and/or modified sequence
atgaatctaattatccttgttaacttgattcaccttttcatatttaggaagagcaactttatatttgataagcttcacaaagtgggtatcaaaacccgtcggcagtggagaagatcgcagttctgcgatataaacatccttgccatgttctgtaatgagaaccgcgatcacattaagtccttgaatcggctggacttcattaccaatgaaagcgatttaatgtacgataacgttgtgcgccaactcctggccgcacttgcccaatccaaccacgatgccactccgaccgtgcgagattcaggcgttcaaacggttgacccaagcgccaaccctgccgaaccagatggtgccgctgaaccgcctgtcgtgaaacggccacgcaagaagatgaagtggatccctacctccaatccacttccccagcctttcaaagagccacttgccattatgagggtcgagaacagcaaagccgagaagcccaagcccgcacggcgaaaaaccgccaccgacacacttattgcccctctactggaccgctccgccccagacaaaaagcacgcaaggcatttctcactggacgtacacccctacattctcggcactaaaaaagctaaagccgaagcagttcccgctgcgcttcctgccagccgtagccaggagggtggtttcctgtctcaggcagaggattgtggactggggctggcccctgctcctataaaggacgctccactgccagagaaagagattccttacccgaccgaacccgctcgggcaggactcccgagcggaggacccttccatgtcagaagcccacccgctgcccctgctgtggccccactcacccccgcatccctgggaaaggcagagcctctcactattctgtctcgaaacgccacacatcccctgttacacatcaatacattgtatgaggccagagaagaagaggatggcggacccagattaccacaggatgtcggcgatcttattgcaattccagctcctcagcagattctgattgcgacgttcgatgagcccaggaccgtggtgtccactgtggaattctag

SEQ ID NO: 229242 - protein, 481 aa, Artificial Sequence
  derived and/or modified sequence
MAAAPGGSAQPAGPGPRLGFSTADSGVGMSGLNPGPAVPMKDHDAIKLFVGQIPRGLDEQDLKPLFEEFGRIYELTVLKDRLTGLHKGCAFLTYCARDSALKAQSALHEQKTLPGMNRPIQVKPAASEGRGEDRKLFVGMLGKQQGEEDVRRLFQPFGHIEECTVLRSPDGTSKGCAFVKFGSQGEAQAAIRGLHGSRTMAGASSSLVVKLADTDRERALRRMQQMAGHLGAFHPAPLPLGACGAYTTAILQHQAALLAAAQGPGLGPVAAVAAQMQHVAAFSLVAAPLLPAAAANSPPGSGPGTLPGLPAPIGVNGFGPLTPQTNGQPGSDTLYNNGLSPYPAQSPGVADPLQQAYAGMHHYAAAYPSAYAPVSTAFPQQPSALPQQQREGPEGCNLFIYHLPQEFGDAELIQTFLPFGAVVSAKVFVDRATNQSKCFGFVSFDNPTSAQTAIQAMNGFQIGMKRLKVQLKRPKDANRPY

SEQ ID NO: 229243 - protein, 368 aa, Artificial Sequence
  derived and/or modified sequence
MISDPPSNNSWNSVLYLLEDRKLFVGMLGKQQGEEDVRRLFQPFGHIEECTVLRSPDGTSKGCAFVKFGSQGEAQAAIRGLHGSRTMAGASSSLVVKLADTDRERALRRMQQMAGHLGAFHPAPLPLGACGAYTTAILQHQAALLAAAQGPGLGPVAAVAAQMQHVAAFSLVAAPLLPAAAANSPPGSGPGTLPGLPAPIGVNGFGPLTPQTNGQPGSDTLYNNGLSPYPAQSPGVADPLQQAYAGMHHYAAAYPSAYAPVSTAFPQQPSALPQQQREGPEGCNLFIYHLPQEFGDAELIQTFLPFGAVVSAKVFVDRATNQSKCFGFVSFDNPTSAQTAIQAMNGFQIGMKRLKVQLKRPKDANRPY

SEQ ID NO: 229244 - protein, 342 aa, Artificial Sequence
  derived and/or modified sequence
MLGKQQGEEDVRRLFQPFGHIEECTVLRSPDGTSKGCAFVKFGSQGEAQAAIRGLHGSRTMAGASSSLVVKLADTDRERALRRMQQMAGHLGAFHPAPLPLGACGAYTTAILQHQAALLAAAQGPGLGPVAAVAAQMQHVAAFSLVAAPLLPAAAANSPPGSGPGTLPGLPAPIGVNGFGPLTPQTNGQPGSDTLYNNGLSPYPAQSPGVADPLQQAYAGMHHYAAAYPSAYAPVSTAFPQQPSALPQQQREGPEGCNLFIYHLPQEFGDAELIQTFLPFGAVVSAKVFVDRATNQSKCFGFVSFDNPTSAQTAIQAMNGFQIGMKRLKVQLKRPKDANRPY

SEQ ID NO: 229245 - DNA, 1446 bp, Artificial Sequence
  derived and/or modified sequence
atggcagcggccccaggtgggtctgcccagccagctggccccggaccgcgccttggattctctacagccgacagcggtgtaggtatgagcgggttgaatccagggcctgccgtccctatgaaggatcacgatgcaattaagttgtttgtcggtcagatacctcgcggccttgatgaacaggatttgaagcccctgttcgaagagtttgggagaatctacgagcttaccgtgctgaaggaccgacttacgggcctacacaagggctgtgcatttcttacgtactgtgcccgagactctgccctcaaagcccaaagcgcactccatgagcagaagaccctgcccgggatgaaccggcctatccaggtcaaaccagctgcctccgagggtcggggcgaagacagaaagctctttgtgggaatgctgggaaaacaacaaggcgaggaggacgtgagaaggctatttcagccattcggacatatagaagagtgcaccgtgcttcgatctcctgatggcacctcgaaggggtgtgcctttgtaaaatttggctcccaaggagaggcgcaggccgcaatcagaggcctccacgggtcacgaactatggccggagcctctagtagcttggtggtcaagctggctgacactgatagggagcgggcactcaggcggatgcagcagatggccggtcacctgggtgccttccatcccgccccactgccgctgggggcgtgcggggcgtacacaaccgctattctccaacatcaggctgcactgctcgcagccgcccaaggccccgggctgggtcccgtggccgctgttgccgcccagatgcagcatgtcgccgcattcagcctcgtggctgccccactacttcccgccgccgcagctaattctccccccggaagtgggcctggcacactgccgggactcccggcgcctattggtgtgaatggattcggccctctgacaccacagactaacggccagcccggatccgatacactgtacaacaatgggctgtcaccctaccctgcccagtctccaggtgtggccgatccccttcagcaggcttacgccgggatgcatcattacgctgctgcttatccctccgcctacgctcctgtttcaaccgcatttccacagcagccttctgctctaccgcagcaacagcgcgagggtccagagggatgtaacctgtttatttaccatctgcctcaggaatttggggacgccgaattgattcagacatttctgccttttggtgccgtggtgtcggctaaggtgtttgtggaccgcgccacgaatcagtctaagtgcttcgggtttgtgtcatttgataatcccacctctgcccagacggcaattcaagccatgaacgggttccaaattggcatgaagagattaaaggttcaactgaagaggcctaaagacgccaacaggccctattag

SEQ ID NO: 229246 - DNA, 1107 bp, Artificial Sequence
  derived and/or modified sequence
atgatctcggatcctccttccaataactcttggaatagcgtgctctacctgctggaagacaggaagctgttcgtgggcatgctaggcaagcagcagggcgaagaggacgtgagaaggctctttcaaccctttgggcatatagaggagtgcactgtgctaagaagccctgatggcacctccaaaggatgtgcctttgtgaagttcggttcccagggggaagcacaggcggccattagaggtctgcacggtagcagaacaatggcgggcgcatcttcctctctcgtggtcaaactggccgacactgaccgagagagagccctcaggagaatgcaacagatggctggacatctcggggcatttcaccccgcgccactgcccctgggagcctgtggggcttacactacagccatccttcagcaccaggctgccctcttggcagctgcacagggaccaggattaggcccagttgcagccgtagctgcacagatgcagcatgttgctgcctttagtttggtcgctgccccgctgcttcccgctgcagcagcaaattccccgccgggaagtggtcccggcacactccccggccttccagctccaattggcgtcaacggttttgggccccttacgccacagaccaacggacagccaggcagcgacacactctataacaacgggctgtcgccttatcccgcacaatccccgggcgtggcagatcccctgcaacaggcgtatgctgggatgcaccactacgccgccgcgtacccatccgcttatgcaccggtttctaccgccttcccccagcagcccagcgccctcccccaacagcagcgcgaggggcccgaggggtgcaacttattcatctatcacctcccccaggaattcggcgatgctgaactaattcagacctttctgcctttcggtgcggtcgtctcggccaaagtgttcgttgatcgtgcaactaatcagtccaagtgttttggctttgtgtcatttgataaccccaccagtgctcagaccgctatacaggcaatgaatggatttcagattgggatgaagagactcaaggtgcagttaaagaggcctaaggatgccaacaggccatattag

SEQ ID NO: 229247 - DNA, 1029 bp, Artificial Sequence
  derived and/or modified sequence
atgctaggaaagcagcagggtgaagaggacgtgagaaggctctttcagccattcgggcacattgaagaatgcactgtgttacgctcacccgacggaacatccaaaggatgcgcttttgtgaagtttgggagccagggcgaagcgcaggctgccatcagaggactgcacgggtcacggacaatggccggcgcctcatcatcattggtcgtcaaactggccgacactgatcgggagagagccctccggaggatgcagcagatggctggccacctgggggccttccaccccgcccctttgccacttggagcatgcggggcttatactacagccattctccagcaccaggctgcactgctggctgcagcccagggcccaggactgggccctgtggccgccgttgccgcacagatgcagcatgtggctgcttttagcctggttgctgcaccattgctgccagctgccgccgccaattccccaccgggatcaggaccagggactctcccgggcttgccggctcccattggggtcaacggctttggacccctcacaccacaaactaacggccaaccaggaagtgacacactctacaacaacgggctgtctccatacccggctcaatcccctggagtcgctgaccctcttcaacaggcgtacgcagggatgcaccactatgccgcagcctatccaagcgcatacgccccagtatctacggcatttcctcagcagccctctgctctgccgcaacagcagcgggaaggcccggagggctgtaacctgttcatctatcatttaccccaggaatttggcgatgccgagctcatccaaacgttcctgccctttggcgccgtggtgtcagccaaagtgttcgttgatcgtgcgaccaaccagagcaaatgctttgggttcgtatcatttgataaccccacctcagcacagaccgctattcaggccatgaacggatttcaaattgggatgaaacgcctaaaggtgcagctgaaaagacccaaggacgcgaacaggccctattag

SEQ ID NO: 229248 - DNA, 1446 bp, Artificial Sequence
  derived and/or modified sequence
atggctgctgcccctgggggcagcgcccagcctgctggccctggcccccggctgggcttcagcacagctgacagcggcgtgggcatgagcggcctgaaccctggccctgctgtgcccatgaaggaccatgatgccatcaagctgtttgtgggccagatcccccggggcctggatgagcaggacctgaagcccctgtttgaggagtttggccgcatctatgagctgactgtgctgaaggaccggctgaccggcctgcacaagggctgtgccttcctgacctactgtgcccgggacagcgccctgaaggcccagagcgccctgcacgagcagaagaccctgcccggcatgaaccggcccatccaggtgaagccagctgccagcgagggccgcggggaggacaggaagctgtttgtgggcatgctgggcaagcagcagggcgaggaggatgtgagaagactcttccagcccttcggccacatcgaggagtgcaccgtgctgcggagcccagatggcaccagcaagggctgtgcctttgtgaagtttggcagccagggcgaggcccaggccgccatccggggcctgcacggcagcaggaccatggccggggccagcagcagcctggtggtgaagctggccgacacagaccgggagcgggccctgcggaggatgcagcagatggccggccacctgggcgccttccacccagcccccctgcccctgggcgcctgtggggcctacaccacagccatcctgcagcaccaggccgccctgctggccgccgcccagggccctggcctgggccctgtggccgctgtggccgcccagatgcagcacgtggccgccttcagcctggtggccgcccccctgctgcctgctgctgctgccaacagccccccaggcagcggccctggcaccctgcccggcctgcctgcccccatcggcgtgaatggcttcggccccctgaccccccagaccaacggccagcccggcagtgacaccctgtacaacaacggcctgagcccctacccagcccagagccctggggtggccgaccccctgcagcaggcctatgccggcatgcaccactacgccgccgcctaccccagcgcctatgcccctgtgtccacagccttcccccagcagcccagcgccctgccccagcagcagcgggagggccctgagggctgcaacctcttcatctaccacctgccccaggagtttggagatgctgagctgatccagaccttcctgccctttggagctgtggtgtctgccaaggtgtttgtggaccgggccaccaaccagagcaaatgttttggatttgtgtcctttgacaaccccaccagcgcccagacagccatccaggccatgaatggcttccagatcggcatgaagaggctgaaggtgcagctgaagaggcccaaggatgccaaccggccctactag

SEQ ID NO: 229249 - DNA, 1107 bp, Artificial Sequence
  derived and/or modified sequence
atgatcagtgacccccccagcaacaacagctggaacagcgtgctgtacctgctggaggacaggaagctgtttgtgggcatgctgggcaagcagcagggcgaggaggatgtgcggcggctcttccagcccttcggccacattgaagaatgtactgtgctgcggagcccagatggcaccagcaagggctgtgcctttgtgaagtttggcagccagggcgaggcccaggccgccatccggggcctgcacggcagcaggaccatggccggggccagcagcagcctggtggtgaagctggccgacacagaccgggagcgggccctgcggaggatgcagcagatggccggccacctgggcgccttccacccagcccccctgcccctgggcgcctgtggggcctacaccacagccatcctgcagcaccaggccgccctgctggccgccgcccagggccctggcctgggccctgtggccgctgtggccgcccagatgcagcacgtggccgccttcagcctggtggccgcccccctgctgcctgctgctgctgccaacagccccccaggcagcggccctggcaccctgcccggcctgcctgcccccatcggcgtgaatggatttggccccctgaccccccagaccaacggccagcccggcagtgacaccctgtacaacaacggcctgagcccctacccagcccagagccctggggtggccgaccccctgcagcaggcctatgccggcatgcaccactatgctgctgcctaccccagcgcctatgcccctgtgtccacagccttcccccagcagcccagcgccctgccccagcagcagcgggagggccctgagggctgcaacctcttcatctaccacctgccccaggagtttggagatgctgagctgatccagaccttcctgccctttggagctgtggtgtctgccaaggtgtttgtggaccgggccaccaaccagagcaagtgcttcggctttgtgtcctttgacaaccccaccagcgcccagacagccatccaggccatgaatggcttccagatcggcatgaagaggctgaaggtgcagctgaagaggcccaaggatgccaaccggccctactag

SEQ ID NO: 229250 - DNA, 1029 bp, Artificial Sequence
  derived and/or modified sequence
atgctgggcaagcagcagggcgaggaggatgtgcggcggctcttccagcccttcggccacattgaagaatgtactgtgctgcggagcccagatggcaccagcaagggctgtgcctttgtgaagtttggcagccagggcgaggcccaggccgccatccggggcctgcacggcagcaggaccatggccggggccagcagcagcctggtggtgaagctggccgacacagaccgggagcgggccctgcggaggatgcagcagatggccggccacctgggcgccttccacccagcccccctgcccctgggcgcctgtggggcctacaccacagccatcctgcagcaccaggccgccctgctggccgccgcccagggccctggcctgggccctgtggccgctgtggccgcccagatgcagcacgtggccgccttcagcctggtggccgcccccctgctgcctgctgctgctgccaacagccccccaggcagcggccctggcaccctgcccggcctgcctgcccccatcggcgtgaatggatttggccccctgaccccccagaccaacggccagcccggcagtgacaccctgtacaacaacggcctgagcccctacccagcccagagccctggggtggccgaccccctgcagcaggcctatgccggcatgcaccactatgctgctgcctaccccagcgcctatgcccctgtgtccacagccttcccccagcagcccagcgccctgccccagcagcagcgggagggccctgagggctgcaacctcttcatctaccacctgccccaggagtttggagatgctgagctgatccagaccttcctgccctttggagctgtggtgtctgccaaggtgtttgtggaccgggccaccaaccagagcaagtgcttcggctttgtgtcctttgacaaccccaccagcgcccagacagccatccaggccatgaatggcttccagatcggcatgaagaggctgaaggtgcagctgaagaggcccaaggatgccaaccggccctactag

SEQ ID NO: 229251 - DNA, 1446 bp, Artificial Sequence
  derived and/or modified sequence
atggccgccgcccccggcggcagcgcccagcccgccggccccggcccccgcctcgggtttagtacggccgattccggggtgggaatgtccggtctcaatccaggtcccgcagttcctatgaaggaccatgatgccatcaaactttttgtcggtcaaatccctagaggcctcgacgagcaggaccttaaacccctctttgaagagttcgggcgtatctatgaactgaccgtcctgaaggaccggctcaccgggctacataaggggtgcgcattccttacatactgcgccagggatagcgctttgaaagctcagagtgccctccacgagcaaaaaacccttccaggcatgaatcggccaattcaagtgaaacctgctgcctctgaaggccggggcgaagaccgcaagctgttcgtaggcatgttgggaaagcagcagggtgaggaagacgtccgacggctcttccagccattcggacacatagaagagtgcacggtcctccgatctcccgatggtacctcgaagggctgtgcgtttgtcaagttcggaagccagggcgaagctcaagccgcgatcagggggctgcatggttccaggacaatggctggcgcaagtagctcgctagtggtaaagcttgctgatactgacagagaaagggcccttaggaggatgcaacagatggcagggcacttgggggcgtttcaccctgcccctcttcctctgggggcgtgcggcgcctacacaactgctattctgcagcaccaggcagcacttcttgcagccgcccagggccccggcctggggcccgtggccgctgtagcagcgcagatgcagcacgttgcagcattttcactcgtagccgcacccttactccccgccgcggccgccaatagtcctccagggagtggtccaggcacgttgccagggttgcccgccccaattggtgttaacggctttggccctctcacgccccagactaacggccaaccaggctctgacaccctctataacaacggtctctccccttacccggcacaaagtccaggtgtggccgaccccctacagcaggcctacgcaggaatgcatcattatgccgcggcgtatcctagtgcttacgcacctgtgtccaccgccttcccacagcagccctccgccctgcctcagcagcagcgcgagggaccagagggctgtaacctgttcatctaccatctgccgcaggagtttggtgacgcagagttgatccagacattcctcccattcggagcagtggtgagtgctaaggtctttgtggacagggcgaccaaccagtctaaatgctttgggtttgtgtccttcgacaatcctacgagtgcgcagaccgccattcaggcaatgaacggtttccaaatcgggatgaaaaggctgaaggtgcaactgaaacgtccaaaggatgctaatagaccttactag

SEQ ID NO: 229252 - DNA, 1107 bp, Artificial Sequence
  derived and/or modified sequence
atgatcagcgacccccccagcaacaacagctggaacagcgtgctgtacctcctggaagataggaagctcttcgtggggatgctggggaaacagcagggtgaggaggacgtacggagactattccagccctttggacatatagaggagtgcactgttcttagatcaccagacggtacttccaaaggctgcgcctttgtaaagtttggaagccagggcgaggcccaagctgccataagaggcctccatggcagcaggaccatggccggagccagctcatcattggtcgtgaaactcgccgacactgacagggaacgggccctaaggaggatgcagcagatggccggccatctgggagccttccacccagcacctttgccactgggggcctgtggagcttacaccacagccatcctccaacatcaggccgctcttctagcggctgcacagggacctggactcggaccagtagcagccgtggctgcccagatgcaacacgtcgcggcattttccctggtcgcagcccccttactcccggctgccgccgccaactctccgcccggtagtggccctgggacactacccgggctccctgctcctataggggtcaacggctttggacctctcactccgcaaacgaacgggcagccggggtccgataccttatacaacaatggactgagtccttaccctgcacaaagtccaggagtggcggatccgctgcagcaggcttacgcagggatgcaccactacgccgctgcatacccaagtgcctacgcccctgtgtctacagcctttccccagcaaccgtccgcacttcctcaacagcaacgggaaggcccagagggctgtaacttgttcatctaccacctaccacaggaattcggggacgcagagctgatccagacttttctcccattcggggcagtagtaagtgccaaggtattcgtggacagggcaactaaccagtctaaatgctttggcttcgtcagcttcgacaaccccacaagcgcacaaaccgcaatacaggccatgaatggttttcagattgggatgaaacgactgaaagttcagctgaaacgccccaaggacgccaacagaccatactag

SEQ ID NO: 229253 - DNA, 1029 bp, Artificial Sequence
  derived and/or modified sequence
atgctgggcaagcagcagggcgaggaggacgtgcggcggctgttccagccattcggtcacatcgaggagtgcacagtcttgaggagtcctgatgggacctctaaggggtgcgcattcgtgaagttcggaagccagggtgaggctcaggccgccattcgaggattacacggtagcagaaccatggccggtgcctctagcagtttggtggttaagctggccgataccgaccgcgagagagcccttcggcgaatgcagcagatggctggccacctgggcgctttccatccagctcctcttcccctcggggcttgtggcgcctacacgactgcgatcttgcagcaccaagctgccctattggctgcggctcaggggcccggactcggtccagtggccgccgtggccgcccaaatgcagcatgtggctgcattttcactagtggccgcgcccctgctccctgctgccgccgcgaattccccaccgggttccggcccggggactttaccagggcttccagccccaatcggtgtgaatggctttgggcccctgacaccgcagactaatgggcagccgggcagcgacactctgtacaataatggcctcagcccctaccccgctcaaagcccaggtgttgctgatcccctgcaacaggcctacgccggtatgcaccactacgccgccgcttatccatctgcatacgcccccgtgtcaactgccttccctcagcagccctccgctttaccccagcagcagagagaggggccagagggctgtaacctttttatctaccatttaccccaggagttcggcgacgcggaactgattcagacatttctaccttttggagcagtggtctccgctaaggttttcgtggaccgcgcgacaaaccagtctaaatgttttggcttcgtctcctttgataaccccacatctgcccaaacagcgatccaggcgatgaacggattccagattgggatgaagaggttgaaggtgcagcttaagcgtcctaaagacgccaatcggccatactag

SEQ ID NO: 229254 - DNA, 1446 bp, Artificial Sequence
  derived and/or modified sequence
atggctgctgctcccggtggctccgctcaacctgccggtcctggccctcgcctgggctttagtactgctgattccggcgtgggaatgagtgggctaaatccagggccagccgtccctatgaaggatcacgacgccattaaactgtttgtcggacagattccccgaggcttggatgaacaggacttaaagcccttgtttgaggagttcgggagaatctatgaattaaccgtgttgaaggataggctgaccggcctccataaggggtgcgcattccttacctattgcgctagagatagcgccctgaaggcccagagtgcactccatgagcagaaaaccttgccgggtatgaatcgacccatccaggtcaagccggctgcgagcgaggggaggggagaggaccggaaactgttcgttggcatgctgggcaagcagcaaggtgaggaggacgtacgccgattattccaacctttcgggcatattgaagaatgcaccgtgctgcgtagcccagatggtaccagtaagggatgcgcgtttgtgaaatttgggagccagggcgaagctcaggctgctattcgcggactacacgggtcgagaacaatggccggagcaagttcctctttggtggtgaagctcgcagacacagacagagagagagccctgaggaggatgcagcagatggcaggccacctgggggcatttcatcccgctccattaccactcggagcatgtggtgcatacaccactgccatccttcaacaccaggctgccctactcgccgcagcccaggggcctgggttaggccctgtggctgctgtggccgcacagatgcagcacgttgcagccttctccctggtggccgcaccactgttgccagccgctgccgcaaatagcccccctggctccggccctggtaccttgccaggactgcccgctcccatcggggtaaacggtttcggccctctcaccccccagaccaatggccaacccggatccgacaccctttataacaacggactatccccctaccccgctcagtcgcctggcgtggcggacccactgcagcaagcatatgccggtatgcatcattatgccgcagcatatccatctgcatatgcgcctgtcagtaccgcatttcctcagcaaccatctgccctgccccagcagcagcgggagggtcctgagggatgtaatttgtttatctatcacctgccccaggaatttggcgatgccgagctgatacagaccttcttgccttttggggcagtagtatcagccaaggtctttgtcgacagggccacgaaccagtcaaagtgcttcggtttcgtctcttttgacaatccaacaagcgctcaaaccgccatacaggcaatgaatggcttccagattggaatgaaacggctgaaagtgcagctgaagcggccaaaagatgccaaccggccatactag

SEQ ID NO: 229255 - DNA, 1107 bp, Artificial Sequence
  derived and/or modified sequence
atgatctcagatcctcccagcaacaacagttggaactccgttctgtacctgctggaggacaggaaactctttgtggggatgttgggtaaacagcaaggggaggaagacgtccggcgactattccagccattcgggcacattgaagaatgtacggtgttgcgatcccctgacggcacaagcaaaggctgcgcatttgtaaaatttggctctcaaggggaagcacaagcggctattagaggcctgcacgggagccgaacgatggccggagccagcagttcactggttgtgaagctggcagacaccgatcgagagcgggcactaagaaggatgcagcagatggcgggacaccttggcgcattccatcccgcaccacttcccctgggggcttgtggtgcttacactacagcgatcttgcagcatcaggccgctttgctcgcagccgctcagggcccaggactcggccctgtcgccgcagtggctgcacagatgcagcatgttgccgcatttagtctcgtcgctgctccactactgcccgcagcggcagctaacagtccacccggtagtgggcctggcacactgcccggtctgcccgctcccattggtgtgaatggattcgggccacttactccccagactaatgggcagcctgggtcagacaccctgtataataatgggctgtccccatatcccgcacagagccccggagtcgctgatccactccagcaggcatacgcagggatgcaccattatgctgccgcatacccgtcggcctatgccccagtgagcactgcctttccccagcagcctagtgcactcccacagcagcagcgcgaaggacccgaaggatgtaacctgttcatttaccacctcccacaagaatttggggacgcggagctgatccagacattcctaccctttggcgctgtggtctctgctaaggtgtttgtggaccgcgctaccaatcagagcaagtgctttggttttgtgtcctttgacaaccctacgtccgcacagactgcaattcaggctatgaatggctttcaaatcggaatgaaacgactaaaagtgcagctgaaaaggccgaaagatgcaaatcgaccatattag

SEQ ID NO: 229256 - DNA, 1029 bp, Artificial Sequence
  derived and/or modified sequence
atgcttggtaaacagcagggcgaggaggacgtccggagattgtttcaaccattcggacacattgaggagtgtactgtcctgagatcaccagatggcactagtaaagggtgcgcttttgtaaaattcggatctcagggagaggcccaggcagccatccgtggcttgcatggatcccggacaatggcgggtgcttcctccagccttgtcgtcaagcttgccgacactgacagagagagagctctgcgcagaatgcagcagatggcaggccatctgggggcattccacccagcacccttgcccttgggcgcttgtggggcttatactacagccatattacagcatcaagccgcactgctagccgcagctcaaggacccggtctgggtcccgtggcagccgtcgccgctcagatgcagcacgtggccgctttttcactggtggccgcacctctgcttcctgctgctgccgcaaacagtccaccgggatctgggccaggaacacttccgggacttcccgctcccattggcgtgaacggtttcggccctctaaccccccagaccaacggtcagcctggctctgatactctctataacaacggcctctctccatacccagcccagagccccggagtggctgatcccctgcagcaagcctacgcaggtatgcatcactatgcagcggcttaccccagtgcttatgccccagtctctactgcattccctcagcaaccttctgccctcccacagcaacagagggaaggcccagaggggtgcaacttgtttatctaccaccttcctcaggaatttggggacgccgagctgatacagacctttttaccatttggcgcagtggtgtcagcgaaagtatttgtggacagggccacaaatcagtcaaagtgttttggttttgtaagtttcgacaaccctacctccgctcaaactgcaatccaggctatgaatggattccagataggaatgaagagactgaaggtgcagctgaagcggcctaaggatgctaaccgcccatactag

SEQ ID NO: 229257 - DNA, 3345 bp, Artificial Sequence
  derived and/or modified sequence
gcacggggacctcaagccagaccccagcgttcagccgccacctcggcccgggcccgccccgccccggccccgcccctttcctgcccgccccaccccctctacgcccctccacccggaccccgccccctgggcagccccccgccctctccgcccgggctccgccccctccccctggccctcgccaccggtccagggaggggacggcgggacaggcgggaccagtgggaccggcgggagggctgacagggcggggacatggccgcggcgccgggagggtcagcgcagcccgctggccccggcccgcgcctgggtttcagcaccgcggacagcggcgtcggcatgagcgggctaaaccccggtcccgccgtacccatgaaggaccacgacgccatcaagctcttcgtggggcagatcccgcggggcttggacgagcaggacctcaagccgctgttcgaggagttcggccgcatctacgagctgacggtgctgaaggaccggctcaccggcctccacaaaggctgtgccttcctcacctactgcgcccgggactctgctctcaaggcccagagtgcactgcacgagcagaagaccctgccagggatgaatcgtccgatccaagtgaagccagctgccagtgagggccgaggagaggaccgaaagctgtttgtggggatgctgggcaagcagcagggtgaggaggacgtcagacgcctgttccagccctttggccacatcgaggagtgcacggtcctgcggagtcctgacggcaccagtaaaggctgtgcctttgtgaagttcgggagtcaaggggaagctcaggcggccatccggggtctgcacggcagccggaccatggcgggcgcctcgtccagcctcgtggtcaagctggcggacaccgaccgggagcgcgcgctgcggcggatgcagcagatggccggccacctgggcgccttccaccccgcgccactgccgctaggggcctgcggcgcctacaccacggcgatcctgcagcaccaggcggccctgctggcggcggcacagggcccaggcctaggcccggtggcggcagtggcggcccagatgcaacacgtggcggcctttagcctggtagctgcgcctctgttgcccgcggcagcagccaactccccgcctggcagcggccctggcaccctcccaggtcttccggcgcccatcggggtcaatggattcggccctctgaccccccagaccaatggccagccgggctccgacacgctctacaataacgggctctccccttatccagcccagagccccggcgtggctgaccccctgcagcaggcctacgctgggatgcaccactacgcagcagcctatccgtcggcctatgccccagtgagcacagcttttccccagcagccttcagccctgccccagcagcagagagaaggccccgaaggctgtaacctcttcatctatcacctgcctcaggagtttggtgatgcggaactcatacagacattcctgccctttggagccgttgtctctgctaaagtctttgtggatcgagccaccaaccagagcaagtgttttgggtttgttagttttgacaatccaactagtgcccagactgctattcaggcgatgaatggctttcaaattggcatgaagaggctcaaggtccagctaaagcggcccaaggatgccaaccggccttactgacctgctttcactgaccagccacagaaagaaacagaagagtgagaagaaaggagaggaaaagcacagaaacgcttgagcagcccttcccgaaggagcagctgcggacggaggtggatcggacccaaggctggtgcctggggctaaggccactctaaggattgtttttatcaagtgggttgttctgtgcctgcagcatagagcgcaggctggcagagcaaatagggctggtgaggagtgactgtccaggggaaccagcagagggcgttgggggtgccaagggcttctccgcaagggaagcccagatttacttctttcaaaatcatatcattccttagagtttagggaccaaaggactattgcttttttaagaatatatatatctatataaattaaaacaaagaaacaaacaaacaaaaaacaagacaaacaactacaaaaaaagacagtatagagtctcataaaagctgcctttaaatatccctaggagacagggtgaaggagacccttgacagccccagcctaggcagatgggggctgtggaaagattgttctgtgtctcattccctcttaagccactcccccaccctgcccttttaaaaataattaaggatttgaggtctaggctcacatgcaggtaatgagaacgttatggaagcagtgaacccacaatccacaatccccaaactcagagtgcatcccagaagaggccccaggcagagctcaggttggccctggcctttgccatcccgggaggccccctagccagcaagagtgggattgcctttcctgtggaaccactgcttccccaggcgggaagaaagagggagttctggccacctgagcctttcccttgccaatccaggtagacagaggccctgcctttggctgagctgagacacctcctgtttcccttccccttgaaccagtcccagtgtccccttgctccaggctaccttctgtctcttagtctaagtttgcccacctgtaaagtagattcaggatatctgtagagggctgtgacaacagacttggaaggtttgctactgtatatactgccattgagaaggggaaatttttcaatatgtagaagcttcagaattagaggtccctctttaccccagacctgggagggaagtagatgttttgccaaaatacttcttcattcctttaaaaactacatctttcctatgcaagagtgtctcacatgtgcttaaccgaggtgcttctagttggtgagcagtgttgagcttagaagtggtgtgtgctctgtctgtctgtctttgtctgtctgttgtatacagtgggtgccatataaagctgatcaatggtggtgcttcctgcctgcttctgtgagatgggcaaaagattcagcttagaacaccatgactcaccttgccttggtcagcctttcctgggcctgtagggccttgcacatatttttcccaggaggatttcccctccaccccacaggcatggatcagcttggtctgaggccccagctgtgtggggtccctctaatccccagatgttgctgaggctgaaggcctctgatctgataacatgtcagatagtaaaagatgtgggggtgggggtggagggctcctccttcataacagtttctaagaaaacttgttcccacctgtt

SEQ ID NO: 229258 - DNA, 2751 bp, Artificial Sequence
  derived and/or modified sequence
atgatctcagatcccccctcaaacaacagctggaactctgttctctatcttctagaggaccgaaagctgtttgtggggatgctgggcaagcagcagggtgaggaggacgtcagacgcctgttccagccctttggccacatcgaggagtgcacggtcctgcggagtcctgacggcaccagtaaaggctgtgcctttgtgaagttcgggagtcaaggggaagctcaggcggccatccggggtctgcacggcagccggaccatggcgggcgcctcgtccagcctcgtggtcaagctggcggacaccgaccgggagcgcgcgctgcggcggatgcagcagatggccggccacctgggcgccttccaccccgcgccactgccgctaggggcctgcggcgcctacaccacggcgatcctgcagcaccaggcggccctgctggcggcggcacagggcccaggcctaggcccggtggcggcagtggcggcccagatgcaacacgtggcggcctttagcctggtagctgcgcctctgttgcccgcggcagcagccaactccccgcctggcagcggccctggcaccctcccaggtcttccggcgcccatcggggtcaatggattcggccctctgaccccccagaccaatggccagccgggctccgacacgctctacaataacgggctctccccttatccagcccagagccccggcgtggctgaccccctgcagcaggcctacgctgggatgcaccactacgcagcagcctatccgtcggcctatgccccagtgagcacagcttttccccagcagccttcagccctgccccagcagcagagagaaggccccgaaggctgtaacctcttcatctatcacctgcctcaggagtttggtgatgcggaactcatacagacattcctgccctttggagccgttgtctctgctaaagtctttgtggatcgagccaccaaccagagcaagtgttttgggtttgttagttttgacaatccaactagtgcccagactgctattcaggcgatgaatggctttcaaattggcatgaagaggctcaaggtccagctaaagcggcccaaggatgccaaccggccttactgacctgctttcactgaccagccacagaaagaaacagaagagtgagaagaaaggagaggaaaagcacagaaacgcttgagcagcccttcccgaaggagcagctgcggacggaggtggatcggacccaaggctggtgcctggggctaaggccactctaaggattgtttttatcaagtgggttgttctgtgcctgcagcatagagcgcaggctggcagagcaaatagggctggtgaggagtgactgtccaggggaaccagcagagggcgttgggggtgccaagggcttctccgcaagggaagcccagatttacttctttcaaaatcatatcattccttagagtttagggaccaaaggactattgcttttttaagaatatatatatctatataaattaaaacaaagaaacaaacaaacaaaaaacaagacaaacaactacaaaaaaagacagtatagagtctcataaaagctgcctttaaatatccctaggagacagggtgaaggagacccttgacagccccagcctaggcagatgggggctgtggaaagattgttctgtgtctcattccctcttaagccactcccccaccctgcccttttaaaaataattaaggatttgaggtctaggctcacatgcaggtaatgagaacgttatggaagcagtgaacccacaatccacaatccccaaactcagagtgcatcccagaagaggccccaggcagagctcaggttggccctggcctttgccatcccgggaggccccctagccagcaagagtgggattgcctttcctgtggaaccactgcttccccaggcgggaagaaagagggagttctggccacctgagcctttcccttgccaatccaggtagacagaggccctgcctttggctgagctgagacacctcctgtttcccttccccttgaaccagtcccagtgtccccttgctccaggctaccttctgtctcttagtctaagtttgcccacctgtaaagtagattcaggatatctgtagagggctgtgacaacagacttggaaggtttgctactgtatatactgccattgagaaggggaaatttttcaatatgtagaagcttcagaattagaggtccctctttaccccagacctgggagggaagtagatgttttgccaaaatacttcttcattcctttaaaaactacatctttcctatgcaagagtgtctcacatgtgcttaaccgaggtgcttctagttggtgagcagtgttgagcttagaagtggtgtgtgctctgtctgtctgtctttgtctgtctgttgtatacagtgggtgccatataaagctgatcaatggtggtgcttcctgcctgcttctgtgagatgggcaaaagattcagcttagaacaccatgactcaccttgccttggtcagcctttcctgggcctgtagggccttgcacatatttttcccaggaggatttcccctccaccccacaggcatggatcagcttggtctgaggccccagctgtgtggggtccctctaatccccagatgttgctgaggctgaaggcctctgatctgataacatgtcagatagtaaaagatgtgggggtgggggtggagggctcctccttcataacagtttctaagaaaacttgttcccacctgtt

SEQ ID NO: 229259 - DNA, 2497 bp, Artificial Sequence
  derived and/or modified sequence
agcgggctaaaccccggtcccgccgtacccatgaaggaccacgacgccatcaagctcttcgtggggcagatcccgcggggcttggacgagcaggacctcaagccgctgttcgaggagttcggccgcatctacgagctgacggtgctgaaggaccggctcaccggcctccacaaaggctgtgccttcctcacctactgcgcccgggactctgctctcaaggcccagagtgcactgcacgagcagaagaccctgccagggaggaccgaaagctgtttgtggggatgctgggcaagcagcagggtgaggaggacgtcagacgcctgttccagccctttggccacatcgaggagtgcacggtcctgcggagtcctgacggcaccagtaaaggctgtgcctttgtgaagttcgggagtcaaggggaagctcaggcggccatccggggtctgcacggcagccggaccatggcgggcgcctcgtccagcctcgtggtcaagctggcggacaccgaccgggagcgcgcgctgcggcggatgcagcagatggccggccacctgggcgccttccaccccgcgccactgccgctaggggcctgcggcgcctacaccacggcgatcctgcagcaccaggcggccctgctggcggcggcacagggcccaggcctaggcccggtggcggcagtggcggcccagatgcaacacgtggcggcctttagcctggtagctgcgcctctgttgcccgcggcagcagccaactccccgcctggcagcggccctggcaccctcccaggtcttccggcgcccatcggggtcaatggattcggccctctgaccccccagaccaatggccagccgggctccgacacgctctacaataacgggctctccccttatccagcccagagccccggcgtggctgaccccctgcagcaggcctacgctgggatgcaccactacgcagcagcctatccgtcggcctatgccccagtgagcacagcttttccccagcagccttcagccctgccccagcagcagagagaaggccccgaaggctgtaacctcttcatctatcacctgcctcaggagtttggtgatgcggaactcatacagacattcctgccctttggagccgttgtctctgctaaagtctttgtggatcgagccaccaaccagagcaagtgttttgggtttgttagttttgacaatccaactagtgcccagactgctattcaggcgatgaatggctttcaaattggcatgaagaggctcaaggtccagctaaagcggcccaaggatgccaaccggccttactgacctgctttcactgaccagccacagaaagaaacagaagagtgagaagaaaggagaggaaaagcacagaaacgcttgagcagcccttcccgaaggagcagctgcggacggaggtggatcggacccaaggctggtgcctggggctaaggccactctaaggattgtttttatcaagtgggttgttctgtgcctgcagcatagagcgcaggctggcagagcaaatagggctggtgaggagtgactgtccaggggaaccagcagagggcgttgggggtgccaagggcttctccgcaagggaagcccagatttacttctttcaaaatcatatcattccttagagtttagggaccaaaggactattgcttttttaagaatatatatatctatataaattaaaacaaagaaacaaacaaacaaaaaacaagacaaacaactacaaaaaaagacagtatagagtctcataaaagctgcctttaaatatccctaggagacagggtgaaggagacccttgacagccccagcctaggcagatgggggctgtggaaagattgttctgtgtctcattccctcttaagccactcccccaccctgcccttttaaaaataattaaggatttgaggtctaggctcacatgcaggtaatgagaacgttatggaagcagtgaacccacaatccacaatccccaaactcagagtgcatcccagaagaggccccaggcagagctcaggttggccctggcctttgccatcccgggaggccccctagccagcaagagtgggattgcctttcctgtggaaccactgcttccccaggcgggaagaaagagggagttctggccacctgagcctttcccttgccaatccaggtagacagaggccctgcctttggctgagctgagacacctcctgtttcccttccccttgaaccagtcccagtgtccccttgctccaggctaccttctgtctcttagtctaagtttgcccacctgtaaagtagattcaggatatctgtagagggctgtgacaacagacttggaaggtttgctactgtatatactgccattgagaaggggaaatttttcaatatgtagaagcttcagaattagaggtccctctttaccccagacctgggagggaagtagatgttttgccaaaatacttcttcattcctttaaaaactacatctttcct

SEQ ID NO: 229260 - DNA, 1446 bp, Artificial Sequence
  derived and/or modified sequence
atggccgccgcccccggcggcagcgcccagcccgccggccccggccccagactgggcttcagcaccgccgacagcggcgtgggcatgagcggcctgaaccccggccccgccgtgcccatgaaggaccacgacgccatcaagctgttcgtgggccagatccccagaggcctggacgagcaggacctgaagcccctgttcgaggagttcggcagaatctacgagctgaccgtgctgaaggacagactgaccggcctgcacaagggctgcgccttcctgacctactgcgccagagacagcgccctgaaggcccagagcgccctgcacgagcagaagaccctgcccggcatgaacagacccatccaggtgaagcccgccgccagcgagggcagaggcgaggacagaaagctgttcgtgggcatgctgggcaagcagcagggcgaggaggacgtgagaagactgttccagcccttcggccacatcgaggagtgcaccgtgctgagaagccccgacggcaccagcaagggctgcgccttcgtgaagttcggcagccagggcgaggcccaggccgccatcagaggcctgcacggcagcagaaccatggccggcgccagcagcagcctggtggtgaagctggccgacaccgacagagagagagccctgagaagaatgcagcagatggccggccacctgggcgccttccaccccgcccccctgcccctgggcgcctgcggcgcctacaccaccgccatcctgcagcaccaggccgccctgctggccgccgcccagggccccggcctgggccccgtggccgccgtggccgcccagatgcagcacgtggccgccttcagcctggtggccgcccccctgctgcccgccgccgccgccaacagcccccccggcagcggccccggcaccctgcccggcctgcccgcccccatcggcgtgaacggcttcggccccctgaccccccagaccaacggccagcccggcagcgacaccctgtacaacaacggcctgagcccctaccccgcccagagccccggcgtggccgaccccctgcagcaggcctacgccggcatgcaccactacgccgccgcctaccccagcgcctacgcccccgtgagcaccgccttcccccagcagcccagcgccctgccccagcagcagagagagggccccgagggctgcaacctgttcatctaccacctgccccaggagttcggcgacgccgagctgatccagaccttcctgcccttcggcgccgtggtgagcgccaaggtgttcgtggacagagccaccaaccagagcaagtgcttcggcttcgtgagcttcgacaaccccaccagcgcccagaccgccatccaggccatgaacggcttccagatcggcatgaagagactgaaggtgcagctgaagagacccaaggacgccaacagaccctactag

SEQ ID NO: 229261 - DNA, 1107 bp, Artificial Sequence
  derived and/or modified sequence
atgatcagcgacccccccagcaacaacagctggaacagcgtgctgtacctgctggaggacagaaagctgttcgtgggcatgctgggcaagcagcagggcgaggaggacgtgagaagactgttccagcccttcggccacatcgaggagtgcaccgtgctgagaagccccgacggcaccagcaagggctgcgccttcgtgaagttcggcagccagggcgaggcccaggccgccatcagaggcctgcacggcagcagaaccatggccggcgccagcagcagcctggtggtgaagctggccgacaccgacagagagagagccctgagaagaatgcagcagatggccggccacctgggcgccttccaccccgcccccctgcccctgggcgcctgcggcgcctacaccaccgccatcctgcagcaccaggccgccctgctggccgccgcccagggccccggcctgggccccgtggccgccgtggccgcccagatgcagcacgtggccgccttcagcctggtggccgcccccctgctgcccgccgccgccgccaacagcccccccggcagcggccccggcaccctgcccggcctgcccgcccccatcggcgtgaacggcttcggccccctgaccccccagaccaacggccagcccggcagcgacaccctgtacaacaacggcctgagcccctaccccgcccagagccccggcgtggccgaccccctgcagcaggcctacgccggcatgcaccactacgccgccgcctaccccagcgcctacgcccccgtgagcaccgccttcccccagcagcccagcgccctgccccagcagcagagagagggccccgagggctgcaacctgttcatctaccacctgccccaggagttcggcgacgccgagctgatccagaccttcctgcccttcggcgccgtggtgagcgccaaggtgttcgtggacagagccaccaaccagagcaagtgcttcggcttcgtgagcttcgacaaccccaccagcgcccagaccgccatccaggccatgaacggcttccagatcggcatgaagagactgaaggtgcagctgaagagacccaaggacgccaacagaccctactag

SEQ ID NO: 229262 - DNA, 1029 bp, Artificial Sequence
  derived and/or modified sequence
atgctgggcaagcagcagggcgaggaggacgtgagaagactgttccagcccttcggccacatcgaggagtgcaccgtgctgagaagccccgacggcaccagcaagggctgcgccttcgtgaagttcggcagccagggcgaggcccaggccgccatcagaggcctgcacggcagcagaaccatggccggcgccagcagcagcctggtggtgaagctggccgacaccgacagagagagagccctgagaagaatgcagcagatggccggccacctgggcgccttccaccccgcccccctgcccctgggcgcctgcggcgcctacaccaccgccatcctgcagcaccaggccgccctgctggccgccgcccagggccccggcctgggccccgtggccgccgtggccgcccagatgcagcacgtggccgccttcagcctggtggccgcccccctgctgcccgccgccgccgccaacagcccccccggcagcggccccggcaccctgcccggcctgcccgcccccatcggcgtgaacggcttcggccccctgaccccccagaccaacggccagcccggcagcgacaccctgtacaacaacggcctgagcccctaccccgcccagagccccggcgtggccgaccccctgcagcaggcctacgccggcatgcaccactacgccgccgcctaccccagcgcctacgcccccgtgagcaccgccttcccccagcagcccagcgccctgccccagcagcagagagagggccccgagggctgcaacctgttcatctaccacctgccccaggagttcggcgacgccgagctgatccagaccttcctgcccttcggcgccgtggtgagcgccaaggtgttcgtggacagagccaccaaccagagcaagtgcttcggcttcgtgagcttcgacaaccccaccagcgcccagaccgccatccaggccatgaacggcttccagatcggcatgaagagactgaaggtgcagctgaagagacccaaggacgccaacagaccctactag

SEQ ID NO: 229263 - protein, 6620 aa, Artificial Sequence
  derived and/or modified sequence
MDQPQFSGAPRFLTRPKAFVVSVGKDATLSCQIVGNPTPQVSWEKDQQPVAAGARFRLAQDGDLYRLTILDLALGDSGQYVCRARNAIGEAFAAVGLQVDAEAACAEQAPHFLLRPTSIRVREGSEATFRCRVGGSPRPAVSWSKDGRRLGEPDGPRVRVEELGEASALRIRAARPRDGGTYEVRAENPLGAASAAAALVVDSDAADTASRPGTSTAALLAHLQRRREAMRAEGAPASPPSTGTRTCTVTEGKHARLSCYVTGEPKPETVWKKDGQLVTEGRRHVVYEDAQENFVLKILFCKQSDRGLYTCTASNLVGQTYSSVLVVVREPAVPFKKRLQDLEVREKESATFLCEVPQPSTEAAWFKEETRLWASAKYGIEEEGTERRLTVRNVSADDDAVYICETPEGSRTVAELAVQGNLLRKLPRKTAVRVGDTAMFCVELAVPVGPVHWLRNQEEVVAGGRVAISAEGTRHTLTISQCCLEDVGQVAFMAGDCQTSTQFCVSAPRKPPLQPPVDPVVKARMESSVILSWSPPPHGERPVTIDGYLVEKKKLGTYTWIRCHEAEWVATPELTVADVAEEGNFQFRVSALNSFGQSPYLEFPGTVHLAPKLAVRTPLKAVQAVEGGEVTFSVDLTVASAGEWFLDGQALKASSVYEIHCDRTRHTLTIREVPASLHGAQLKFVANGIESSIRMEVRAAPGLTANKPPAAAAREVLARLHEEAQLLAELSDQAAAVTWLKDGRTLSPGPKYEVQASAGRRVLLVRDVARDDAGLYECVSRGGRIAYQLSVQGLARFLHKDMAGSCVDAVAGGPAQFECETSEAHVHVHWYKDGMELGHSGERFLQEDVGTRHRLVAATVTRQDEGTYSCRVGEDSVDFRLRVSEPKVVFAKEQLARRKLQAEAGASATLSCEVAQAQTEVTWYKDGKKLSSSSKVCMEATGCTRRLVVQQAGQADAGEYSCEAGGQRLSFHLDVKEPKVVFAKDQVAHSEVQAEAGASATLSCEVAQAQTEVMWYKDGKKLSSSLKVHVEAKGCRRRLVVQQAGKTDAGDYSCEARGQRVSFRLHITEPKMMFAKEQSVHNEVQAEAGASAMLSCEVAQAQTEVTWYKDGKKLSSSSKVGMEVKGCTRRLVLPQAGKADAGEYSCEAGGQRVSFHLHITEPKGVFAKEQSVHNEVQAEAGTTAMLSCEVAQPQTEVTWYKDGKKLSSSSKVRMEVKGCTRRLVVQQVGKADAGEYSCEAGGQRVSFQLHITEPKAVFAKEQLVHNEVRTEAGASATLSCEVAQAQTEVTWYKDGKKLSSSSKVRIEAAGCMRQLVVQQAGQADAGEYTCEAGGQRLSFHLDVSEPKAVFAKEQLAHRKVQAEAGAIATLSCEVAQAQTEVTWYKDGKKLSSSSKVRMEAVGCTRRLVVQQACQADTGEYSCEAGGQRLSFSLDVAEPKVVFAKEQPVHREVQAQAGASTTLSCEVAQAQTEVMWYKDGKKLSFSSKVRMEAVGCTRRLVVQQAGQAVAGEYSCEAGSQRLSFHLHVAEPKAVFAKEQPASREVQAEAGTSATLSCEVAQAQTEVTWYKDGKKLSSSSKVRMEAVGCTRRLVVQEAGQADAGEYSCKAGDQRLSFHLHVAEPKVVFAKEQPAHREVQAEAGASATLSCEVAQAQTEVTWYKDGKKLSSSSKVRVEAVGCTRRLVVQQAGQAEAGEYSCEAGGQQLSFRLQVAELEPQISERPCRREPLVVKEHEDIILTATLATPSAATVTWLKDGVEIRRSKRHETASQGDTHTLTVHGAQVLDSAIYSCRVGAEGQDFPVQVEEVAAKFCRLLEPVCGELGGTVTLACELSPACAEVVWRCGNTQLRVGKRFQMVAEGPVRSLTVLGLRAEDAGEYVCESRDDHTSAQLTVSVPRVVKFMSGLSTVVAEEGGEATFQCVVSPSDVAVVWFRDGALLQPSEKFAISQSGASHSLTISDLVLEDAGQITVEAEGASSSAALRVREAPVLFKKKLEPQTVEERSSVTLEVELTRPWPELRWTRNATALAPGKNVEIHAEGARHRLVLHNVGFADRGFFGCETPDDKTQAKLTVEMRQVRLVRGLQAVEAREQGTATMEVQLSHADVDGSWTRDGLRFQQGPTCHLAVRGPMHTLTLSGLRPEDSGLMVFKAEGVHTSARLVVTELPVSFSRPLQDVVTTEKEKVTLECELSRPNVDVRWLKDGVELRAGKTMAIAAQGACRSLTIYRCEFADQGVYVCDAHDAQSSASVKVQGRTYTLIYRRVLAEDAGEIQFVAENAESRAQLRVKELPVTLVRPLRDKIAMEKHRGVLECQVSRASAQVRWFKGSQELQPGPKYELVSDGLYRKLIISDVHAEDEDTYTCDAGDVKTSAQFFVEEQSITIVRGLQDVTVMEPAPAWFECETSIPSVRPPKWLLGKTVLQAGGNVGLEQEGTVHRLMLRRTCSTMTGPVHFTVGKSRSSARLVVSDIPVVLTRPLEPKTGRELQSVVLSCDFRPAPKAVQWYKDDTPLSPSEKFKMSLEGQMAELRILRLMPADAGVYRCQAGSAHSSTEVTVEAREVTVTGPLQDAEATEEGWASFSCELSHEDEEVEWSLNGMPLYNDSFHEISHKGRRHTLVLKSIQRADAGIVRASSLKVSTSARLEVRVKPVVFLKALDDLSAEERGTLALQCEVSDPEAHVVWRKDGVQLGPSDKYDFLHTAGTRGLVVHDVSPEDAGLYTCHVGSEETRARVRVHDLHVGITKRLKTMEVLEGESCSFECVLSHESASDPAMWTVGGKTVGSSSRFQATRQGRKYILVVREAAPSDAGEVVFSVRGLTSKASLIVRERPAAIIKPLEDQWVAPGEDVELRCELSRAGTPVHWLKDRKAIRKSQKYDVVCEGTMAMLVIRGASLKDAGEYTCEVEASKSTASLHVEEKANCFTEELTNLQVEEKGTAVFTCKTEHPAATVTWRKGLLELRASGKHQPSQEGLTLRLTISALEKADSDTYTCDIGQAQSRAQLLVQGRRVHIIEDLEDVDVQEGSSATFRCRISPANYEPVHWFLDKTPLHANELNEIDAQPGGYHVLTLRQLALKDSGTIYFEAGDQRASAALRVTEKPSVFSRELTDATITEGEDLTLVCETSTCDIPVCWTKDGKTLRGSARCQLSHEGHRAQLLITGATLQDSGRYKCEAGGACSSSIVRVHARPVRFQEALKDLEVLEGGAATLRCVLSSVAAPVKWCYGNNVLRPGDKYSLRQEGAMLELVVRNLRPQDSGRYSCSFGDQTTSATLTVTALPAQFIGKLRNKEATEGATATLRCELSKAAPVEWRKGSETLRDGDRYCLRQDGAMCELQIRGLAMVDAAEYSCVCGEERTSASLTIRPMPAHFIGRLRHQESIEGATATLRCELSKAAPVEWRKGRESLRDGDRHSLRQDGAVCELQICGLAVADAGEYSCVCGEERTSATLTVKALPAKFTEGLRNEEAVEGATAMLWCELSKVAPVEWRKGPENLRDGDRYILRQEGTRCELQICGLAMADAGEYLCVCGQERTSATLTIRALPARFIEDVKNQEAREGATAVLQCELNSAAPVEWRKGSETLRDGDRYSLRQDGTKCELQIRGLAMADTGEYSCVCGQERTSAMLTVRALPIKFTEGLRNEEATEGATAVLRCELSKMAPVEWWKGHETLRDGDRHSLRQDGARCELQIRGLVAEDAGEYLCMCGKERTSAMLTVRAMPSKFIEGLRNEEATEGDTATLWCELSKAAPVEWRKGHETLRDGDRHSLRQDGSRCELQIRGLAVVDAGEYSCVCGQERTSATLTVRALPARFIEDVKNQEAREGATAVLQCELSKAAPVEWRKGSETLRGGDRYSLRQDGTRCELQIHGLSVADTGEYSCVCGQERTSATLTVRAPQPVFREPLQSLQAEEGSTATLQCELSEPTATVVWSKGGLQLQANGRREPRLQGCTAELVLQDLQREDTGEYTCTCGSQATSATLTVTAAPVRFLRELQHQEVDEGGTAHLCCELSRAGASVEWRKGSLQLFPCAKYQMVQDGAAAELLVRGVEQEDAGDYTCDTGHTQSMASLSVRVPRPKFKTRLQSLEQETGDIARLCCQLSDAESGAVVQWLKEGVELHAGPKYEMRSQGATRELLIHQLEAKDTGEYACVTGGQKTAASLRVTEPEVTIVRGLVDAEVTADEDVEFSCEVSRAGATGVQWCLQGLPLQSNEVTEVAVRDGRIHTLRLKGVTPEDAGTVSFHLGNHASSAQLTVRAPEVTILEPLQDVQLSEGQDASFQCRLSRASGQEARWALGGVPLQANEMNDITVEQGTLHLLTLHKVTLEDAGTVSFHVGTCSSEAQLKVTAKNTVVRGLENVEALEGGEALFECQLSQPEVAAHTWLLDDEPVHTSENAEVVFFENGLRHLLLLKNLRPQDSCRVTFLAGDMVTSAFLTVRGWRLEILEPLKNAAVRAGAQACFTCTLSEAVPVGEASWYINGAAVQPDDSDWTVTADGSHHALLLRSAQPHHAGEVTFACRDAVASARLTVLGLPDPPEDAEVVARSSHTVTLSWAAPMSDGGGGLCGYRVEVKEGATGQWRLCHELVPGPECVVDGLAPGETYRFRVAAVGPVGAGEPVHLPQTVRLAEPPKPVPPQPSAPESRQVAAGEDVSLELEVVAEAGEVIWHKGMERIQPGGRFEVVSQGRQQMLVIKGFTAEDQGEYHCGLAQGSICPAAATFQVALSPASVDEAPQPSLPPEAAQEGDLHLLWEALARKRRMSREPTLDSISELPEEDGRSQRLPQEAEEVAPDLSEGYSTADELARTGDADLSHTSSDDESRAGTPSLVTYLKKAGRPGTSPLASKVGAPAAPSVKPQQQQEPLAAVRPPLGDLSTKDLGDPSMDKAAVKIQAAFKGYKVRKEMKQQEGPMFSHTFGDTEAQVGDALRLECVVASKADVRARWLKDGVELTDGRHHHIDQLGDGTCSLLITGLDRADAGCYTCQVSNKFGQVTHSACVVVSGSESEAESSSGGELDDAFRRAARRLHRLFRTKSPAEVSDEELFLSADEGPAEPEEPADWQTYREDEHFICIRFEALTEARQAVTRFQEMFATLGIGVEIKLVEQGPRRVEMCISKETPAPVVPPEPLPSLLTSDAAPVFLTELQNQEVQDGYPVSFDCVVTGQPMPSVRWFKDGKLLEEDDHYMINEDQQGGHQLIITAVVPADMGVYRCLAENSMGVSSTKAELRVDLTSTDYDTAADATESSSYFSAQGYLSSREQEGTESTTDEGQLPQVVEELRDLQVAPGTRLAKFQLKVKGYPAPRLYWFKDGQPLTASAHIRMTDKKILHTLEIISVTREDSGQYAAYISNAMGAAYSSARLLVRGPDEPEEKPASDVHEQLVPPRMLERFTPKKVKKGSSITFSVKVEGRPVPTVHWLREEAERGVLWIGPDTPGYTVASSAQQHSLVLLDVGRQHQGTYTCIASNAAGQALCSASLHVSGLPKVEEQEKVKEALISTFLQGTTQAISAQGLETASFADLGGQRKEEPLAAKEALGHLSLAEVGTEEFLQKLTSQITEMVSAKITQAKLQVPGGDSDEDSKTPSASPRHGRSRPSSSIQESSSESEDGDARGEIFDIYVVTADYLPLGAEQDAITLREGQYVEVLDAAHPLRWLVRTKPTKSSPSRQGWVSPAYLDRRLKLSPEWGAAEAPEFPGEAVSEDEYKARLSSVIQELLSSEQAFVEELQFLQSHHLQHLERCPHVPIAVAGQKAVIFRNVRDIGRFHSSFLQELQQCDTDDDVAMCFIKNQAAFEQYLEFLVGRVQAESVVVSTAIQEFYKKYAEEALLAGDPSQPPPPPLQHYLEQPVERVQRYQALLKELIRNKARNRQNCALLEQAYAVVSALPQRAENKLHVSLMENYPGTLQALGEPIRQGHFIVWEGAPGARMPWKGHNRHVFLFRNHLVICKPRRDSRTDTVSYVFRNMMKLSSIDLNDQVEGDDRAFEVWQEREDSVRKYLLQARTAIIKSSWVKEICGIQQRLALPVWRPPDFEEELADCTAELGETVKLACRVTGTPKPVISWYKDGKAVQVDPHHILIEDPDGSCALILDSLTGVDSGQYMCFAASAAGNCSTLGKILVQVPPRFVNKVRASPFVEGEDAQFTCTIEGAPYPQIRWYKDGALLTTGNKFQTLSEPRSGLLVLVIRAASKEDLGLYECELVNRLGSARASAELRIQSPMLQAQEQCHREQLVAAVEVTEQETKVPKKTVIIEETITTVVKSPRGQRRSPSKSPSRSPSRCSASPLRPGLLAPDLLYLPGAGQPRRPEAEPGQKPVVPTLYVTEAEAHSPALPGLSGPQPKWVEVEETIEVRVKKMGPQGVSPTTEVPRSSSGHLFTLPGATPGGDPNSNNSNNKLLAQEAWAQGTAMVGVREPLVFRVDARGSVDWAASGMGSLEEEGTMEEAGEEEGEDGDAFVTEESQDTHSLGDRDPKILTHNGRMLTLADLEDYVPGEGETFHCGGPGPGAPDDPPCEVSVIQREIGEPTVGQPVLLSVGHALGPRGPLGLFRPEPRGASPPGPQVRSLEGTSFLLREAPARPVGSAPWTQSFCTRIRRSADSGQSSFTTELSTQTVNFGTVGETVTLHICPDRDGDEAAQP

SEQ ID NO: 229264 - DNA, 11220 bp, Artificial Sequence
  derived and/or modified sequence
atgctggtgatcagaggcgccagcctgaaggacgccggcgagtacacctgcgaggtggaggccagcaagagcaccgccagcctgcacgtggaggagaaggccaactgcttcaccgaggagctgaccaacctgcaggtggaggagaagggcaccgccgtgttcacctgcaagaccgagcaccccgccgccaccgtgacctggagaaagggcctgctggagctgagagccagcggcaagcaccagcccagccaggagggcctgaccctgagactgaccatcagcgccctggagaaggccgacagcgacacctacacctgcgacatcggccaggcccagagcagagcccagctgctggtgcagggcagaagagtgcacatcatcgaggacctggaggacgtggacgtgcaggagggcagcagcgccaccttcagatgcagaatcagccccgccaactacgagcccgtgcactggttcctggacaagacccccctgcacgccaacgagctgaacgagatcgacgcccagcccggcggctaccacgtgctgaccctgagacagctggccctgaaggacagcggcaccatctacttcgaggccggcgaccagagagccagcgccgccctgagagtgaccgagaagcccagcgtgttcagcagagagctgaccgacgccaccatcaccgagggcgaggacctgaccctggtgtgcgagaccagcacctgcgacatccccgtgtgctggaccaaggacggcaagaccctgagaggcagcgccagatgccagctgagccacgagggccacagagcccagctgctgatcaccggcgccaccctgcaggacagcggcagatacaagtgcgaggccggcggcgcctgcagcagcagcatcgtgagagtgcacgccagacccgtgagattccaggaggccctgaaggacctggaggtgctggagggcggcgccgccaccctgagatgcgtgctgagcagcgtggccgcccccgtgaagtggtgctacggcaacaacgtgctgagacccggcgacaagtacagcctgagacaggagggcgccatgctggagctggtggtgagaaacctgagaccccaggacagcggcagatacagctgcagcttcggcgaccagaccaccagcgccaccctgaccgtgaccgccctgcccgcccagttcatcggcaagctgagaaacaaggaggccaccgagggcgccaccgccaccctgagatgcgagctgagcaaggccgcccccgtggagtggagaaagggcagcgagaccctgagagacggcgacagatactgcctgagacaggacggcgccatgtgcgagctgcagatcagaggcctggccatggtggacgccgccgagtacagctgcgtgtgcggcgaggagagaaccagcgccagcctgaccatcagacccatgcccgcccacttcatcggcagactgagacaccaggagagcatcgagggcgccaccgccaccctgagatgcgagctgagcaaggccgcccccgtggagtggagaaagggcagagagagcctgagagacggcgacagacacagcctgagacaggacggcgccgtgtgcgagctgcagatctgcggcctggccgtggccgacgccggcgagtacagctgcgtgtgcggcgaggagagaaccagcgccaccctgaccgtgaaggccctgcccgccaagttcaccgagggcctgagaaacgaggaggccgtggagggcgccaccgccatgctgtggtgcgagctgagcaaggtggcccccgtggagtggagaaagggccccgagaacctgagagacggcgacagatacatcctgagacaggagggcaccagatgcgagctgcagatctgcggcctggccatggccgacgccggcgagtacctgtgcgtgtgcggccaggagagaaccagcgccaccctgaccatcagagccctgcccgccagattcatcgaggacgtgaagaaccaggaggccagagagggcgccaccgccgtgctgcagtgcgagctgaacagcgccgcccccgtggagtggagaaagggcagcgagaccctgagagacggcgacagatacagcctgagacaggacggcaccaagtgcgagctgcagatcagaggcctggccatggccgacaccggcgagtacagctgcgtgtgcggccaggagagaaccagcgccatgctgaccgtgagagccctgcccatcaagttcaccgagggcctgagaaacgaggaggccaccgagggcgccaccgccgtgctgagatgcgagctgagcaagatggcccccgtggagtggtggaagggccacgagaccctgagagacggcgacagacacagcctgagacaggacggcgccagatgcgagctgcagatcagaggcctggtggccgaggacgccggcgagtacctgtgcatgtgcggcaaggagagaaccagcgccatgctgaccgtgagagccatgcccagcaagttcatcgagggcctgagaaacgaggaggccaccgagggcgacaccgccaccctgtggtgcgagctgagcaaggccgcccccgtggagtggagaaagggccacgagaccctgagagacggcgacagacacagcctgagacaggacggcagcagatgcgagctgcagatcagaggcctggccgtggtggacgccggcgagtacagctgcgtgtgcggccaggagagaaccagcgccaccctgaccgtgagagccctgcccgccagattcatcgaggacgtgaagaaccaggaggccagagagggcgccaccgccgtgctgcagtgcgagctgagcaaggccgcccccgtggagtggagaaagggcagcgagaccctgagaggcggcgacagatacagcctgagacaggacggcaccagatgcgagctgcagatccacggcctgagcgtggccgacaccggcgagtacagctgcgtgtgcggccaggagagaaccagcgccaccctgaccgtgagagccccccagcccgtgttcagagagcccctgcagagcctgcaggccgaggagggcagcaccgccaccctgcagtgcgagctgagcgagcccaccgccaccgtggtgtggagcaagggcggcctgcagctgcaggccaacggcagaagagagcccagactgcagggctgcaccgccgagctggtgctgcaggacctgcagagagaggacaccggcgagtacacctgcacctgcggcagccaggccaccagcgccaccctgaccgtgaccgccgcccccgtgagattcctgagagagctgcagcaccaggaggtggacgagggcggcaccgcccacctgtgctgcgagctgagcagagccggcgccagcgtggagtggagaaagggcagcctgcagctgttcccctgcgccaagtaccagatggtgcaggacggcgccgccgccgagctgctggtgagaggcgtggagcaggaggacgccggcgactacacctgcgacaccggccacacccagagcatggccagcctgagcgtgagagtgcccagacccaagttcaagaccagactgcagagcctggagcaggagaccggcgacatcgccagactgtgctgccagctgagcgacgccgagagcggcgccgtggtgcagtggctgaaggagggcgtggagctgcacgccggccccaagtacgagatgagaagccagggcgccaccagagagctgctgatccaccagctggaggccaaggacaccggcgagtacgcctgcgtgaccggcggccagaagaccgccgccagcctgagagtgaccgagcccgaggtgaccatcgtgagaggcctggtggacgccgaggtgaccgccgacgaggacgtggagttcagctgcgaggtgagcagagccggcgccaccggcgtgcagtggtgcctgcagggcctgcccctgcagagcaacgaggtgaccgaggtggccgtgagagacggcagaatccacaccctgagactgaagggcgtgacccccgaggacgccggcaccgtgagcttccacctgggcaaccacgccagcagcgcccagctgaccgtgagagcccccgaggtgaccatcctggagcccctgcaggacgtgcagctgagcgagggccaggacgccagcttccagtgcagactgagcagagccagcggccaggaggccagatgggccctgggcggcgtgcccctgcaggccaacgagatgaacgacatcaccgtggagcagggcaccctgcacctgctgaccctgcacaaggtgaccctggaggacgccggcaccgtgagcttccacgtgggcacctgcagcagcgaggcccagctgaaggtgaccgccaagaacaccgtggtgagaggcctggagaacgtggaggccctggagggcggcgaggccctgttcgagtgccagctgagccagcccgaggtggccgcccacacctggctgctggacgacgagcccgtgcacaccagcgagaacgccgaggtggtgttcttcgagaacggcctgagacacctgctgctgctgaagaacctgagaccccaggacagctgcagagtgaccttcctggccggcgacatggtgaccagcgccttcctgaccgtgagaggctggagactggagatcctggagcccctgaagaacgccgccgtgagagccggcgcccaggcctgcttcacctgcaccctgagcgaggccgtgcccgtgggcgaggccagctggtacatcaacggcgccgccgtgcagcccgacgacagcgactggaccgtgaccgccgacggcagccaccacgccctgctgctgagaagcgcccagccccaccacgccggcgaggtgaccttcgcctgcagagacgccgtggccagcgccagactgaccgtgctgggcctgcccgacccccccgaggacgccgaggtggtggccagaagcagccacaccgtgaccctgagctgggccgcccccatgagcgacggcggcggcggcctgtgcggctacagagtggaggtgaaggagggcgccaccggccagtggagactgtgccacgagctggtgcccggccccgagtgcgtggtggacggcctggcccccggcgagacctacagattcagagtggccgccgtgggccccgtgggcgccggcgagcccgtgcacctgccccagaccgtgagactggccgagccccccaagcccgtgcccccccagcccagcgcccccgagagcagacaggtggccgccggcgaggacgtgagcctggagctggaggtggtggccgaggccggcgaggtgatctggcacaagggcatggagagaatccagcccggcggcagattcgaggtggtgagccagggcagacagcagatgctggtgatcaagggcttcaccgccgaggaccagggcgagtaccactgcggcctggcccagggcagcatctgccccgccgccgccaccttccaggtggccctgagccccgccagcgtggacgaggccccccagcccagcctgccccccgaggccgcccaggagggcgacctgcacctgctgtgggaggccctggccagaaagagaagaatgagcagagagcccaccctggacagcatcagcgagctgcccgaggaggacggcagaagccagagactgccccaggaggccgaggaggtggcccccgacctgagcgagggctacagcaccgccgacgagctggccagaaccggcgacgccgacctgagccacaccagcagcgacgacgagagcagagccggcacccccagcctggtgacctacctgaagaaggccggcagacccggcaccagccccctggccagcaaggtgggcgcccccgccgcccccagcgtgaagccccagcagcagcaggagcccctggccgccgtgagaccccccctgggcgacctgagcaccaaggacctgggcgaccccagcatggacaaggccgccgtgaagatccaggccgccttcaagggctacaaggtgagaaaggagatgaagcagcaggagggccccatgttcagccacaccttcggcgacaccgaggcccaggtgggcgacgccctgagactggagtgcgtggtggccagcaaggccgacgtgagagccagatggctgaaggacggcgtggagctgaccgacggcagacaccaccacatcgaccagctgggcgacggcacctgcagcctgctgatcaccggcctggacagagccgacgccggctgctacacctgccaggtgagcaacaagttcggccaggtgacccacagcgcctgcgtggtggtgagcggcagcgagagcgaggccgagagcagcagcggcggcgagctggacgacgccttcagaagagccgccagaagactgcacagactgttcagaaccaagagccccgccgaggtgagcgacgaggagctgttcctgagcgccgacgagggccccgccgagcccgaggagcccgccgactggcagacctacagagaggacgagcacttcatctgcatcagattcgaggccctgaccgaggccagacaggccgtgaccagattccaggagatgttcgccaccctgggcatcggcgtggagatcaagctggtggagcagggccccagaagagtggagatgtgcatcagcaaggagacccccgcccccgtggtgccccccgagcccctgcccagcctgctgaccagcgacgccgcccccgtgttcctgaccgagctgcagaaccaggaggtgcaggacggctaccccgtgagcttcgactgcgtggtgaccggccagcccatgcccagcgtgagatggttcaaggacggcaagctgctggaggaggacgaccactacatgatcaacgaggaccagcagggcggccaccagctgatcatcaccgccgtggtgcccgccgacatgggcgtgtacagatgcctggccgagaacagcatgggcgtgagcagcaccaaggccgagctgagagtggacctgaccagcaccgactacgacaccgccgccgacgccaccgagagcagcagctacttcagcgcccagggctacctgagcagcagagagcaggagggcaccgagagcaccaccgacgagggccagctgccccaggtggtggaggagctgagagacctgcaggtggcccccggcaccagactggccaagttccagctgaaggtgaagggctaccccgcccccagactgtactggttcaaggacggccagcccctgaccgccagcgcccacatcagaatgaccgacaagaagatcctgcacaccctggagatcatcagcgtgaccagagaggacagcggccagtacgccgcctacatcagcaacgccatgggcgccgcctacagcagcgccagactgctggtgagaggccccgacgagcccgaggagaagcccgccagcgacgtgcacgagcagctggtgccccccagaatgctggagagattcacccccaagaaggtgaagaagggcagcagcatcaccttcagcgtgaaggtggagggcagacccgtgcccaccgtgcactggctgagagaggaggccgagagaggcgtgctgtggatcggccccgacacccccggctacaccgtggccagcagcgcccagcagcacagcctggtgctgctggacgtgggcagacagcaccagggcacctacacctgcatcgccagcaacgccgccggccaggccctgtgcagcgccagcctgcacgtgagcggcctgcccaaggtggaggagcaggagaaggtgaaggaggccctgatcagcaccttcctgcagggcaccacccaggccatcagcgcccagggcctggagaccgccagcttcgccgacctgggcggccagagaaaggaggagcccctggccgccaaggaggccctgggccacctgagcctggccgaggtgggcaccgaggagttcctgcagaagctgaccagccagatcaccgagatggtgagcgccaagatcacccaggccaagctgcaggtgcccggcggcgacagcgacgaggacagcaagacccccagcgccagccccagacacggcagaagcagacccagcagcagcatccaggagagcagcagcgagagcgaggacggcgacgccagaggcgagatcttcgacatctacgtggtgaccgccgactacctgcccctgggcgccgagcaggacgccatcaccctgagagagggccagtacgtggaggtgctggacgccgcccaccccctgagatggctggtgagaaccaagcccaccaagagcagccccagcagacagggctgggtgagccccgcctacctggacagaagactgaagctgagccccgagtggggcgccgccgaggcccccgagttccccggcgaggccgtgagcgaggacgagtacaaggccagactgagcagcgtgatccaggagctgctgagcagcgagcaggccttcgtggaggagctgcagttcctgcagagccaccacctgcagcacctggagagatgcccccacgtgcccatcgccgtggccggccagaaggccgtgatcttcagaaacgtgagagacatcggcagattccacagcagcttcctgcaggagctgcagcagtgcgacaccgacgacgacgtggccatgtgcttcatcaagaaccaggccgccttcgagcagtacctggagttcctggtgggcagagtgcaggccgagagcgtggtggtgagcaccgccatccaggagttctacaagaagtacgccgaggaggccctgctggccggcgaccccagccagcccccccccccccccctgcagcactacctggagcagcccgtggagagagtgcagagataccaggccctgctgaaggagctgatcagaaacaaggccagaaacagacagaactgcgccctgctggagcaggcctacgccgtggtgagcgccctgccccagagagccgagaacaagctgcacgtgagcctgatggagaactaccccggcaccctgcaggccctgggcgagcccatcagacagggccacttcatcgtgtgggagggcgcccccggcgccagaatgccctggaagggccacaacagacacgtgttcctgttcagaaaccacctggtgatctgcaagcccagaagagacagcagaaccgacaccgtgagctacgtgttcagaaacatgatgaagctgagcagcatcgacctgaacgaccaggtggagggcgacgacagagccttcgaggtgtggcaggagagagaggacagcgtgagaaagtacctgctgcaggccagaaccgccatcatcaagagcagctgggtgaaggagatctgcggcatccagcagagactggccctgcccgtgtggagaccccccgacttcgaggaggagctggccgactgcaccgccgagctgggcgagaccgtgaagctggcctgcagagtgaccggcacccccaagcccgtgatcagctggtacaaggacggcaaggccgtgcaggtggacccccaccacatcctgatcgaggaccccgacggcagctgcgccctgatcctggacagcctgaccggcgtggacagcggccagtacatgtgcttcgccgccagcgccgccggcaactgcagcaccctgggcaagatcctggtgcaggtgccccccagattcgtgaacaaggtgagagccagccccttcgtggagggcgaggacgcccagttcacctgcaccatcgagggcgccccctacccccagatcagatggtacaaggacggcgccctgctgaccaccggcaacaagttccagaccctgagcgagcccagaagcggcctgctggtgctggtgatcagagccgccagcaaggaggacctgggcctgtacgagtgcgagctggtgaacagactgggcagcgccagagccagcgccgagctgagaatccagagccccatgctgcaggcccaggagcagtgccacagagagcagctggtggccgccgtggaggtgaccgagcaggagaccaaggtgcccaagaagaccgtgatcatcgaggagaccatcaccaccgtggtgaagagccccagaggccagagaagaagccccagcaagagccccagcagaagccccagcagatgcagcgccagccccctgagacccggcctgctggcccccgacctgctgtacctgcccggcgccggccagcccagaagacccgaggccgagcccggccagaagcccgtggtgcccaccctgtacgtgaccgaggccgaggcccacagccccgccctgcccggcctgagcggcccccagcccaagtgggtggaggtggaggagaccatcgaggtgagagtgaagaagatgggcccccagggcgtgagccccaccaccgaggtgcccagaagcagcagcggccacctgttcaccctgcccggcgccacccccggcggcgaccccaacagcaacaacagcaacaacaagctgctggcccaggaggcctgggcccagggcaccgccatggtgggcgtgagagagcccctggtgttcagagtggacgccagaggcagcgtggactgggccgccagcggcatgggcagcctggaggaggagggcaccatggaggaggccggcgaggaggagggcgaggacggcgacgccttcgtgaccgaggagagccaggacacccacagcctgggcgacagagaccccaagatcctgacccacaacggcagaatgctgaccctggccgacctggaggactacgtgcccggcgagggcgagaccttccactgcggcggccccggccccggcgcccccgacgaccccccctgcgaggtgagcgtgatccagagagagatcggcgagcccaccgtgggccagcccgtgctgctgagcgtgggccacgccctgggccccagaggccccctgggcctgttcagacccgagcccagaggcgccagcccccccggcccccaggtgagaagcctggagggcaccagcttcctgctgagagaggcccccgccagacccgtgggcagcgccccctggacccagagcttctgcaccagaatcagaagaagcgccgacagcggccagagcagcttcaccaccgagctgagcacccagaccgtgaacttcggcaccgtgggcgagaccgtgaccctgcacatctgccccgacagagacggcgacgaggccgcccagccctag

SEQ ID NO: 229265 - DNA, 19863 bp, Artificial Sequence
  derived and/or modified sequence
atggaccagccacagttctctggagccccgcggtttcttacacgtcccaaagcctttgttgtgagcgttggcaaggacgccactctgtcttgccagattgttggtaaccccacgccacaggtcagctgggaaaaggaccagcaacccgttgccgctggtgcccggtttcgcctggcgcaggatggcgatctgtatagacttactatactggatctggcgctaggcgatagcggacaatatgtgtgtcgtgcaaggaatgccatcggagaagccttcgccgctgtgggtctccaggtggatgccgaggccgcctgcgctgagcaagccccccacttcctgttaagaccgacatctatccgggtacgagaaggatccgaggcgaccttcagatgtagagtggggggctcacccaggccggcagtatcttggtccaaagatggtcgccgcttgggtgagcccgacggccccagggttcgagttgaggagctaggagaagcctcggcgttgcgtataagagctgctaggccccgggatggcgggacctacgaggtacgcgccgagaacccattgggggcagcaagtgctgccgcagccctggtggtagattctgacgccgccgatacagcctcaaggcctggcacctctaccgccgcacttttggctcacctgcagcggaggcgcgaggcgatgagggctgagggggcccccgcaagtcccccttccacaggcacaagaacctgcaccgtgaccgaggggaagcatgccagactgagctgttatgttactggggaaccaaaaccagaaaccgtttggaagaaagatggccagttggtaacggaaggtcgcagacatgtggtttacgaagacgctcaagaaaatttcgtcctgaaaatcttattctgcaaacagagtgacaggggcctttacacttgtacggcgagtaacttagtcggccaaacgtatagctctgtgctggtcgtggtgcgtgagcctgctgtgccattcaaaaaacggttacaggacttggaggttcgggagaaagagtcagctactttcttgtgcgaggttcctcagccgagcacggaagccgcctggtttaaggaggaaacacgcctctgggcgtccgcaaagtacgggatcgaggaggaaggcacagagcgtagactgacagttcgtaatgtgtcagccgatgacgatgctgtgtacatctgtgagactcctgaagggtcccggacagtggcagaacttgcagtgcagggtaatctgcttcggaaactgcctcgaaaaaccgccgttagagttggggacaccgcaatgttttgcgtcgagcttgccgtgccggtgggtccggtacactggttgcgcaaccaggaggaggtcgtcgctggagggcgggtggctattagtgctgaggggacacgacatacgttaacaatttcacaatgttgtttggaggatgttggtcaagtggccttcatggcgggcgactgccagacgagcacccaattctgtgtgtccgcccctagaaaaccaccgctccagcctccagtagacccggtcgtgaaggctaggatggagagcagcgtgattctgagttggagccctcctccccatggggaacgcccagtaactatcgacgggtacctggttgagaaaaagaagttgggaacttacacctggatccgatgccacgaagccgagtgggttgccacccccgagctgactgtggccgatgtggctgaagagggcaactttcagtttagagtatctgctttaaacagctttggacaaagtccttatctcgaattccctgggaccgtacacctggctcccaagctggcagtgaggaccccgctgaaagccgtgcaagccgtagagggcggtgaagttacattttccgttgacctcactgtggcctcggcgggtgaatggttcctggatggccaggcacttaaggcctcatctgtttacgaaatccattgcgataggacacgtcataccctcaccatcagggaagttcccgcctcgctacacggtgcacaattgaagttcgtggctaacgggattgagtctagcatccgaatggaagtaagggctgctccaggactgaccgcgaacaagcctccagctgctgccgctcgcgaggtgctggcaaggctgcatgaagaagcccagctgttggctgagctttccgaccaagccgcagctgtgacctggctgaaagacgggaggaccctgagtcctggaccaaagtacgaagttcaggccagcgctggtagacgggtcctcttagtaagagacgtagcaagagacgatgcaggcctttatgaatgcgtctctaggggaggcaggatcgcctatcagctgtctgttcaggggcttgcacggttcctgcacaaggacatggccgggtcttgcgtggacgctgtcgcaggcggccccgcacagtttgagtgtgaaacgagtgaggcccacgtccatgtccactggtacaaggacggcatggagctgggccatagcggcgagagattcctccaggaagatgtagggacccggcaccgactcgttgctgcgaccgttacccgacaagacgaggggacctactcctgtcgcgttggcgaagattccgtcgattttcggttgcgagtgagcgaacccaaggtcgtattcgccaaggaacaactcgctcggagaaagctgcaggccgaggcgggcgcgtccgctacattgagttgcgaggtcgcgcaggctcagaccgaagtgacctggtataaggacgggaaaaaactgtcaagcagctccaaagtctgcatggaagctactggctgtactagacgtctggtggtacaacaggcaggccaggcagatgccggtgagtattcctgcgaagccgggggccagcgccttagtttccatctcgacgttaaagagcctaaggttgtgttcgccaaggatcaggtggcacattcagaggtgcaggctgaggctggggcttctgctaccctttcctgcgaggttgcacaggcccagaccgaggtgatgtggtacaaagatggaaagaagctttccagtagcctgaaggttcatgtcgaggcaaaaggctgtcgacggaggcttgttgtgcagcaagctggcaaaacagatgctggggattactcttgcgaggcccggggtcagagggtttcatttcgacttcatattactgagcccaagatgatgttcgcaaaagagcaatccgttcacaatgaggtgcaggccgaggctggagcttccgccatgctgagctgtgaagtggctcaggcacagactgaagtgacttggtacaaggacgggaagaagttaagtagctcatccaaggtagggatggaggtcaaggggtgtacgcggaggctggttttaccacaggcgggcaaggccgatgcaggggaatacagctgtgaggccggcggccagcgggtgtcttttcacctgcatataacggaacccaaaggcgtgtttgccaaagagcaatctgtgcacaatgaggttcaggcagaagcgggaacaaccgccatgctaagctgtgaggtcgcgcagccgcagactgaggtcacgtggtacaaagatggcaaaaagctgtcaagcagctccaaagtgcggatggaagtcaaaggctgtactaggagactagtggtgcagcaggtggggaaggcagacgccggcgagtatagctgcgaagccggcggacaaagagtatccttccaattgcatattaccgaacctaaagccgtattcgctaaagagcagctcgtgcataatgaggttaggacagaggctggtgcatctgccaccctgagctgcgaggtagcccaggcccaaacagaggtgacctggtataaggacggcaagaagttgagttcctcgagcaaggtgaggatcgaggctgcaggatgcatgcgacagctggttgtgcagcaggccggccaggccgatgctggagaatatacctgtgaggccggaggacaacgactttccttccacctcgatgtctccgagcctaaggccgtcttcgctaaggagcagctagcccacaggaaggtgcaagccgaggctggagcaatagctaccttgagttgtgaggtggctcaagctcagaccgaagtgacctggtacaaagacgggaagaagctgagtagttcctcaaaagtgcgcatggaggccgtaggttgtactaggagactggtagtgcaacaggcatgccaggccgatacgggggagtatagttgcgaagcaggaggtcagcggctgtcgttcagtttggacgttgctgagcccaaggtagtattcgccaaggaacagccagtacaccgcgaagtgcaggcccaggccggcgcttctactaccttgagttgcgaggtggcccaggcccagacagaggtcatgtggtataaggatggaaaaaaactgagcttttcctccaaagtgcggatggaggccgtagggtgcacgcggcgtcttgtcgtacaacaggcgggacaggccgtcgctggtgagtattcatgtgaagccggatcccaacgcttgtccttccaccttcacgtcgccgagcctaaggcggtttttgccaaggaacagcctgcctcccgggaagtccaagccgaagctggaacaagcgccaccctatcttgcgaggtcgcccaggcccagaccgaagtaacatggtacaaagacggcaagaagctcagctcttctagcaaggtgcgaatggaggcagtgggatgcaccaggcgcctggtggtgcaagaggccggtcaggctgacgctggtgagtacagctgcaaggccggggatcagagactgtctttccatttgcatgtagcagaaccgaaggtggtgtttgcaaaggagcagcctgcccatagggaggtgcaagcggaagccggggcatcggcgactctctcctgcgaagtagctcaggctcagaccgaggtaacgtggtacaaggatggaaagaagttgtccagtagctcaaaagtgagggtcgaggcagtgggatgcacgagaaggctggtggtacaacaagccggtcaggcggaagctggtgaatatagttgtgaggcaggaggccaacagctcagctttaggctccaggtagctgagttggagccgcagatatcggagaggccctgccggcgtgaaccccttgttgtgaaagaacatgaagacataatcctgacagccacactggccaccccgtcagcagccactgtgacctggctcaaggatggggtcgagatacgtcgaagcaagaggcacgagaccgccagccagggggatacccacacattgactgtacatggggcccaggttctggatagcgctatttacagttgccgagtgggcgccgagggccaggattttcctgttcaggtggaagaggtggcagctaagttttgccggttgctcgaaccagtgtgcggggaactaggcggaaccgtgactcttgcctgtgagctgtccccggcatgtgccgaggtagtgtggagatgtggtaatactcagctgagagtgggaaagcgatttcagatggtcgcagaaggccccgtccgcagcctgactgtcctcggactgcgagccgaggatgccggtgaatatgtgtgtgaatcccgcgatgatcacacaagtgctcagttgactgtgtccgtgcctagggttgtgaagttcatgagcggactgtccactgtggtagccgaagaggggggcgaagcgactttccaatgtgtggttagcccctctgacgttgctgttgtctggttccgcgacggtgctttgctgcagccgtcagagaaatttgcaattagtcagtctggcgcatctcatagcctgaccatctctgatctggtactcgaggacgccggacagatcaccgtggaagctgagggcgcaagctctagcgccgcactgagagtcagggaagcccccgtgctgttcaagaagaagctcgagccccaaacggtcgaagagcggagctcagtcacgttggaggtggaattgacccgaccttggccggaattgcgttggacccgaaacgcaaccgctctggctccaggcaaaaacgtagagatccatgctgagggggcaagacaccggcttgtattgcataacgtggggtttgcagaccgaggctttttcgggtgtgagacacctgatgacaagacgcaagcaaaactgaccgtggagatgcgccaagttagactggtccgcggcttacaagcagttgaagcacgagagcagggaacggctaccatggaggtgcaactttctcacgccgatgtggacggcagttggactcgcgatgggttgaggtttcagcagggcccgacatgtcatttagcagtgcgggggccaatgcatacgctgacactctcgggcctgagaccggaggactccggtctgatggtgttcaaggcagagggcgtgcacacctccgccaggctggttgtgactgaactgcccgtgtccttctctaggccgctacaagatgttgttacaacggaaaaggaaaaggtgacactggaatgcgagctatccagaccaaacgttgacgtaagatggctaaaggacggggtcgaacttagagccggcaaaacaatggccatagctgcgcagggggcctgcaggtctttaaccatttatagatgcgagttcgctgatcagggtgtgtatgtgtgcgatgctcatgatgcccagtctagcgcctccgtgaaagttcagggccggacctatactttgatctatcgaagggtgttagcagaagacgccggggagattcagttcgtggcagagaacgctgagtcccgggcccaactaagggttaaagaacttcccgtgacacttgtacgacctctgcgggacaagatcgccatggagaaacaccggggcgtcttagagtgtcaagtgagccgagcgtcagcacaagtcagatggttcaaaggtagtcaggaactccagcctgggcccaaatatgaactggtttccgacggactgtatcgcaagttgattatttctgatgtgcacgcagaggacgaagatacatacacttgtgatgcaggggatgttaagacttcagcccagtttttcgtagaggagcagagtattaccatagtaagaggactgcaagacgttaccgtgatggaacctgccccagcctggtttgagtgcgagacatcaattcccagtgtacgaccacccaagtggctcctgggaaaaactgtactgcaggctggtggcaacgtggggctggagcaggaaggaacagtgcatcgtctgatgttgcgaaggacatgctccacaatgaccgggcccgtacattttaccgtgggtaaatcgaggtcatcggcacgtttagtggtgtccgatattcctgtcgtcttgacccggccactggagcccaagacaggccgggaactccagtctgtagtcctatcgtgcgactttaggcccgcaccaaaggccgtccagtggtataaagatgacactcccctgtccccgtcagaaaaattcaaaatgtctctcgagggccaaatggcagaactgcgaatcctccggctgatgcccgccgacgcgggggtctacagatgccaggcggggtctgcccacagtagcaccgaggtaactgtcgaggccagggaagttacggtgaccggaccgctgcaggatgctgaggcgaccgaggagggctgggcaagcttttcttgcgaattaagccacgaagacgaggaggtggaatggagcctgaatggcatgccactttacaacgattcttttcatgaaatttcccataagggaaggcgtcacacattggtccttaaatctatacagcgcgccgacgccggcattgtgcgggcctcttctctgaaagtatccactagtgcccgactggaagtgagggtgaagcctgtggtttttttgaaggcattagatgacttgagcgcagaagagcgcggcactctagccctgcaatgtgaagtttcagaccccgaggctcacgtcgtgtggcggaaggacggggtgcagctggggcctagcgacaagtatgattttcttcatacggctgggactcgcggtttggtcgtgcatgatgtgtcacctgaggacgctggcctatatacatgtcatgtcggtagtgaagagacacgcgcccgggttagagttcacgacctccatgttgggatcaccaagagattgaaaaccatggaagttctggagggtgagagctgtagttttgaatgcgttctttcccacgaatcagctagcgatccggctatgtggacagtggggggaaagacagtcggctcttcgagccggtttcaggccacccgccagggaaggaagtacattctggtcgtgcgagaagcagcgccgagtgatgcgggggaggtggtgtttagcgtacgcggcctgacgagcaaagcgagtttgatcgttcgtgagcgaccagcggcaatcattaagcctctggaagaccagtgggtggcacccggcgaagacgtcgagctgagatgtgagttgtcaagggccgggactcctgtgcactggctgaaagatcggaaggccattcgcaagagccagaagtatgacgtcgtgtgtgaaggcaccatggccatgctcgtgattagaggcgcttccctgaaggatgctggagagtacacgtgtgaagtggaggccagcaaatcaaccgcgtcactccacgtagaggagaaagctaactgctttacagaggaactgacgaacctgcaggtcgaagagaagggaacagctgtattcacgtgcaaaacagaacatcctgctgcaactgtaacctggagaaaaggacttctcgaactccgggcgagtggtaaacaccagccctcgcaagaagggctcactttaaggctcactatctccgcattggagaaggctgattccgatacctacacttgcgacataggtcaggcgcagtctagagcccagctgctggtacagggtcgcagagttcacattattgaagatctcgaggacgtggatgtgcaagagggcagctcagccaccttcaggtgtagaatcagcccggcgaattatgagccagtgcattggtttctcgataagaccccgctgcacgcaaatgaacttaacgagattgatgcacagcccggcggttaccatgtactgacactgaggcagctggcgcttaaagactctgggactatttactttgaggcaggagatcaacgtgcttcggccgccctaagagtgactgaaaagcccagcgtgttctccagagagctgactgatgcaacaatcacagagggggaggacctgacccttgtgtgtgaaacatctacctgtgatataccagtttgctggactaaggatggcaaaactttgaggggatccgcacgctgtcaactgtcccacgagggacaccgcgctcaactgctgataaccggtgccaccctgcaagacagtggtaggtataaatgtgaagcaggaggagcctgttcaagcagcattgtgagagtccacgcaagacctgtacgtttccaagaggcgcttaaggatctcgaggtgctggaggggggcgccgccacattgcggtgtgtgcttagcagcgtggcagcccctgtaaagtggtgctatggtaacaacgttcttcgtccgggcgacaaatacagcctacgacaagagggcgcgatgttggaacttgtggtaagaaatctacgccctcaggatagtgggcggtactcctgctctttcggggatcagactacctcagctacactcacagtgacagcccttcctgctcagttcatcggcaagttgagaaacaaggaggctaccgagggtgctacggccaccctgcgatgtgagttgtccaaagctgccccggtagagtggagaaagggttctgagaccctccgagatggggatcggtactgcctgaggcaggatggggcaatgtgtgagttgcaaattcgcggattagcgatggtggatgccgctgaatattcttgcgtgtgcggcgaggagagaacttctgcatctctcactatcaggcctatgccggcccacttcattgggagactgaggcaccaggagtccatcgaaggcgctactgctaccctgagatgtgagctttcaaaggccgcccctgtggagtggcgtaaaggcagggagtccctgcgcgatggagataggcatagcttaagacaagatggggcagtgtgcgaactacaaatctgcgggctggccgtcgccgatgcgggtgaatacagctgcgtttgtggagaggaacggacatccgctacgcttaccgtaaaggcgcttcccgctaagtttacagagggacttcgaaatgaggaggccgtggagggagctaccgccatgctgtggtgcgagctgtccaaagtagcaccagtggagtggaggaaaggccccgagaatctccgcgacggcgaccgctatatattgagacaggaagggactaggtgcgagctgcagatttgcggtttggcaatggcggacgcaggcgaatatctctgcgtgtgcgggcaggagcggacctccgccacactaaccattcgcgcccttccagctaggttcatcgaggatgtgaagaaccaagaagcgagggagggtgccacggcggtgctccagtgtgaacttaactccgcggcccctgtcgaatggcggaaaggttctgaaactttgagagacggagatcgatatagtcttcggcaggatggaacaaagtgcgagctgcagatccggggactggcaatggctgacacaggagagtattcttgcgtatgcggacaggagaggacatccgcaatgcttaccgtgagagccctcccaattaagtttactgagggcctgcggaacgaagaagcaactgaaggcgccacagctgttctgcgctgcgagctgagcaaaatggctcccgttgagtggtggaagggacatgagaccctgagggatggcgaccgccatagcctccgccaggatggggctagatgtgaattgcagattcggggccttgtggcagaggatgccggcgaatacctctgcatgtgcggcaaggagcggacctctgccatgctgactgtccgggctatgccctctaagtttatcgagggcctgcggaacgaagaggcaaccgagggagacacagctacactgtggtgtgagctgagtaaggcagctcctgtcgaatggcgtaagggccatgagaccctacgagatggagacagacattctctgcgacaggacgggtctcgctgtgagcttcagatccgcggactggccgtagtggacgctggcgagtatagctgtgtgtgcgggcaggaacggacatccgctacactgaccgtcagagcattgcccgctcgctttatcgaagatgtgaagaaccaggaggcccgcgaaggggctactgctgtgctccagtgcgaactgtcaaaggcggctcctgtggaatggaggaagggcagtgaaacactgagaggaggggatcgctattctctgcgacaagatggaaccagatgcgaacttcagatccacggcctgtcagtggccgacaccggggagtacagctgcgtctgtggccaggagcgcacatccgcgactctgaccgttagggctccacagcccgtgttcagagaacccctgcagtcccttcaggctgaagaaggctccacagctactctgcaatgcgaacttagtgaacccacagccacggtggtttggagcaaggggggcctgcagttgcaggctaatggccgaagagaaccgaggctccagggatgcaccgcggagctggtccttcaggatctccaacgcgaggatactggcgagtatacgtgcacctgtggctctcaggcaacatccgccaccctgactgttactgccgctcccgtccgattccttcgagaactccaacatcaggaggttgacgagggagggacagcccacctatgttgcgaactctcaagagcgggagcttccgtggagtggcgtaaagggagtttgcaactgttcccatgcgcaaagtaccaaatggttcaggatggtgcagccgctgaactgctggtgcgtggagtggaacaagaagatgcaggagactatacctgcgataccggacacactcagagcatggctagcctgagtgtgcgcgtgcctaggccgaaatttaaaacacgactgcagagcttggaacaagagactggcgatatcgctaggctctgctgtcagctctctgacgcggagagcggagctgtggtgcagtggctgaaagagggcgttgagctgcatgctgggcctaaatacgaaatgcggtcacaaggagccacccgggaactgctgatccaccagttggaggcgaaggacacaggcgaatacgcatgtgtgaccgggggacagaagactgcagcttcacttcgagtgactgagcctgaagtcacaatagtgcgcggactggtggatgctgaagtaactgccgacgaagatgtggagtttagctgcgaggtctcccgcgctggtgcaacaggggttcagtggtgtctccagggattgcccctccagtcgaacgaggttacagaggtggctgtgcgcgacgggaggattcataccctccgtctgaagggcgtgacgccagaagacgctggcaccgtatcattccatctggggaatcatgcttctagcgcgcaattaactgtacgagctcccgaggtgaccattttggagcctctccaggatgtccagctctctgagggtcaagatgcttcctttcaatgtcgcctatctagagccagcggacaggaggcccggtgggccctggggggtgttcccctacaagcaaatgagatgaacgacatcaccgtggagcagggcaccttgcatctgctaactctgcataaagtgaccctcgaggacgccgggactgttagcttccacgtcggcacttgtagctcagaggctcagctcaaggtgactgctaagaacacagtggtccgcggccttgagaacgtcgaggctttggagggcggtgaagccctgtttgagtgccagttgagtcagcccgaagtggccgcccatacatggctcctggacgatgagccagttcatacctcagagaacgccgaagtggtcttcttcgaaaatggtcttaggcatttgcttctgctgaagaatctcagacctcaagactcatgtcgggtgacgttcctggcaggtgatatggtcacttccgcttttctcacagtcagaggatggaggctcgagatcctcgaacccttgaaaaacgcagctgtgcgagcaggcgcgcaggcctgctttacatgtacactcagtgaggcagtgccagtcggggaagcaagttggtacattaacggtgctgccgtgcagcctgacgattcagactggactgttaccgcagacgggtcccaccacgccctgctactgcgttctgctcagcctcatcatgccggagaggtgacctttgcatgtcgagacgcagtcgccagcgcccgtctcaccgttctcggcctgccggatcctcccgaagatgctgaagtcgttgctcggtcaagccatacggttaccctgagctgggccgctcctatgtctgacggcggcggaggtttgtgcggctaccgggtggaagtgaaggagggggccacagggcaatggcgactctgccacgaattggtcccaggacctgaatgcgttgtggatggtctcgcgcccggtgagacctaccgatttagggtggccgccgttgggcctgttggcgccggagagcccgtgcacctgcctcaaactgtgcgactggccgaaccacccaagccggtgccgcctcaaccatcagctcccgagtccaggcaagtggccgcaggggaagacgtgtctctggaactggaagtagtcgctgaagccggagaggtgatctggcataaaggcatggagcgaatccagccaggcggccgatttgaagtcgtgagtcaggggcggcagcagatgctcgtgatcaaagggttcacggccgaggaccaaggggaatatcactgcggccttgcccagggttcaatctgtcctgctgcggccacattccaggtcgcattgtccccagcctccgttgacgaggcaccccagcccagcctccccccagaagcagcacaggaaggggacctccacctgctgtgggaggcattggcccgaaaaagaaggatgtcacgagaacctacattggactctatcagtgaactgcctgaagaagacggacgcagtcaacgtctcccacaagaagcggaggaggtcgcacccgacctgtcggaggggtacagcactgctgacgagctggctcgcaccggtgacgcagacttgagccacacttccagtgatgatgaaagtagggcagggactcccagccttgtgacttacctgaaaaaggccggccgtcctggcaccagtcccttagctagcaaagtgggcgcacccgccgctcccagcgttaagcctcaacagcagcaagagcctctggcagcagtgagaccaccactgggggatctttccaccaaagacctgggcgacccctctatggacaaagccgccgttaagatccaggccgcattcaagggatataaagtgaggaaggagatgaagcagcaggagggcccaatgttttcacatacattcggcgatacagaggcacaggttggcgatgccctgcggctggagtgcgtggtcgcaagcaaggctgacgttcgagccaggtggcttaaggatggcgttgagctcactgatggccggcatcatcatatagaccagctcggtgatggtacctgtagcttgctgatcaccggcctggacagagctgacgcaggatgctatacctgccaggttagcaacaagtttggacaggtaactcatagcgcctgcgtcgtggtgtccgggagtgagagtgaagccgaatcttcatcaggcggcgaacttgacgacgccttccggcgtgccgccaggcgtttgcatagactcttccggactaagtcgcctgccgaagtgtctgacgaagagctgtttctgagcgccgatgagggaccagcagaacctgaggaaccagcagattggcagacctaccgcgaggatgaacactttatctgtatcaggtttgaggcactgaccgaggccagacaggctgtgacccggttccaggagatgttcgctactctgggcattggagtggagatcaagttagtcgaacaggggccaaggcgggtcgagatgtgtatatccaaggagacaccagcgccagtcgtgcctcccgaacctctccccagtctcctaacaagcgacgcagcccctgtgttcctcacagaattgcagaaccaagaggttcaagatgggtatcccgtttccttcgactgtgtggtcacaggccagccaatgccaagtgtcaggtggttcaaggacggcaaattgctagaggaagatgaccattatatgattaatgaagaccagcagggcggacatcaactgattatcaccgcagtggtgccagctgacatgggcgtataccggtgtctagcggagaacagcatgggggttagcagcacaaaagctgagcttcgggtcgacctaacctcaacagactacgacaccgctgccgacgcaacggaaagttcttcatatttctccgcccagggctacctctcttctagggagcaggaggggactgagagcacaactgatgagggacagctgccccaggtggtagaagaactgcgagacctacaggtcgcacccggaactagattggctaagtttcaattgaaagtcaaagggtacccagcaccccgcctgtactggtttaaagacggccagccccttaccgcatccgcacatatcagaatgaccgacaagaagatactgcatactttagaaataatctcagttacgcgggaagattccgggcagtatgctgcctacatctcaaacgccatgggcgctgcctattcatccgccaggctgttagtgcggggcccggacgagccagaagaaaagccagccagcgacgtgcatgaacagctcgttccgccccgtatgctggagcggttcacacccaagaaggtaaagaagggatctagcatcaccttttctgtaaaggtcgaaggccggccagtcccaacagtgcattggctccgggaggaagctgagagaggagtgctgtggatcgggccagataccccaggttatactgtcgcatcttcagcccagcagcactcactggtgctcctggatgtgggcaggcagcatcaggggacttatacgtgtatagcatcaaacgccgcgggacaggccctttgttccgcaagcctgcacgtctcagggctaccgaaggtcgaggaacaggaaaaggtaaaagaagcactcatctcaacgttcctgcagggtacaactcaggcgatatccgctcagggtttagaaaccgcaagctttgccgatcttggaggccagagaaaggaggagcccctggctgctaaagaggcattaggacacctatccctcgccgaggtcggcactgaagaatttctgcagaagctgacaagccagatcactgagatggtgagcgccaaaattacccaggctaaactgcaagttcccggaggcgactctgatgaagattctaaaacaccctcagccagccctaggcatgggaggtctcgtcccagcagttctatccaagagagctcatccgagagtgaagacggggacgctaggggcgagatcttcgatatttacgttgtcaccgcagattatctccctctaggagcggagcaggatgctataactctgcgggagggacaatacgtcgaggtgctggacgccgcccatcccctgcgctggctggtgcgtaccaagcccacgaagtcgtcaccttctagacaaggttgggtaagtcccgcttatcttgatcgaagactcaagctcagccccgaatggggcgctgctgaggcgcccgaatttcctggagaggccgtgtcagaggacgagtacaaagcacgattaagcagtgtgattcaagaactcctctcatccgaacaggcttttgtggaggagctacagtttcttcagtcgcatcacctgcagcacctagagagatgtccccacgtccctattgctgtagcaggacagaaggccgtgatctttcgcaatgtgagggatattggccgattccattcatccttcctgcaagaattgcagcagtgtgacacagatgacgacgtggcaatgtgtttcattaagaatcaggctgccttcgagcaatatctcgaatttttagtcggccgtgtgcaagctgaaagcgtggtggtgtccaccgctattcaggaattctataaaaagtatgctgaagaagcacttctagctggagacccatctcagccccccccccccccattgcagcattacctggaacagcctgtcgagcgagtacaacggtaccaggcactgctgaaggaactgattcgcaacaaggcccgtaaccgccagaactgcgcccttctcgagcaagcctacgccgtcgtctctgcactccctcaaagagcggaaaacaagctccatgtgagcctcatggagaattaccccggcacactgcaagccctaggggagcccatcagacagggccattttatcgtgtgggaaggggctcccggggcacgcatgccatggaaggggcataaccgacacgttttcttgttcagaaaccacctggtcatctgcaagccaaggagagactccagaacggatactgtttcttatgtctttagaaacatgatgaaattatcttcaatcgacctgaacgaccaggtcgagggcgacgacagagccttcgaagtgtggcaagagagagaagacagtgtccgtaagtacctgctgcaagcacgcacagccattatcaaaagttcgtgggtaaaagaaatctgcggcattcagcagcggctcgccctgcctgtgtggcgccccccggattttgaggaagaactcgcagattgcaccgccgagcttggagagaccgttaagctcgcatgccgagtcactggaaccccaaaacctgtgattagctggtacaaggacggaaaagcggtgcaagtagacccccatcacatcctgatagaagaccccgatgggagctgcgctctcattttggattccctgacgggcgtggacagcggtcaatacatgtgcttcgcagcctctgctgcaggcaactgtagcactctcggaaagattcttgtccaggtgccccctagatttgtaaacaaagtgcgagccagccccttcgtcgaaggagaggacgctcaatttacttgtaccatagagggcgcaccttaccctcagattagatggtataaggacggggcactactcacgaccggtaataagtttcagacattaagcgagccaaggtccggactgcttgtgcttgtgatccgtgccgccagcaaagaggacctgggactgtatgagtgtgaacttgttaaccggctcggttccgctcgagccagcgcagaacttaggattcagagtcctatgctgcaggcccaggaacagtgtcatcgggagcagctcgtcgccgctgttgaggtgactgaacaggagaccaaggtgcccaaaaagaccgtgataatcgaagagactataacaacagtcgtcaagagcccacgcggacagcgaagaagccccagcaaatcaccttcccgcagtcccagccgctgctcagcatcccccttgcgccccggactccttgctcccgacctcttgtatctgccaggtgcaggccagcctcgacggccagaggcggaacccggccagaaaccagtggtccctaccctgtacgtcacagaagctgaagcacattcccccgctttgccagggttatcagggccgcaacccaagtgggtcgaggttgaggaaaccatcgaggtacgcgttaagaaaatgggcccacagggggtgagccctacgacagaggtgccccgaagcagttctggacatctgtttaccctacccggagctactcccggtggagacccaaacagcaataattcaaataataagctcctggcgcaagaggcctgggcccaggggaccgccatggtgggagtgcgggaacctcttgttttccgagttgatgctcgtggttccgtcgactgggccgccagcggaatgggatcactggaggaggagggaacaatggaagaggccggtgaggaggaaggggaagatggagatgcctttgtcacagaggaatcacaggatacacactctctgggagaccgggatcccaagattcttactcataatggccggatgctgactctggccgacctggaggactatgtgccgggggaaggcgagacatttcattgtggtggaccaggccctggcgcccctgacgatcctccatgtgaggtctccgtcatccagcgagagattggcgagcccactgtgggtcagcccgtgttgctgagcgttggtcacgccctggggccgcgcggcccacttggtctgttcaggccagagccgagaggtgcaagcccgcccggcccacaggtgaggagcctcgagggaacatcattcttactgcgcgaagctcccgcgagaccagttggctctgccccttggacgcagagcttttgtacaaggattaggcgcagcgctgacagcggtcagtccagctttacgacagaactctcaactcagacagtcaactttggcaccgtgggcgaaacggtgaccctgcacatttgcccagatcgtgatggggacgaagcagcccaaccatag

SEQ ID NO: 229266 - DNA, 11220 bp, Artificial Sequence
  derived and/or modified sequence
atgctggtgatcagaggggcttcactgaaagacgccggggagtatacctgcgaggtggaagcgagcaaatcaactgcctccctccacgtggaggagaaggccaattgtttcaccgaagagctaacaaacctgcaggtggaagagaagggaaccgctgttttcacctgtaaaactgagcacccggctgccactgtaacttggaggaagggccttctggagctacgggcatctgggaaacatcagccttctcaagaaggacttacactcagattaacaatatcagcactggagaaggccgatagcgatacctatacgtgtgatattggccaagctcagtctagggcccagctgctggtccagggccggagggtgcacatcatcgaggacctggaagatgttgatgtccaagaaggctccagtgccactttcaggtgtcggatttcgcctgccaattacgagcctgtgcactggttcctcgataagacaccactccacgctaacgagttgaacgagatcgatgcccagcctgggggctaccacgtccttacgctgaggcagctagccctgaaggattccgggaccatttatttcgaggccggcgatcagcgtgcaagcgccgcactgcgcgtaactgagaagccgtcagtctttagccgtgaactgactgatgcgacgattaccgagggcgaagatctgaccctggtctgtgagacctcaacatgcgatatcccagtttgttggactaaagacgggaagacattacgtgggtccgcaagatgtcagctgagtcatgaaggccacagggcacagctgctgataacgggagctacactccaagattccggaagatataagtgtgaggcaggaggagcctgctcctcttctatagtgagggttcatgcccgacccgtcaggttccaggaggccttgaaggacttggaagtgttggaaggcggagcagccaccctaagatgtgtgctttctagcgttgccgccccagtcaaatggtgttatggaaacaacgtgcttcggccaggggacaagtattctctgagacaagagggcgccatgctagaactggtcgtccggaaccttcgaccacaggacagtggacgctacagctgtagcttcggcgatcaaaccacatctgctacactcactgtgaccgctctgccagcccagtttataggcaagctcaggaataaagaggcgaccgaaggcgctacggcgacactaaggtgcgagttgagcaaagcagcacccgttgagtggcgaaaggggtctgagactctgcgagacggcgacaggtattgccttcggcaggatggagcgatgtgcgaacttcaaattcgtggattggccatggtggacgccgctgagtatagctgtgtgtgcggcgaagagcgtacaagtgcttccctgaccataaggcctatgcctgcacatttcattggacgccttcggcatcaggagagcatcgaaggggctactgcaacacttaggtgcgagctatctaaggcggcccccgtggaatggcgaaagggcagggagtcactcagagacggagacagacatagcttgagacaggacggtgcggtgtgtgagctgcaaatttgtgggttagctgttgcagacgccggagaatacagctgtgtctgtggggaagaacgaacaagtgccacactgacagtgaaagctctgcccgcgaaatttacagagggcctgcgcaacgaggaggctgtcgaaggagccacggcaatgctatggtgcgagctgtccaaagttgcccctgtggagtggagaaaggggccggaaaacctaagagatggggacagatatatcctgcggcaggagggtactcgctgtgaactgcaaatctgtggcctggcgatggctgacgcaggcgaatacttgtgtgtatgtggccaagagcgcacatcggcgactctcaccatccgtgctctgccagctaggttcatcgaggacgtcaaaaatcaggaggccagggagggcgctactgcagtccttcaatgcgagctgaattctgcggccccagtcgagtggaggaaaggatctgagactctgcgcgacggagaccgctactctctcagacaagacggcacaaaatgtgagctgcagattcgtggccttgccatggccgacacgggtgagtatagctgcgtctgcggccaggagagaacctcagccatgttgactgtgagagctctgcccatcaagttcaccgagggcctgcgaaatgaagaagcgactgagggagcgacggccgtcctcagatgcgaactgagtaagatggcaccggtcgagtggtggaagggacacgaaactctccgagacggtgaccgacatagcctgcggcaagacggagccaggtgcgagctccagattagaggactggttgcggaggacgcaggggagtacctgtgcatgtgtgggaaggaaaggacctccgctatgttgaccgtccgagccatgccatctaagttcattgagggtttgcgcaacgaggaagccaccgagggtgatacagctacactctggtgtgaactctccaaggccgccccagtagagtggcgaaaagggcacgaaaccttacgggacggagacaggcattccctccgacaggacggttcgaggtgcgaacttcagattagggggctcgctgtcgtggatgccggagagtacagttgtgtctgtggacaggaacgcactagcgctacactgacggtccgagccctgccagcccgctttatagaggacgtaaaaaaccaggaggctagagaaggcgccacagcagttcttcagtgcgaactctccaaggctgcgcctgtagagtggcgcaaagggtccgaaacgctccgggggggggatagatactcattaagacaggacgggacacgctgtgaactgcagatacatggactcagtgttgcggacacaggagagtactcttgtgtttgcgggcaagaacgcaccagtgcaaccctcaccgtgagagccccgcagccagtatttagagaacctttgcagtcactacaggctgaggagggatctaccgctacccttcaatgtgaactctcagagccaacggcaacggtggtttggagtaagggcgggctgcagctccaagctaacgggcgtagggaaccgcggctgcaggggtgcacagcggagctggtgctgcaggacctccagcgagaggatacaggggaatacacttgcacttgtgggtcccaggcaacgtctgccacattgacagtgactgccgcccctgtgcggtttctgcgggagctacagcaccaggaggtggatgaaggtggcacggcccacctgtgttgtgagctgagccgcgcaggcgcctccgtagagtggcggaaggggtccttacaacttttcccttgcgccaagtatcaaatggtccaagatggagcagctgctgaactcttggttcggggtgtggagcaagaggacgccggcgactatacatgtgatactggacatacacagtctatggctagtctcagcgtaagagtgccccgcccaaaattcaagaccaggctccagtctctcgagcaggaaactggtgacatagcccgcctttgttgccagctatccgacgccgaaagcggtgcagtcgtccagtggctcaaggagggcgtagaacttcatgccgggccgaagtatgaaatgcgcagccagggagcgaccagagagttactcattcatcagctggaggcaaaggataccggcgagtacgcgtgcgtcactggaggacagaaaaccgcagcaagcctcagagtgactgaacccgaggtgaccatagtgagaggcttggttgatgccgaggtaaccgccgacgaggacgtcgagttttcttgcgaggtgagccgtgccggggcaaccggcgtgcagtggtgtctgcagggacttccactacaatcgaatgaagtgaccgaagtggccgtgagggacggacgtattcacacgctgcgactaaagggggtgacgccagaggacgctggtaccgtgtcctttcacttgggaaaccatgcttcatccgctcagctgaccgtccgagccccagaagttactattttagaaccgttgcaggatgtccagttgagcgaggggcaagatgccagttttcagtgtaggctatcacgggcctccggccaggaggcaagatgggccttgggaggcgtacctttacaggccaacgaaatgaacgatatcaccgtagaacagggcactcttcacctgctgacgttacacaaggtgacccttgaggatgccggcactgtgtcctttcatgtagggacctgtagttcagaggctcagctgaaagtgactgctaagaatacagtcgtccgggggttggaaaatgtggaggccctggaaggcggcgaggcccttttcgagtgccagctttcacaaccggaggtcgccgcccacacctggctcctagatgatgagcccgttcatacatccgaaaatgctgaggtggtattcttcgagaacggattgcgacacctgttgctgctcaaaaacttacggcctcaggattcttgccgcgtaactttccttgctggggatatggtaactagcgcgttcctcactgtccgcggatggagactggagatcctggaacccttaaagaatgctgccgttcgggccggtgctcaggcttgtttcacatgcacactgtctgaggcagttcccgtaggggaagccagttggtatataaatggcgctgcagttcagcccgatgatagtgactggactgtgacggcggatggtagccatcacgcactcctgttaagatccgcccagccacaccatgccggagaggttacttttgcgtgccgcgacgctgtagcctccgccaggctgactgtgctgggcctacctgatccccccgaggatgcagaggtggtcgccagaagctcccacacagtgaccctaagctgggctgctcccatgtctgatggcgggggtggcctgtgcggatacagggtcgaagtcaaagaaggcgccacaggtcagtggaggctctgtcacgaactcgtccctgggcctgagtgtgtcgtggacggtttagctcctggagaaacatatagatttcgtgtggctgccgtgggcccggtaggggccggtgagcctgttcatctgcctcaaaccgtgcggctagccgaaccccctaagccggtgccacctcagccctctgcgcccgagtcccgccaggttgcagccggagaagacgtgtcgctggaactggaggttgttgccgaggctggagaagtgatatggcacaaaggcatggagagaatacagcccggaggaaggtttgaggtggtaagccaagggcgacagcagatgctggtgatcaagggattcacagccgaggaccaaggagagtatcactgcggcttggcccagggcagtatctgtcctgctgctgccactttccaggttgctttgtccccagcctcggtggatgaagcaccacagccaagtttaccgcctgaagctgctcaggagggagatctacacctcctgtgggaggctctcgcacgaaagcgtcgaatgtcaagagaaccgaccttggatagtatcagtgaattaccggaagaagacgggaggtcccaacggctcccacaggaggctgaagaggtcgcgccagatctgtccgaaggatactctacagccgacgagctggcgaggacaggtgatgcagacctaagccacacttccagcgatgacgagtccagagctggcacaccgtccctcgtcacctacctgaaaaaagccggacgaccaggaacctcccctctggccagtaaagttggtgcccctgccgcaccatctgtcaaacctcagcagcaacaggaaccacttgctgcagtccgcccaccccttggggacctgtccaccaaggatcttggcgatccttccatggataaggctgccgtcaaaatccaggcagcctttaagggctataaggtcagaaaggagatgaagcagcaggaggggcccatgttctcccatacatttggggatactgaggctcaggtaggggatgcactgcggttggagtgcgtggtggcctccaaggccgacgtgagggctcgatggttgaaggacggcgttgaactgaccgatggacggcatcaccacattgatcagcttggtgacggcacttgcagtctgcttattacagggctggatcgggctgatgcaggctgctacacatgccaagtgtctaataagttcggccaggtaacgcattcagcttgcgtcgtagtgagcgggtcagagagtgaagccgaatcctctagtggaggcgagctggatgatgccttcaggcgggcagcccggcgtctccataggctgttccgtacgaagtcccccgccgaggtctccgacgaggagcttttcctgagcgcggatgagggcccagccgaacctgaggaaccggcagactggcagacatatcgggaggatgaacactttatctgtatccgcttcgaggcattgacagaggcccgccaggcggtgacccgttttcaggagatgttcgccaccctcggcataggtgttgagatcaagctagtcgaacaggggccccgcagggtggagatgtgtattagcaaagagactccagcccctgtggtgcccccagagccgctaccgagtctgctgacatccgatgcagcacccgtcttcctgacagagctccagaaccaagaggttcaagatgggtatccagtgtcgttcgattgtgtcgtgaccggacagcccatgcccagcgtgcgctggtttaaggacggcaagttgctggaggaggacgatcattatatgataaacgaggatcaacaggggggtcaccagctcatcattacagccgtggtgccagccgatatgggagtctaccgatgcctcgccgagaattccatgggggtctcatctactaaggcggagctacgcgtggacctgacttcaactgattacgacaccgccgcggatgctaccgagtcatcctcctatttcagtgcacagggctacttgagttctcgggagcaggagggaacagagtccacaacagatgaaggccagttacctcaggttgttgaagagctgcgtgacctacaggttgcaccaggcacccgtttggccaagtttcagctaaaggtgaagggctaccccgcacctcggctgtactggtttaaagatgggcaacccctgacagccagcgcccacatacgcatgacggataagaaaattttacatacgctcgaaattatatcagtcactcgcgaagattcgggtcagtatgctgcttacatttcgaatgcgatgggcgccgcttatagttccgctagactcttggtgagaggccccgacgagcccgaagaaaaacctgcctctgatgtgcatgagcagctagtgccccctcgcatgctggaacgcttcaccccaaaaaaagtaaaaaagggttcttcaattactttcagcgtgaaagttgagggccgaccagtgccaacagttcactggttacgggaagaggcagagcggggagtgctgtggatcgggcctgacactcccggctacaccgtggcttcatccgcacagcagcatagtctggtgttgcttgatgtgggccgacagcaccagggcacctatacctgcattgcgagtaatgccgccggtcaggctctctgttccgcttccttgcacgtgtcagggttgcccaaggtagaggagcaggaaaaggtgaaggaagccctgatcagcacgttcctacaaggcacaacccaggccatttccgctcagggactggagacagcctccttcgcagatttgggtgggcagagaaaagaagagccactggcagccaaggaggcgctgggccaccttagtctggcagaggtgggaaccgaggaattcctgcagaagctgacaagccagattaccgaaatggtgtccgcaaagatcactcaggccaagctccaagtccctgggggggatagcgatgaggattctaaaacgccctctgcgtcaccgaggcacgggcgctcacgtccttcttcttctatacaggaaagttcttctgaaagtgaggacggggatgctcggggagaaatctttgatatttatgttgtcacagcggactacttacccctgggtgcagaacaggacgccattacccttcgggaggggcagtatgtcgaggtgctggatgccgcccaccccctgcggtggctggtacgaacaaagcccacgaagtcttctcctagtcgtcagggctgggtgagccctgcgtatctggacaggaggctgaagttgtctcctgagtggggggcggcggaggctcccgaatttccaggggaagctgtgtcagaggacgagtataaagctaggctcagcagtgtcatccaggagctcctgagcagcgaacaagccttcgtcgaagagctccagtttcttcagagccaccatttacagcatctcgaaagatgtcctcacgtgcctatcgccgtagccggacagaaagccgtcatcttccggaatgttagagacattggccgtttccacagttcattccttcaggaactccaacaatgtgacaccgatgacgacgtcgcgatgtgtttcatcaagaaccaggcagctttcgagcagtacctcgagtttctggtaggacgcgtgcaggccgagtccgtcgtggtgtctacagcaatccaggagttttataagaaatatgctgaggaggctttgctggctggcgatcctagccagccccccccaccacccctccaacactacctggagcagcctgttgaaagagtccaacgctaccaggcactgctgaaggagttgatccgcaataaagctagaaacagacagaactgtgctctgttagagcaggcctacgctgtggtctcagccttgccccagcgggccgagaacaaactccatgttagcctaatggaaaattacccaggtaccttgcaggcgctgggagagcctattagacaaggacattttatcgtctgggagggcgcacctggcgctagaatgccttggaaaggacataacagacacgtttttctctttcgaaatcacctcgtgatatgtaagccgcgacgggattcccggactgacactgtgagctacgtattccgcaacatgatgaagctgtcaagcattgacctgaacgatcaggtcgagggtgacgacagagcttttgaagtgtggcaagaacgagaggactccgtgagaaaatacctcctgcaagcccgtacagcgattattaagagctcatgggtgaaagagatttgtggcatacagcagcgactggccctaccagtgtggcgccctccggactttgaagaggagctggctgattgtaccgccgagctgggagaaaccgttaagctggcttgtagagtgacggggactccaaagcccgtgattagttggtacaaagacggaaaggctgtccaggttgacccacaccatatccttatcgaggatccggacggcagttgtgcacttatcctagactcattgacaggtgtcgactctggccagtatatgtgttttgcagctagcgcagccggaaactgcagcacattgggcaagatcctggttcaagtgcctcctcgctttgtaaacaaggtgcgagcctccccctttgtggaaggcgaggacgcacagtttacttgtactattgagggagccccttacccgcagattcggtggtacaaagatggcgccctactgactactggcaacaagtttcagacactgtcggaacccaggtccggactcttggttttggtcatcagagctgcgtccaaagaagaccttggcctgtatgaatgtgagctggtgaatagattggggtcagcgagagcctcggccgagctgcgaattcagtccccaatgctccaggcccaagagcaatgccatcgggagcaactggtcgctgctgtcgaggtcaccgagcaggaaactaaggtgccaaaaaaaacagtgatcatcgaagaaacgattaccactgtggtcaagtcaccaagaggccagcgccggagcccaagcaaatcgccctcacgcagtccgtcacgttgttctgcttcacctttgcgccccggtctgctcgctcccgacctactgtacctcccaggagctggacagcctaggcgtcccgaagccgaaccaggacagaaaccggttgtacccaccctgtacgtgactgaagccgaagctcattcacccgctctgcccggactgtcgggacctcagcctaaatgggtggaggtcgaggagacgatcgaagtacgagtaaaaaagatggggcctcaaggcgttagccctaccaccgaggtgccacggtcctcctccggtcacctctttaccctgcccggagcaaccccaggaggggaccctaattctaacaactcaaacaacaagttgttggcgcaggaggcatgggcccaggggacagctatggtgggtgtcagggaacctctggtctttagagtagatgcaaggggctccgttgattgggcagcgagcgggatgggatctctggaggaggagggaacaatggaagaagccggcgaggaagaaggcgaagatggtgacgcgttcgtaacagaggagtctcaggacacccactcactcggggacagggaccccaagatcttgacacataacggaaggatgctgacgttggccgatctggaagactacgtgcctggggaaggcgagacgtttcactgtggaggcccaggccctggagccccagatgatcctccctgcgaggtcagcgtcatccagcgcgagattggcgaacctaccgttggccagccggtcctcctctcagtcggccatgctctgggccctagaggcccactgggactttttagacccgagccccgtggtgcctcaccaccgggtcctcaggtgcgatctctagaaggcacaagctttctccttcgcgaggctccggcccgcccagtcggtagcgctccatggacccagtccttttgcactcgcattcggcgcagtgccgacagcgggcagtctagtttcaccaccgaattatctacacagaccgtgaactttgggaccgttggggaaaccgtgaccctgcacatatgtcccgatcgtgacggcgacgaggcagctcagccatag

SEQ ID NO: 229267 - DNA, 19907 bp, Artificial Sequence
  derived and/or modified sequence
gctgcccagagcccccatagagagaggtccccgccgccaccctcatggatcagccacagttcagcggggcgccccgctttctcacccggcccaaggccttcgtggtgtcggtgggcaaggacgccaccctcagctgccagatcgtgggtaatcccacgccacaggtgagctgggagaaggaccagcagccggtggcggccggcgcgcgcttccgtctggcccaggacggcgacctctaccgcctcactatcctggacctggcgctgggcgacagtgggcaatacgtgtgccgcgcgcgcaatgccataggcgaggccttcgctgctgtgggcctgcaggtggacgcggaggccgcgtgcgccgagcaggcgccgcacttcctgctgcggcccacgtccatccgcgtgcgcgagggctcagaggccaccttccgctgccgcgtgggtggctccccgaggccggcagtgagctggtccaaggacgggcggcgcctgggtgagcccgacggcccccgcgtgcgcgtggaggagctcggcgaggcaagtgcgctgcgcattcgggcggcgcggccgcgcgacggcggcacttacgaggtccgcgccgagaacccgctgggcgctgccagcgccgccgcggcgctagtggtggactcggacgccgcggacacggccagccggcccgggacctccacggccgcgctcctggcgcacctgcagcggcggcgcgaggctatgcgcgccgagggcgcccccgcctcaccgcccagcaccggcacgcgcacctgcacggtgactgaaggcaagcacgcgcgcctcagctgctacgtgaccggcgagcccaagcccgagacggtgtggaagaaggacggccagctggtgaccgagggccggcgccacgtggtgtacgaggacgcgcaggagaacttcgtgctcaagatcctcttctgcaagcagtcggaccgcggcctctacacctgcacggcgtccaacctcgtgggccagacctacagctctgtgctggtcgtagtgcgcgagcccgcggttcccttcaaaaagcggctgcaagatctggaggtgcgggagaaggagtcggccacgttcctatgtgaggtgccccagccgtccactgaggccgcgtggttcaaggaggagacgcggttgtgggcgagcgccaagtacggcatcgaggaggagggcaccgagcgccgcctgaccgtgcgcaatgtctcggccgacgacgacgcggtgtacatctgcgagacgccagagggcagccgcacggtggcggagctcgcagtccaaggaaacctcctccgaaagctccctcggaagacggcggtgcgcgtgggcgacacggctatgttttgcgtggagctggcggtcccggtgggccccgtccactggctgcggaaccaggaggaagtggtggcggggggccgcgtggccatctccgcggagggcacgcgccacacactaaccatctcccagtgctgcctggaggatgtgggccaggtggcctttatggctggcgactgccagacgtccacccagttctgcgtgtcggcccccaggaagcctcccctgcaaccccctgtggatcctgtggtaaaggccaggatggagagttccgtgattctcagctggtccccaccaccccatggggaacgccctgtcactatcgacggctacctggtagagaagaagaagcttggcacctacacctggatcaggtgccacgaggctgaatgggtggctacacctgagctgaccgtggctgatgtggcggaggaggggaacttccagttccgagtgtccgctctcaacagctttggtcagagtccctacctcgagttcccggggactgtccacctggcccccaagctggccgtgaggacaccgctgaaggcggtgcaggcggtagagggtggcgaggtcactttctccgtggacctcacggtggcctcagcgggtgagtggttcctggatgggcaggccctgaaggccagcagtgtgtatgagatccactgtgatcgcacccggcacacgctcaccatccgggaggtgcccgccagcctgcacggggcgcagctgaagttcgtggccaacggcattgagagcagcatccggatggaggtccgggcggccccagggctgactgccaacaagccgccagccgcagctgcccgggaggtgctggctcggctgcacgaggaggcgcagctgctggctgagctgtcagatcaggctgcggctgtgacgtggctgaaggatggtcgcacactgtccccaggccccaagtatgaggtgcaggcatcggccgggcggcgggtgctccttgtgcgagatgtggcccgggacgatgcaggcctctacgagtgcgtcagccgcgggggccgcatcgcctaccagctctccgtgcaaggcctcgcgcgctttctgcacaaggacatggcgggcagctgtgtggatgccgtggctgggggcccggcgcagtttgagtgtgagacctccgaagcccacgtccacgtgcactggtacaaggatggcatggagctgggccactccggtgagcgcttcttgcaggaggatgtggggacgcggcaccggctggtggcagccacagtcaccaggcaggatgaaggcacctactcctgccgcgtgggcgaggactctgtggacttccggctccgcgtctctgagcccaaggtggtgtttgctaaggagcagctggcacgcaggaagctgcaggcagaggcaggagccagtgccacactgagctgcgaggtggcccaggcccagacggaggtgacgtggtacaaggatgggaagaagctgagctccagctcgaaagtgtgcatggaggccacaggctgcacgcgcaggctggttgtgcagcaggcaggccaggcggatgccggggagtatagctgcgaggctgggggccagcggctctccttccatctggatgtcaaagagcccaaggtggtgtttgccaaggaccaggtggcacacagtgaggtgcaggctgaggcaggggccagtgccacgctgagctgcgaggtggcccaggcccagacggaggtgatgtggtacaaagatgggaagaagctgagctccagcttgaaagtgcatgtagaggccaagggctgcagacggaggctggtggtgcagcaggcaggcaagacagatgccggggactacagctgcgaggccaggggccagagggtctccttccgcctgcacatcacagagcccaagatgatgtttgcaaaggagcagtcagtgcataatgaggtgcaggctgaggcgggggccagtgccatgctgagctgtgaggtggcccaggcccagacggaggtgacgtggtacaaggatgggaagaagctgagctccagctcaaaagtgggcatggaggtcaaagggtgcacacggaggctggtgctgccacaggcgggcaaagcagatgctggggagtacagctgtgaggctgggggccagagagtctccttccacctgcacatcacagagcccaagggggtgtttgcgaaggagcagtcagtgcataatgaggtgcaggctgaggcggggaccactgccatgctgagctgtgaggtggcccagccccagacagaggtgacgtggtacaaggacgggaagaagctgagctccagctcaaaagtacgcatggaggtcaagggctgcacacgaaggctggtagtgcagcaggtgggcaaagcagatgctggggagtacagctgcgaggctgggggccagagagtctcctttcaactgcacatcacagagcccaaggcagtgtttgccaaggagcagttggtgcataatgaggtgcggactgaggcaggggccagtgccacactgagctgtgaggtggcccaggcccagacagaggtgacgtggtacaaggatgggaagaagctgagctccagttcgaaagtgcgcatagaggctgcgggctgcatgcggcagctggtggtgcagcaggcaggccaggcagatgctggggagtacacctgtgaggctgggggccagcggctctccttccacctggatgtttcagagcccaaggcggtgtttgcaaaggagcagctggcacacaggaaggtgcaggccgaggcgggggccattgccacgctgagctgcgaggtggcccaggcccagacagaggtgacgtggtacaaggacgggaagaagctgagctccagctcgaaagttcgaatggaggctgtgggctgcacacggaggctggtggtgcagcaggcatgccaggcggacaccggggagtatagctgcgaggccgggggccagcggctctccttcagcctggacgtggcagagcccaaggtggtgtttgccaaggagcagccagtgcacagggaggtgcaggcccaggcgggggccagcaccacactcagctgcgaggtggctcaggcccagacggaggtgatgtggtacaaggacgggaagaagctgagcttcagctcgaaagtgcgcatggaggctgtgggctgcacacggaggctggtggtgcagcaggcgggccaggcggtcgccggggagtacagctgcgaggcggggagccagcggctctccttccacctgcacgtggcagagcccaaggcggtgtttgccaaggagcagccagcgagcagggaggtgcaggctgaggcggggaccagtgccacgctgagctgcgaggtggcccaggcccagacagaggtgacgtggtacaaggacgggaagaaactgagctccagctcgaaagtgcgaatggaggccgtgggctgcacacggaggctggtggtgcaggaggcaggccaggcggacgccggggagtacagctgcaaggccggggatcagcggctgtccttccacctgcacgtggcagagcccaaggtggtgtttgccaaggagcagccagcacacagggaggtgcaggctgaggcgggggccagtgccacgctgagctgcgaggtggcccaggcccagacagaggtgacgtggtacaaggatgggaagaagctgagttccagctcgaaagtgcgcgtggaggccgtgggctgcacacggaggctggtggtgcagcaggcgggccaggcagaggccggggagtacagctgcgaggcagggggtcagcagctctccttccgcctgcaggtggcagagctggagccccaaatttcagagagaccctgccgcagggagcctctggtggtcaaggagcatgaagacatcatcctgaccgccacactggccacaccctctgcggccacggtgacctggctcaaggatggtgtggagattcgccgcagcaagcggcatgagacagccagccagggggacacccacaccctgaccgtgcatggcgcccaggttctggacagcgccatctacagctgccgtgtgggcgcagaggggcaggacttcccagtgcaggtggaagaggtggccgccaagttctgccggctgctggagcctgtgtgcggcgagctgggtggcacggtgacactggcctgcgagctaagcccagcgtgtgcagaggtggtgtggcgctgcggcaacacgcagcttcgggtgggcaagcgcttccagatggtggccgaggggcccgtgcgctcactcactgtgttggggctgcgcgcagaggacgcaggggagtacgtgtgtgagagccgtgatgaccacaccagtgcgcagctcaccgtcagtgtgccccgagtggtgaagtttatgtctgggctgagcaccgtggtcgcagaggagggcggcgaggccaccttccagtgcgtggtgtcccccagtgatgtggcagtcgtgtggttccgggacggtgccctgcttcagcccagcgagaagtttgccatatcacagagtggcgccagccacagcctgaccatctcagacctggtgctggaggacgcgggccagatcaccgtggaggctgagggcgcctcatcctctgctgccctgagggtccgagaggcgcctgtgctgttcaaaaagaagctggagccgcagacggtggaggagcggagctcggtgaccctggaggtggagctgacgcggccgtggccggagctgaggtggacacggaacgcgacggccctggcgccgggaaagaacgtggagatccacgccgagggcgcccgccaccgcctggttctgcacaacgtaggttttgccgaccgtggcttctttggctgcgagacgccggatgacaagacacaggccaaactcaccgtggagatgcgccaggtacggctcgtacggggcctgcaggcagtggaggcacgggagcagggcacggctaccatggaggtgcagctgtcgcatgcggacgtggatggcagctggactcgtgacggtctgcggttccagcaggggcccacgtgccacctggctgtgcggggccccatgcacaccctcacactctcggggctgcggccagaggatagtggccttatggtcttcaaggccgaaggagtgcacacgtcggcgcggctcgtggtcaccgagcttcccgtgagcttcagccgcccgctgcaggacgtggtgaccactgagaaggagaaggttaccctggagtgcgagctgtcgcgtcctaatgtggatgtgcgctggctgaaggacggtgtggagctgcgggcaggcaagacgatggccatcgcagcccagggcgcctgcaggagcctcaccatttaccggtgcgagttcgcggatcagggagtgtatgtgtgtgatgcccatgatgcccagagctctgcctccgtgaaggtacaaggaaggacatacactctcatctaccggagagtcctggcggaagatgcaggagagatccaatttgtagccgaaaatgcagaatcgcgagcccagctccgagtgaaggagctgccagtgaccctcgtgcgcccgctgcgggacaagattgccatggagaagcaccgcggtgtgctggagtgtcaggtgtcccgggccagcgcccaggtgcggtggttcaagggcagtcaggagctgcagcccgggcccaagtacgagctggtcagtgatggcctctaccgcaagctgatcatcagtgatgtccacgcagaggacgaggacacctacacctgtgacgccggtgatgtcaagaccagtgcacagttcttcgtggaagagcaatccatcaccattgtgcggggtctgcaggacgtgacagtgatggagcccgctcctgcctggtttgagtgtgagacctccatcccctcagtgcggccacctaagtggctcctggggaagacggtgttgcaggctggggggaacgtgggcctggagcaggagggcacggtgcaccggctgatgctgcggcggacctgctccaccatgaccgggcccgtgcacttcaccgttggcaagtcgcgctcctctgcccgcctggtggtctcagacatccccgtagtcctcacacggccgttggagcccaagacagggcgtgagctgcagtcagtggtcctgtcctgcgacttccggccagcccccaaggctgtgcagtggtacaaggatgacacgcccctgtctccctctgagaagtttaagatgagcctggagggtcagatggctgagctgcgcatcctccggctcatgcctgctgatgctggtgtctaccggtgccaggcgggcagtgcccacagcagcactgaggtcactgtggaagcgcgggaggtgacagtgacagggccgctacaggatgcagaggccacggaggagggctgggccagcttctcctgtgagctgtcccacgaggatgaggaggtcgagtggtcgctcaacgggatgcccctgtacaacgacagcttccatgagatctcacacaagggccggcgccacacgctggtactgaagagcatccagcgggctgatgcgggcatagtacgcgcctcctccctgaaggtgtcgacctctgcccgcctggaggtccgagtgaagccggtggtgttcctgaaggcgctggatgacctgtccgcagaggagcgcggcaccctggccctgcagtgtgaagtctctgaccccgaggcccatgtggtgtggcgcaaagatggcgtgcagctgggccccagtgacaagtatgacttcctgcacacggcgggcacgcgggggctcgtggtgcatgacgtgagccctgaagacgccggcctgtacacctgccacgtgggctccgaggagacccgggcccgggtccgcgtgcacgatctgcacgtgggcatcaccaagaggctgaagacaatggaggtgctggaaggggaaagctgcagctttgagtgcgtcctgtcccacgagagtgccagcgacccggccatgtggacagtcggtgggaagacagtgggcagctccagccgcttccaggccacacgtcagggccgaaaatacatcctggtggtccgggaggctgcaccaagtgatgccggggaggtggtcttctctgtgcggggcctcacctccaaggcctcactcattgtcagagagaggccggccgccatcatcaagcccctggaagaccagtgggtggcgccaggggaggacgtggagctgcgctgtgagctgtcacgggcgggaacgcccgtgcactggctgaaggacaggaaggccatccgcaagagccagaagtatgatgtggtctgcgagggcacgatggccatgctggtcatccgcggggcctcgctcaaggacgcgggcgagtacacgtgtgaggtggaggcttccaagagcacagccagcctccatgtggaagaaaaagcaaactgcttcacagaggagctgaccaatctgcaggtggaggagaaaggcacagctgtgttcacgtgcaagacggagcaccccgcggccacagtgacctggcgcaagggcctcttggagctacgggcctcagggaagcaccagcccagccaggagggcctgaccctgcggctcaccatcagtgccctggagaaggcagacagcgacacctatacctgcgacattggccaggcccagtcccgggcccagctcctagtgcaaggccggagagtgcacatcatcgaggacctggaggatgtggatgtgcaggagggctcctcggccaccttccgttgccggatctccccggccaactacgagcctgtgcactggttcctggacaagacacccctgcatgccaacgagctcaatgagatcgatgcccagcccgggggctaccacgtgctgaccctgcggcagctggcgctcaaggactcgggcaccatctactttgaggcgggtgaccagcgggcctcggccgccctgcgggtcactgagaagccaagcgtcttctcccgggagctcacagatgccaccatcacagagggtgaggacttgaccctggtgtgcgagaccagcacctgcgacattcctgtgtgctggaccaaggatgggaagaccctgcgggggtctgcccggtgccagctgagccatgagggccaccgggcccagctgctcatcactggggccaccctgcaggacagtggacgctacaagtgtgaggctgggggcgcctgcagcagctccattgtcagggtgcatgcgcggccagtgcggttccaggaggccctgaaggacctggaggtgctggagggtggtgctgccacactgcgctgtgtgctgtcatctgtggctgcgcccgtgaagtggtgctatggaaacaacgtcctgaggccaggtgacaaatacagcctacgccaggagggtgccatgctggagctggtggtccggaacctccggccgcaggacagcgggcggtactcatgctccttcggggaccagactacttctgccaccctcacagtgactgccctgcctgcccagttcatcgggaaactgagaaacaaggaggccacagaaggggccacggccacgctgcggtgtgagctgagcaaggcagcccctgtggagtggagaaaggggtccgagaccctcagagatggggacagatactgtctgaggcaggacggggccatgtgtgagctgcagatccgtggcctggccatggtggatgccgcggagtactcgtgtgtgtgtggagaggagaggacctcagcctcactcaccatcaggcccatgcctgcccacttcataggaagactgagacaccaagagagcatagaaggggccacagccacgctgcggtgtgagctgagcaaggcggcccccgtggagtggaggaaggggcgtgagagcctcagagatggggacagacatagcctgaggcaggacggggctgtgtgcgagctgcagatctgtggcctggctgtggcagatgctggggagtactcctgtgtgtgtggggaggagaggacctctgccactctcaccgtgaaggccctgccagccaagttcacagagggtctgaggaatgaagaggccgtggaaggggccacagccatgttgtggtgtgaactgagcaaggtggcccctgtggagtggaggaaggggcccgagaacctcagagatggggacagatacatcctgaggcaggaggggaccaggtgtgagctgcagatctgtggcctggccatggcggacgccggggagtacttgtgtgtgtgcgggcaggagaggacctcagccacgctcaccatcagggctctgcctgccaggttcatagaagatgtgaaaaaccaggaggccagagaaggggccacagctgtgctgcagtgtgagctgaacagtgcagcccctgtggagtggagaaaggggtctgagacccttagagatggggacagatacagcctgaggcaggacgggactaaatgtgagctgcagattcgtggcctggccatggcagacactggggagtactcgtgcgtgtgcgggcaggagaggacctcggctatgctcaccgtcagggctctacccatcaagttcacagagggtctgaggaacgaagaggccacagaaggggcaacagccgtgctgcggtgtgagctgagcaagatggcccccgtggagtggtggaaggggcatgagaccctcagagatggagacagacacagcctgaggcaggacggggccaggtgtgagctgcagatccgcggcctcgtggcagaggacgctggggagtacctgtgcatgtgcgggaaggagaggacctcagccatgctcaccgtcagggccatgccttccaagttcatagagggtctgaggaatgaagaggccacagaaggggacacggccacgctgtggtgtgagctgagcaaggcggcaccggtggagtggaggaaggggcatgagaccctcagagatggggacagacacagcctgaggcaggacgggtccaggtgtgagctgcagatccgtggcctggctgtggtggatgccggggagtactcgtgtgtgtgcgggcaggagaggacctcagccacactcactgtcagggccctgcctgccagattcatagaagatgtgaaaaaccaggaggccagagaaggggccacggccgtgctgcaatgtgagctgagcaaggcggcccccgtggagtggaggaaggggtctgagaccctcagaggtggggacagatacagcctgaggcaggatgggaccagatgtgagctgcagattcatggcctgtctgtggcagacactggggagtactcgtgtgtgtgcgggcaggagaggacctcggccacactcaccgtcagggccccacagccagtgttccgggagccgctgcagagtctgcaggcggaggagggctccacggccaccctgcagtgtgagctgtctgagcccactgctacagtggtctggagcaagggtggcctgcagctgcaggccaatgggcgccgggagccacggcttcagggctgcaccgcggagctggtgttacaggacctacaacgtgaagacactggcgaatacacttgcacctgtggctcccaggccaccagtgccaccctcactgtcacagctgcgcctgtgcggttcctccgagagctgcagcaccaggaggtggatgagggaggcaccgcacacttatgctgcgagctgagccgggcgggtgcgagcgtggagtggcgcaagggctccctacagctcttcccttgtgccaagtaccagatggtgcaggatggtgcagctgcagagctgctggtacgcggagtggagcaggaggatgcgggtgactacacgtgtgacacgggccacacgcagagcatggccagcctctctgtccgtgtccccaggcccaagttcaagacccggcttcagagtctggagcaggagacaggtgacatagcccggctgtgctgtcagctgagtgatgcagagtcgggggccgtggtgcaatggctcaaggagggcgtggagctgcatgcgggccccaagtacgagatgcggagccagggggccacgcgggagctgctgatccaccaactggaggccaaggacacgggcgagtatgcctgtgtgacaggcggccagaaaaccgctgcctccctcagggtcacagagcctgaggtgaccattgtacgggggctggttgatgcggaggtgacggccgatgaggatgttgagttcagctgtgaggtgtccagggctggagccacaggcgtgcagtggtgcctacagggcctgccactgcaaagcaatgaggtgacagaggtggctgtgcgggatggccgcatccacaccctgcggctgaagggcgtgacgcccgaggacgctggcactgtctccttccatttgggaaaccatgcttcctctgcccagctcaccgtcagagctcctgaggtgaccatcctggagcccctgcaggacgtgcagctcagtgagggccaggatgccagcttccagtgccggctatccagagcttcaggccaggaggcccgctgggctttaggaggggtgcccctgcaggccaacgagatgaatgacatcactgtggagcagggcacactccacctgctcaccctgcacaaggtgacccttgaggatgctggaactgtcagtttccacgtgggcacgtgtagctctgaggcccagctgaaagtcacagccaagaacacggtggtgcgggggctggagaatgtggaggcgctggagggcggcgaggcgctgttcgagtgccagctgtcccagcccgaggtggccgcccacacctggctgctggacgacgaacccgtgcacacctcggagaacgccgaggtggtcttcttcgagaacggcctgcgccacctgctgctgctcaaaaacttgcggccacaagacagctgccgggtgaccttcctggctggggatatggtgacgtccgcattcctcacggtccgaggctggcgcctggagatcctggagcctctgaaaaacgcggcggtccgggccggcgcacaggcatgcttcacctgcacgctcagcgaggcggtgcccgtgggagaggcgtcctggtacatcaatggcgcggcagtgcagccggatgacagcgactggactgtcaccgccgacggcagtcaccacgccctactgctgcgcagcgcccagccccaccacgccggggaggtcaccttcgcttgccgcgacgccgtggcctctgcgcggctcaccgtgctgggcctccctgatcccccagaggatgctgaggtggtggctcgcagcagccacactgtgacactgtcttgggcagctcccatgagtgatggaggcggtggtctctgtggctaccgcgtggaggtgaaggagggggccacaggccagtggcggctgtgccacgagctggtgcctggacccgagtgtgtggtggatggcctggcccccggggagacctaccgcttccgtgtggcagctgtgggccctgtgggtgctggggaaccggttcacctgccccagacagtgcggcttgcagagccaccgaagcctgtgcctccccagccctcagcccctgagagccggcaggtggcagctggtgaagatgtctctctggagcttgaggtggtggctgaggctggtgaggtcatctggcacaagggaatggagcgcatccagcccggtgggcggttcgaggtggtctcccagggtcggcaacagatgctggtgatcaagggcttcacggcagaagaccagggcgagtaccactgtggcctggctcagggctccatctgccctgcggctgccaccttccaggtggcactgagcccagcctctgtggatgaggcccctcagcccagcttgccccccgaggcagcccaggagggtgacctgcacctactgtgggaggccctggctcggaaacgtcgcatgagccgtgagcccacgctggactccattagcgagctgccagaggaggacggccgctcgcagcgcctgccacaggaggcagaggaggtggcacctgatctctctgaaggctactccacggccgatgagctggcccgcactggagatgctgacctctcacacaccagctctgatgatgagtcccgggcaggcaccccttccctggtcacctacctcaagaaggctgggaggccaggcacctcaccactggccagcaaggttggggccccagcagccccctctgtgaagccacagcagcagcaggagccactggctgctgtgcgcccaccactgggagacctgagcaccaaagacctgggtgatccctcaatggacaaggcagctgtgaagatccaggctgcctttaagggctacaaggtccggaaggagatgaagcagcaggaagggcccatgttctcccacacatttggggacaccgaggcacaggtgggggatgccctgcggctggagtgtgtcgtggccagcaaggcagatgtgcgagcccgctggctgaaggatggtgtggagctgaccgatgggcggcaccatcacatcgaccagcttggggatggcacctgctctctgctgatcactggcctggaccgtgctgatgctggctgctacacctgtcaggtgagcaacaagtttggccaggtgacccacagtgcctgtgtggtggtcagtgggtcagagagtgaagccgagagctcctctgggggtgagctggacgatgccttccgccgggctgcccgtcggctgcaccggctcttccgcaccaaaagtccggctgaagtttcagatgaggagctcttcctgagtgcagacgagggccctgcagagccagaggagcccgcggactggcagacataccgcgaagatgagcatttcatctgcatccgttttgaggcgctcactgaggcccgccaggcggtaactcgcttccaggagatgtttgccacactgggcattggggtggagatcaagctggtggaacaggggcctcggagggtagagatgtgcatcagcaaagagactcctgcccctgtggtgcctccagagccattgcccagcctactgacttctgacgctgccccagtgttcctgactgagttgcagaaccaagaagtgcaggatgggtatcctgtgagctttgactgcgtggtgacaggtcagcccatgcccagtgtgcgctggttcaaggatgggaagttgttggaggaggatgatcactacatgattaatgaagaccaacagggtggccatcagctcatcatcacagccgtggtgccagcagacatgggcgtctaccgctgcctggccgagaacagcatgggtgtctcctccaccaaggctgagctccgtgtggacttgacaagcacagactatgacactgcagcagatgccacggagtcctcatcctacttcagtgcccaaggctacctgtccagccgggagcaggagggaacagagtccaccactgatgagggccagctgccccaggtggtggaggagctgagagacctccaggtggcccctggcacacgcctggccaagttccagctcaaggtgaaaggctaccctgctcccagattatactggttcaaagatggccagcccctgaccgcatctgcccacatccgcatgactgacaagaagatcctgcacaccctggagatcatctccgtcacccgggaggactctggccagtatgcagcctatatcagcaatgccatgggtgctgcctactcgtctgcccggctgctggttcgaggccctgatgagccagaagagaagcctgcatcagatgtgcatgagcagctggtgccgccccgaatgctggagaggttcacccccaagaaagtgaagaaaggctccagcatcaccttctctgtgaaggtagaaggacgcccggtgcccaccgtgcactggctcagggaggaggctgagagaggcgtgctgtggattggccctgacacaccgggctacaccgtggccagctctgcgcagcagcacagcctggtcctgctggacgtgggccggcagcaccagggcacctacacatgcattgccagcaacgctgccggccaggccctctgctccgccagcctgcacgtctcgggcctgcctaaggtggaggagcaggagaaagtgaaggaagcgctgatttccactttcctgcaggggaccacacaagccatctcagcacaggggttggaaactgcgagttttgctgaccttggtgggcagaggaaagaagagcctctggctgccaaggaggccctcggccacctgtccctcgctgaggtgggcacagaggagttcctgcagaaactgacctcccagatcactgagatggtatcggccaagatcacgcaggccaagctgcaggtgcccggaggtgacagtgatgaggactccaagacaccatctgcatccccccgccatggccgatcacggccatcctccagcatccaggagtcttcctcagagtcagaggacggcgatgcccgaggcgagatctttgacatctacgtggtcaccgctgactacctgcccctaggggctgagcaggatgccatcacgctgcgggaaggccagtatgtggaggtcctggatgcagcccacccactgcgctggcttgtccgcaccaagcccaccaagtccagcccctcacggcagggctgggtgtcaccagcctacctggacaggaggctcaagctgtcacctgagtggggggccgctgaggcccctgagttccctggggaggctgtgtctgaagacgaatacaaggcaaggctgagctctgtgatccaggagctgctgagttctgagcaggccttcgtggaggagctgcagttcctgcagagccaccacctgcagcacctggagcgctgcccccacgtgcccatagctgtggccggccagaaggcagtcatcttccgcaatgtgcgggacatcggccgcttccacagcagcttcctgcaggagttgcagcagtgcgacacggacgacgacgtggccatgtgcttcatcaagaaccaggcggcctttgagcagtacctggagttcctggtggggcgtgtgcaggctgagtcggtggtcgtcagcacggccatccaggagttctacaagaaatacgcggaggaggccctgttggcaggggacccctctcagcccccgccaccacctctgcagcactacctggagcagccagtggagcgggtgcagcgctaccaggccttgctgaaggagctgatccgcaacaaggcgcggaacagacagaactgcgcgctgctggagcaggcctatgccgtggtgtctgccctgccacagcgcgctgagaacaagctgcacgtgtccctcatggagaactacccaggcaccctgcaggccctgggcgagcccatccgccagggccacttcatcgtgtgggagggtgcaccgggggcccgcatgccctggaagggccacaaccgtcacgtgttcctcttccgcaaccacctggtaatctgcaagccccggcgagactcccgcaccgataccgtcagctacgtgttccggaacatgatgaagctgagcagcatcgacctgaacgaccaggtggagggggatgaccgcgccttcgaggtgtggcaggagcgggaggactcggtgcgcaagtacctgctgcaggcacggacagccattatcaagagctcgtgggtgaaggagatctgtggcatccagcagcgtctggccctgcctgtgtggcggcccccggactttgaagaggagctggccgactgcacagccgagctgggtgagacagtcaagctggcctgccgcgtgacgggcacacccaagcctgtcatcagctggtacaaagatgggaaagcagtgcaggtggacccccaccacatcctcattgaagaccctgatggctcgtgtgcactcatcctggacagcctgaccggtgtggactctggccagtacatgtgcttcgcggccagcgccgctggcaactgcagtaccctgggcaagatcctggtgcaagtcccaccacggttcgtgaacaaggtccgggcctcaccctttgtggagggagaggacgcccagttcacctgcaccatcgaaggcgccccgtacccgcagatcaggtggtacaaggacggggccctgctgaccactggcaacaagttccagacactgagtgagcctcgcagcggcctgctagtgctggtgatccgggcggccagcaaggaggacctggggctctacgagtgtgagctggtgaaccggctgggctccgcgcgggctagtgcggagctgcgcattcagagccccatgctgcaggcccaggagcagtgtcacagggagcagctcgtggctgcagtggaagtcactgagcaagagactaaagtccccaagaaaaccgtcatcatagaagagaccatcaccactgtggtgaagagcccacgtggccaacgacggtcccccagcaagtccccctcccgctcaccttcccgctgctctgccagcccgctgaggccaggcctactggcccccgacctgctgtacctgccaggtgctggccagccccgcaggccggaggcagaaccaggccagaagcccgtggtgcccacactgtatgtgacggaggccgaggcccactctccagctctgcccggactctcggggccccagcccaagtgggtggaggtggaggagaccattgaagtccgggtgaagaagatgggcccgcagggtgtgtctcccaccacagaggtgcccaggagctcatcggggcatctcttcacactgcccggtgcgacccccggaggggaccccaattccaacaactccaacaacaagctgctggcccaggaggcctgggcccagggcacagccatggtcggcgtcagagagccccttgtcttccgcgtggatgccagaggcagtgtggactgggctgcttctggcatgggcagcctggaggaggagggcaccatggaggaggcgggagaggaagagggggaagacggagacgcctttgtgacggaggagtcccaggacacacacagccttggggatcgtgaccccaagatcctcacgcacaacggccgcatgctgacactggctgacctggaagattacgtgcctggggaaggggagaccttccactgtggtggccctgggcctggcgcccctgatgaccctccctgcgaggtctcggtgatccagagagagatcggggagcccacggtggggcagcctgtgctgctcagcgtggggcatgcactgggtccccgaggccctctcggcctctttaggcctgagccccgtggggcgtcaccaccgggaccccaggtccgtagccttgagggcacctccttcctcttgcgggaggccccggctcggcctgtgggcagtgctccctggacgcagtctttctgcacccgcatccggcgttctgcggacagtggccagagcagcttcaccacagagctttccacccagaccgtcaacttcgggacagtgggggagacggtcacccttcacatctgcccagacagggatggggatgaggcggcacagccctga

SEQ ID NO: 229268 - DNA, 19863 bp, Artificial Sequence
  derived and/or modified sequence
atggaccagccccagttcagcggggccccccgcttcctgacccggcccaaggcctttgtggtgtctgtgggcaaggatgccaccctgagctgccagatcgtgggcaaccccaccccccaggtgtcctgggagaaggaccagcagcctgtggccgccggggcccgcttccggctggcccaggatggagacctgtaccgcctgaccatcctggacctggccctgggggacagcggccagtatgtgtgccgggccagaaatgccatcggggaggcctttgctgctgtgggcctgcaggtggatgctgaggccgcctgtgccgagcaggccccccacttcctgctgcggcccaccagcatccgggtgcgggagggcagcgaggccaccttccgctgccgggtgggcggcagccccaggcctgctgtgtcctggagcaaggatggccggcggctgggggagccagatggcccccgggtgcgggtggaggagctgggggaggccagcgccctgcgcatccgggccgcccggcccagagatggcggcacctatgaggtgcgggcagagaaccccctgggcgccgccagcgctgctgctgccctggtggtggacagtgatgctgctgacacagccagccggcccggcaccagcacagctgccctgctggcccacctgcagaggcggcgggaggccatgagagctgagggcgccccagccagcccccccagcacaggcaccaggacctgcaccgtgacagagggcaagcacgcccggctgagctgctacgtgactggagagcccaagccagagaccgtgtggaagaaggatggccagctggtgacagagggccgccgccacgtggtgtatgaagatgcccaggagaactttgtgctgaagatcctcttctgcaagcagagcgaccggggcctgtacacctgcacagccagcaacctggtgggccagacctacagctctgtgctggtggtggtgcgggagcctgctgtgcccttcaagaagaggctgcaggacctggaggtgcgggagaaggagagcgccaccttcctgtgtgaggtgccccagcccagcacagaagctgcctggttcaaggaggagacccggctgtgggccagcgccaagtatggcatcgaggaggagggcacagaaagaaggctgactgtgagaaatgtgtctgcagatgatgatgctgtgtacatctgtgagaccccagagggcagcaggacagtggccgagctggccgtgcagggcaacctgctgaggaagctgcccaggaagacagctgtgcgggtgggggacacagccatgttctgtgtggagctggccgtgcctgtgggccctgtgcactggctgaggaaccaggaggaggtggtggccggcggccgggtggccatctctgctgagggcaccaggcacaccctgaccatcagccagtgctgcctggaggatgtgggccaggtggccttcatggccggggactgccagaccagcacccagttctgtgtgtctgcccccaggaagccacccctgcagccccctgtggaccctgtggtgaaggccaggatggagagcagcgtcatcctgtcctggagccccccaccccacggggagaggcctgtgaccattgatggctacctggtggagaagaagaagctgggcacctacacctggatccgctgccacgaggccgagtgggtggccaccccagagctgactgtggctgatgtggccgaggagggcaacttccagttccgggtgtctgccctgaacagctttggccagagcccctacctggagttccctggcaccgtgcacctggcccccaagctggccgtgaggacccccctgaaggctgtgcaggccgtggagggcggggaggtgaccttctctgtggacctgactgtggccagcgctggggagtggttcctggatggccaggccctgaaggccagctctgtgtatgagatccactgtgacaggaccaggcacaccctgaccatccgggaggtgcctgccagcctgcacggggcccagctgaagtttgtggccaatggaattgagagcagcatccgcatggaggtgcgggccgcccctggcctgacagccaacaagcccccagctgctgctgcccgggaggtgctggcccggctgcacgaggaggcccagctgctggccgagctgagtgaccaggccgctgctgtgacctggctgaaggatggccgcaccctgagccctggccccaagtatgaggtgcaggccagcgctggccggcgggtgctgctggtgagagatgtggccagagatgatgctggcctgtatgaatgtgtgtcccggggcggcagaattgcctaccagctgtctgtgcagggcctggcccgcttcctgcacaaggacatggccggcagctgtgtggatgctgtggccggcggccctgcccagtttgaatgtgagaccagcgaggcccacgtgcacgtgcactggtacaaggatggcatggagctgggccacagcggggagcgcttcctgcaggaggatgtgggcaccaggcaccggctggtggccgccaccgtgacccggcaggatgagggcacctacagctgccgggtgggggaggacagcgtggacttccggctgcgggtgtctgagcccaaggtggtgtttgccaaggagcagctggcccggaggaagctgcaggccgaggccggggccagcgccaccctgagctgtgaggtggcccaggcccagacagaggtgacctggtacaaggatggcaagaagctgagcagcagcagcaaggtgtgcatggaggccaccggctgcacccggcggctggtggtgcagcaggccggccaggctgatgctggggagtacagctgtgaggccggcggccagaggctgtccttccacctggatgtgaaggagcccaaggtggtgtttgccaaggaccaggtggcccacagcgaggtgcaggccgaggccggggccagcgccaccctgagctgtgaggtggcccaggcccagacagaggtgatgtggtacaaggatggcaagaagctgagcagcagcctgaaggtgcacgtggaggccaagggctgcagaagaaggctggtggtgcagcaggccggcaagacagatgctggggactacagctgtgaggcccggggccagagggtgtccttccggctgcacatcacagagcccaagatgatgtttgccaaggagcagagcgtgcacaatgaggtgcaggccgaggccggggccagcgccatgctgagctgtgaggtggcccaggcccagacagaggtgacctggtacaaggatggcaagaagctgagcagcagcagcaaggtgggcatggaggtgaagggctgcacccggcggctggtgctgccccaggccggcaaggcagatgctggggagtacagctgtgaggccggcggccagagggtgtccttccacctgcacatcacagagcccaagggcgtgtttgccaaggagcagagcgtgcacaatgaggtgcaggccgaggccggcaccacagccatgctgagctgtgaggtggcccagccccagacagaggtgacctggtacaaggatggcaagaagctgagcagcagcagcaaggtgaggatggaggtgaagggctgcacccggcggctggtggtgcagcaggtgggcaaggcagatgctggggagtacagctgtgaggccggcggccagagggtgtccttccagctgcacatcacagagcccaaggctgtgtttgccaaggagcagctggtgcacaatgaggtgaggacagaggccggggccagcgccaccctgagctgtgaggtggcccaggcccagacagaggtgacctggtacaaggatggcaagaagctgagcagcagcagcaaggtgcgcatcgaggccgccggctgcatgaggcagctggtggtgcagcaggccggccaggctgatgctggggagtacacctgtgaggccggcggccagaggctgtccttccacctggatgtgtctgagcccaaggctgtgtttgccaaggagcagctggcccacaggaaggtgcaggccgaggccggggccatcgccaccctgagctgtgaggtggcccaggcccagacagaggtgacctggtacaaggatggcaagaagctgagcagcagcagcaaggtgaggatggaggccgtgggctgcacccggcggctggtggtgcagcaggcctgccaggccgacacaggagagtacagctgtgaggccggcggccagaggctgtccttcagcctggatgtggccgagcccaaggtggtgtttgccaaggagcagcctgtgcaccgggaggtgcaggcccaggccggggccagcaccaccctgagctgtgaggtggcccaggcccagacagaggtgatgtggtacaaggatggcaagaagctgtccttcagcagcaaggtgaggatggaggccgtgggctgcacccggcggctggtggtgcagcaggccggccaggccgtggccggggagtacagctgtgaggccggcagccagaggctgtccttccacctgcacgtggccgagcccaaggctgtgtttgccaaggagcagcctgccagccgggaggtgcaggccgaggccggcaccagcgccaccctgagctgtgaggtggcccaggcccagacagaggtgacctggtacaaggatggcaagaagctgagcagcagcagcaaggtgaggatggaggccgtgggctgcacccggcggctggtggtgcaggaggccggccaggctgatgctggggagtacagctgcaaggccggggaccagaggctgtccttccacctgcacgtggccgagcccaaggtggtgtttgccaaggagcagcctgcccaccgggaggtgcaggccgaggccggggccagcgccaccctgagctgtgaggtggcccaggcccagacagaggtgacctggtacaaggatggcaagaagctgagcagcagcagcaaggtgcgggtggaggccgtgggctgcacccggcggctggtggtgcagcaggccggccaggccgaggccggggagtacagctgtgaggccggcggccagcagctgtccttccggctgcaggtggccgagctggagccccagatcagcgagcggccctgccggcgggagcccctggtggtgaaggagcacgaggacatcatcctgacagccaccctggccacccccagcgctgccaccgtgacctggctgaaggatggagtggagatccgccgcagcaagagacatgaaacagccagccagggcgacacccacaccctgactgtgcatggagcccaggtgctggacagcgccatctacagctgccgggtgggcgctgagggccaggacttccctgtgcaggtggaggaggtggccgccaagttctgccgcctgctggagcctgtgtgtggggagctgggcggcaccgtgaccctggcctgtgagctgagccctgcctgtgccgaggtggtgtggaggtgtggcaacacccagctgcgggtgggcaagcgcttccagatggtggccgagggccctgtgcgcagcctgactgtgctgggcctgcgggcagaagatgctggggagtatgtgtgtgagagcagagatgaccacaccagcgcccagctgactgtgtctgtgccccgggtggtgaagttcatgagcggcctgagcacagtggtggccgaggagggcggggaggccaccttccagtgtgtggtgagccccagtgatgtggccgtggtgtggttcagagatggagccctgctgcagcccagcgagaagtttgccatcagccagagcggggccagccacagcctgaccatcagtgacctggtgctggaggatgctggccagatcaccgtggaggccgagggcgccagcagcagcgctgccctgcgggtgcgggaggcccctgtgctcttcaagaagaagctggagccccagacagtggaggagaggagctctgtgaccctggaggtggagctgacccggccctggccagagctgcgctggaccagaaatgccacagccctggcccctgggaagaatgtggagatccatgctgagggcgcccggcaccggctggtgctgcacaacgtgggctttgctgaccggggcttcttcggctgtgagaccccagatgacaagacccaggccaagctgactgtggagatgaggcaggtgcggctggtgcggggcctgcaggccgtggaggcccgggagcagggcacagccaccatggaggtgcagctgagccatgctgatgtggatggctcctggaccagagatggcctgcgcttccagcagggccccacctgccacctggccgtgcggggccccatgcacaccctgaccctgagcggcctgcggccagaagattctggcctgatggtgttcaaggccgagggcgtgcacaccagcgcccggctggtggtgacagagctgcctgtgtccttcagccggcccctgcaggatgtggtgaccacagagaaggagaaggtgaccctggagtgtgagctgagccggcccaacgtggatgtgcgctggctgaaggatggagtggagctgcgggccggcaagaccatggccatcgccgcccagggcgcctgccgcagcctgaccatctaccgctgtgaatttgctgaccagggcgtgtatgtgtgtgatgcccatgatgcccagagcagcgcctctgtgaaggtgcagggccgcacctacaccctcatctaccgccgggtgctggctgaagatgctggggagatccagtttgtggctgaaaatgctgagagccgggcccagctgcgggtgaaggagctgcctgtgaccctggtgcggcccctgcgggacaagatcgccatggagaagcacagaggagtgctggagtgccaggtgtcccgggccagcgcccaggtgcgctggttcaagggcagccaggagctgcagcccggccccaagtatgagctggtgtctgatggcctgtacaggaagctgatcatcagtgatgtgcatgctgaagatgaggacacctacacctgtgatgctggagatgtgaagaccagcgcccagttctttgtggaggagcagagcatcaccatcgtgcggggcctgcaggatgtgacagtgatggagcccgccccagcctggtttgaatgtgagaccagcatccccagcgtgcggccccccaagtggctgctgggcaagacagtgctgcaggccggcggcaatgtgggcctggagcaggagggcaccgtgcaccggctgatgctgcggaggacctgcagcaccatgacaggccctgtgcacttcaccgtgggcaagagccgcagcagcgcccggctggtggtgtctgacatccctgtggtgctgacccggcccctggagcccaagacaggccgggagctgcagagcgtggtgctgagctgtgacttccggcctgcccccaaggctgtgcagtggtacaaggatgacacccccctgagccccagcgagaagttcaagatgagcctggagggccagatggccgagctgcgcatcctgcggctgatgccagcagatgctggggtgtaccgctgccaggccggcagcgcccacagcagcacagaggtgacagtggaggcccgggaggtgacagtgacaggccccctgcaggatgctgaggccacagaggagggctgggccagcttcagctgtgagctgagccatgaagatgaggaggtggagtggagcctgaatggcatgcccctgtacaatgacagcttccacgagatcagccacaagggccgccgccacaccctggtgctgaagagcatccagagagcagatgctggcatcgtgcgggccagcagcctgaaggtgtccaccagcgcccggctggaggtgcgggtgaagcctgtggtgttcctgaaggccctggatgacctgtctgctgaggagcggggcaccctggccctgcagtgtgaggtgtctgaccctgaggcccacgtggtgtggaggaaggatggagtgcagctgggccccagcgacaagtatgacttcctgcacacagctggcacccggggcctggtggtgcatgatgtgtccccagaagatgctggcctgtacacctgccacgtgggcagcgaggagacccgggcccgggtgcgggtgcatgacctgcacgtgggcatcaccaagaggctgaagaccatggaggtgctggagggggagagctgcagctttgaatgtgtgctgagccatgaaagtgccagtgaccctgccatgtggacagtgggcggcaagacagtgggcagcagcagccgcttccaggccacccggcagggcaggaagtacatcctggtggtgcgggaggccgcccccagtgatgctggggaggtggtgttttctgtgcggggcctgaccagcaaggccagcctgattgtgcgggagaggcctgctgccatcatcaagcccctggaggaccagtgggtggcccctggagaagatgtggagctgcgctgtgagctgagcagagctggcacccctgtgcactggctgaaggacaggaaggccatcaggaagagccagaagtatgatgtggtgtgtgagggcaccatggccatgctggtgatccggggggccagcctgaaggatgctggggagtacacctgtgaggtggaggccagcaagagcacagccagcctgcacgtggaggagaaggccaactgcttcacagaggagctgaccaacctgcaggtggaggagaagggcacagctgtgttcacctgcaagacagagcaccctgctgccaccgtgacctggaggaagggcctgctggagctgcgggccagcggcaagcaccagcccagccaggagggcctgaccctgcggctgaccatcagcgccctggagaaggctgacagcgacacctacacctgtgacatcggccaggcccagagccgggcccagctgctggtgcagggcagaagagtgcacatcatcgaggacctggaggatgtggatgtgcaggagggcagcagcgccaccttccgctgccgcatcagccctgccaactatgagcctgtgcactggttcctggacaagacccccctgcacgccaatgagctgaatgaaattgatgcccagcccggcggctaccacgtgctgaccctgcggcagctggccctgaaggacagcggcaccatctactttgaggccggggaccagagggccagcgctgccctgcgggtgacagagaagcccagcgtcttcagccgggagctgacagatgccaccatcacagaaggagaggacctgaccctggtgtgtgagaccagcacctgtgacatccctgtgtgctggaccaaggatggcaagaccctgcggggcagcgcccgctgccagctgagccatgagggccaccgggcccagctgctgatcactggagccaccctgcaggacagcggccgctacaagtgtgaggccggcggggcctgcagcagcagcatcgtgcgggtgcacgcccggcctgtgcgcttccaggaggccctgaaggacctggaggtgctggagggcggggccgccaccctgcgctgtgtgctgagctctgtggccgcccctgtgaagtggtgctacggcaacaacgtgctgcggcctggggacaagtacagcctgcggcaggagggcgccatgctggagctggtggtgaggaacctgcggccccaggacagcggccgctacagctgcagctttggagaccagaccaccagcgccaccctgactgtgacagccctgcctgcccagttcatcggcaagctgaggaacaaggaggccacagagggcgccacagccaccctgcgctgtgagctgagcaaggccgcccctgtggagtggaggaaaggaagtgagaccctgagagatggagaccgctactgcctgcggcaggatggagccatgtgtgagctgcagatccggggcctggccatggtggatgctgctgagtacagctgtgtgtgtggggaggagaggaccagcgccagcctgaccatccggcccatgcctgcccacttcatcggccgcctgcggcaccaggagagcattgagggcgccacagccaccctgcgctgtgagctgagcaaggccgcccctgtggagtggaggaagggccgggagagcctgagagatggagacagacacagcctgcggcaggatggagctgtgtgtgagctgcagatctgtggcctggccgtggctgatgctggggagtacagctgtgtgtgtggggaggagaggaccagcgccaccctgactgtgaaggccctgcctgccaagttcacagagggcctgagaaatgaggaggccgtggagggcgccacagccatgctgtggtgtgagctgagcaaggtggcccctgtggagtggaggaaaggacctgagaacctgagagatggagaccgctacatcctgcggcaggagggcacccgctgtgagctgcagatctgtggcctggccatggctgatgctggggagtacctgtgtgtgtgtggccaggagaggaccagcgccaccctgaccatccgggccctgcctgcccgcttcattgaagatgtgaagaaccaggaggcccgggagggcgccacagctgtgctgcagtgtgagctgaacagcgctgcccctgtggagtggaggaaaggaagtgagaccctgagagatggagaccgctacagcctgcggcaggacggcaccaagtgtgagctgcagatccggggcctggccatggctgacacaggagagtacagctgtgtgtgtggccaggagaggaccagcgccatgctgactgtgcgggccctgcccatcaagttcacagagggcctgagaaatgaggaggccacagagggcgccacagctgtgctgcgctgtgagctgagcaagatggcccctgtggagtggtggaagggccacgagaccctgagagatggagacagacacagcctgcggcaggatggagcccgctgtgagctgcagatccggggcctggtggctgaagatgctggggagtacctgtgcatgtgtgggaaggagaggaccagcgccatgctgactgtgcgggccatgcccagcaagttcatcgagggcctgagaaatgaggaggccacagaaggagacacagccaccctgtggtgtgagctgagcaaggccgcccctgtggagtggaggaaaggacatgagaccctgagagatggagacagacacagcctgcggcaggacggcagccgctgtgagctgcagatccggggcctggccgtggtggatgctggggagtacagctgtgtgtgtggccaggagaggaccagcgccaccctgactgtgcgggccctgcctgcccgcttcattgaagatgtgaagaaccaggaggcccgggagggcgccacagctgtgctgcagtgtgagctgagcaaggccgcccctgtggagtggaggaaaggaagtgagaccctgcggggcggggaccgctacagcctgcggcaggacggcacccgctgtgagctgcagatccacggcctgtctgtggccgacacaggagagtacagctgtgtgtgtggccaggagaggaccagcgccaccctgactgtgcgggccccccagcccgtcttccgggagcccctgcagagcctgcaggccgaggagggcagcacagccaccctgcagtgtgagctgtctgagcccacagccaccgtggtgtggagcaagggcggcctgcagctgcaggccaacggccggcgggagccccggctgcagggctgcacagctgagctggtgctgcaggacctgcagcgggaggacaccggggagtacacctgcacctgtggcagccaggccaccagcgccaccctgactgtgacagctgcccctgtgcgcttcctgcgggagctgcagcaccaggaggtggatgaaggaggaacagcccacctgtgctgtgagctgagcagagctggggcctctgtggagtggaggaagggcagcctgcagctgttcccctgtgccaagtaccagatggtgcaggatggagctgctgctgagctgctggtgcggggcgtggagcaggaggatgctggggactacacctgtgacaccggccacacccagagcatggccagcctgtctgtgcgggtgccccggcccaagttcaagacccggctgcagagcctggagcaggagactggagacatcgcccggctgtgctgccagctgagtgatgctgagagcggggctgtggtgcagtggctgaaggagggcgtggagctgcatgctggccccaagtatgagatgaggagccagggcgccacccgggagctgctgatccaccagctggaggccaaggacaccggggagtatgcctgtgtgactggaggccagaagacagctgccagcctgcgggtgacagagcctgaggtgaccatcgtgcggggcctggtggatgctgaggtgacagcagatgaagatgtggagttcagctgtgaggtgtccagagctggggccaccggggtgcagtggtgcctgcagggcctgcccctgcagagcaatgaggtgacagaggtggccgtgagagatggccgcatccacaccctgcggctgaagggcgtgaccccagaagatgctggcaccgtgtccttccacctgggcaaccacgccagcagcgcccagctgactgtgcgggcccctgaggtgaccatcctggagcccctgcaggatgtgcagctgtctgagggccaggatgccagcttccagtgccgcctgagccgggccagcggccaggaggcccgctgggccctgggcggcgtgcccctgcaggccaatgagatgaatgacatcaccgtggagcagggcaccctgcacctgctgaccctgcacaaggtgaccctggaggatgctggcaccgtgtccttccacgtgggcacctgcagcagcgaggcccagctgaaggtgacagccaagaacacagtggtgcggggcctggagaatgtggaggccctggagggcggggaggccctgtttgagtgccagctgagccagcctgaggtggccgcccacacctggctgctggatgatgagcctgtgcacaccagtgaaaatgctgaggtggtgttctttgaaaatggcctgcggcacctgctgctgctgaagaacctgcggccccaggacagctgccgggtgaccttcctggccggggacatggtgaccagcgccttcctgactgtgcggggctggaggctggagatcctggagcccctgaagaatgctgctgtgcgggccggggcccaggcctgcttcacctgcaccctgtctgaggccgtgcctgtgggggaggcctcctggtacatcaatggagctgctgtgcagccagatgacagcgactggacagtgacagcagatggcagccaccacgccctgctgctgcggagcgcccagccccaccacgccggggaggtgacctttgcctgcagagatgctgtggccagcgcccggctgactgtgctgggcctgcctgaccccccagaagatgctgaggtggtggcccggagcagccacacagtgaccctgtcctgggccgcccccatgtctgatggcggcggcggcctgtgtggctacagagtggaggtgaaggagggcgccaccggccagtggaggctgtgccacgagctggtgcccggcccagaatgtgtggtggatggcctggcccctggagagacctaccgcttccgggtggccgctgtgggccctgtgggcgctggggagcctgtgcacctgccccagacagtgcggctggccgagccccccaagcctgtgcccccccagcccagcgcccctgagagccggcaggtggccgctggagaagatgtgtccctggagctggaggtggtggccgaggccggggaggtgatctggcacaagggcatggagcgcatccagcccggcggccgctttgaggtggtgtcccagggccggcagcagatgctggtgatcaagggcttcaccgctgaggaccagggcgagtaccactgcggcctggcccagggcagcatctgcccagctgctgccaccttccaggtggccctgagccctgcctctgtggatgaggccccccagcccagcctgcccccagaggccgcccaggagggggacctgcacctgctgtgggaggccctggccaggaagaggaggatgagccgggagcccaccctggacagcatcagcgagctgcctgaggaggatggccgcagccagaggctgccccaggaggccgaggaggtggccccagacctgtctgagggctacagcacagcagatgagctggccaggactggagatgctgacctgagccacaccagcagtgatgatgagagcagagctggcacccccagcctggtgacctacctgaagaaggccggccggcccggcaccagccccctggccagcaaggtgggcgccccagctgcccccagcgtgaagccccagcagcagcaggagcccctggccgctgtgcggccccccctgggggacctgagcaccaaggacctgggggaccccagcatggacaaggctgctgtgaagatccaggccgccttcaagggctacaaggtgaggaaggagatgaagcagcaggagggccccatgttcagccacaccttcggggacacagaggcccaggtgggagatgccctgcggctggagtgtgtggtggccagcaaggcagatgtgcgggcccgctggctgaaggatggagtggagctgacagatggccgccaccaccacatcgaccagctgggagatggcacctgcagcctgctgatcaccggcctggacagagcagatgctggctgctacacctgccaggtgagcaacaagtttggccaggtgacccacagcgcctgtgtggtggtgtctggcagcgagagcgaggccgagagcagcagtggaggagagctggatgatgccttccggcgggccgcccggcggctgcacaggctcttccgcaccaagagccctgctgaggtgtctgatgaggagctgttcctgtctgcagatgagggccctgctgagcctgaggagcctgctgactggcagacctacagagaagatgagcacttcatctgcatccgctttgaggccctgacagaggcccggcaggccgtgacccgcttccaggagatgtttgccaccctgggcatcggcgtggagatcaagctggtggagcagggcccccggcgggtggagatgtgcatcagcaaggagaccccagcccctgtggtgcccccagagcccctgcccagcctgctgaccagtgatgctgcccctgtgttcctgacagagctgcagaaccaggaggtgcaggacggctaccctgtgtcctttgactgtgtggtgacaggccagcccatgcccagcgtgcgctggttcaaggatggcaagctgctggaggaggatgaccactacatgatcaatgaagaccagcagggcggccaccagctgatcatcacagctgtggtgcctgctgacatgggcgtgtaccgctgcctggccgagaacagcatgggcgtgagcagcaccaaggccgagctgcgggtggacctgaccagcacagattatgacacagctgctgatgccacagagagcagcagctacttcagcgcccagggctacctgagcagccgggagcaggagggcacagagagcaccacagatgagggccagctgccccaggtggtggaggagctgcgggacctgcaggtggcccctggcacccggctggccaagttccagctgaaggtgaagggctacccagccccccggctgtactggttcaaggatggccagcccctgacagccagcgcccacatccgcatgacagacaagaagatcctgcacaccctggagatcatctctgtgacccgggaggacagcggccagtatgctgcctacatcagcaatgccatgggcgccgcctacagcagcgcccggctgctggtgcggggcccagatgagcctgaggagaagccagccagtgatgtgcatgagcagctggtgccccccaggatgctggagcgcttcacccccaagaaggtgaagaagggcagcagcatcaccttctctgtgaaggtggagggccggcctgtgcccaccgtgcactggctgcgggaggaggccgagcggggcgtgctgtggattggccctgacaccccaggctacacagtggccagcagcgcccagcagcacagcctggtgctgctggatgtgggccggcagcaccagggcacctacacctgcatcgccagcaatgctgctggccaggccctgtgcagcgccagcctgcacgtgtctggcctgcccaaggtggaggagcaggagaaggtgaaggaggccctgatcagcaccttcctgcagggcaccacccaggccatcagcgcccagggcctggagacagccagctttgctgacctgggcggccagaggaaggaggagcccctggccgccaaggaggccctgggccacctgagcctggccgaggtgggcacagaggagttcctgcagaagctgaccagccagatcacagagatggtgtctgccaagatcacccaggccaagctgcaggtgcctggaggagacagtgatgaggacagcaagaccccatctgccagccccaggcatggccgcagccggcccagcagcagcatccaggagagcagcagcgagagtgaagatggagatgcccggggggagatctttgacatctacgtggtgacagctgactacctgcccctgggcgctgagcaggatgccatcaccctgcgggagggccagtatgtggaggtgctggatgctgcccaccccctgcgctggctggtgaggaccaagcccaccaagagcagccccagccggcagggctgggtgtccccagcctacctggaccggcggctgaagctgagccctgagtggggcgctgctgaggcccctgagttccctggagaggccgtgtctgaagatgagtacaaggcccggctgagcagcgtcatccaggagctgctgagcagcgagcaggcctttgtggaggagctgcagttcctgcagagccaccacctgcagcacctggagcgctgcccccacgtgcccatcgctgtggccggccagaaggccgtcatcttcagaaatgtgcgggacatcggccgcttccacagcagcttcctgcaggagctgcagcagtgtgacacagatgatgatgtggccatgtgcttcatcaagaaccaggccgcctttgagcagtacctggagttcctggtgggccgggtgcaggccgagagcgtggtggtgtccacagccatccaggagttctacaagaagtatgcagaggaggccctgctggccggggaccccagccagcccccacctccacccctgcagcactacctggagcagcctgtggagcgggtgcagcgctaccaggccctgctgaaggagctgatccggaacaaggccaggaaccggcagaactgtgccctgctggagcaggcctatgctgtggtgtctgccctgccccagagagctgagaacaagctgcacgtgtccctgatggagaactacccaggcaccctgcaggccctgggggagcccatccggcagggccacttcatcgtgtgggagggcgcccctggggccaggatgccctggaagggccacaacagacatgtgttcctgttcaggaaccacctggtgatctgcaagccccggcgggacagcaggacagacacagtgtcctatgtgttcaggaacatgatgaagctgagcagcattgacctgaatgaccaggtggagggagatgaccgggcctttgaggtgtggcaggagcgggaggacagcgtgaggaagtacctgctgcaggccaggacagccatcatcaagagctcctgggtgaaggagatctgtggcatccagcagaggctggccctgcctgtgtggaggcccccagactttgaggaggagctggccgactgcacagctgagctgggggagaccgtgaagctggcctgccgggtgacaggcacccccaagcctgtgatctcctggtacaaggatggcaaggctgtgcaggtggacccccaccacatcctgattgaggaccctgatggcagctgtgccctgatcctggacagcctgactggagtggacagcggccagtacatgtgctttgctgccagcgctgctggcaactgcagcaccctgggcaagatcctggtgcaggtgcccccaagatttgtgaacaaggtgcgggccagcccctttgtggagggagaagatgcccagttcacctgcaccattgaaggagccccctacccccagatccgctggtacaaggatggagccctgctgaccaccggcaacaagttccagaccctgtctgagcccaggagcggcctgctggtgctggtgatccgggccgccagcaaagaagacctgggcctgtatgaatgtgagctggtgaaccggctgggcagcgcccgggccagcgctgagctgcgcatccagagccccatgctgcaggcccaggagcagtgccaccgggagcagctggtggccgctgtggaggtgacagagcaggagaccaaggtgcccaagaagacagtcatcatcgaggagaccatcaccaccgtggtgaagagcccccggggccagaggaggagccccagcaagagccccagccgcagccccagccgctgcagcgccagccccctgcggcccggcctgctggccccagacctgctgtacctgcccggggccggccagccccggcggcctgaggccgagcccggccagaagcctgtggtgcccaccctgtatgtgacagaggccgaggcccacagccctgccctgcccggcctgagcggcccccagcccaagtgggtggaggtggaggagaccatcgaggtgcgggtgaagaagatgggcccccagggcgtgagccccaccacagaggtgcccaggagcagcagcggccacctgttcaccctgcccggggccaccccaggaggagaccccaacagcaacaacagcaacaacaagctgctggcccaggaggcctgggcccagggcacagccatggtgggcgtgcgggagcccctggtgttccgggtggatgcccggggctctgtggactgggccgccagcggcatgggcagcctggaggaggagggcaccatggaggaggccggggaggaggagggagaagatggagatgcctttgtgacagaggagagccaggacacccacagcctgggggaccgggaccccaagatcctgacccacaacggccgcatgctgaccctggccgacctggaggactatgtgcctggagagggggagaccttccactgcggcggccctggccctggggccccagatgatcctccctgtgaggtgtctgtcatccagcgggagatcggggagcccaccgtgggccagcctgtgctgctgtctgtgggccacgccctgggcccccggggccccctgggcctcttccggcctgagcccaggggggccagccccccaggcccccaggtgcgcagcctggagggcaccagcttcctgctgcgggaggccccagcccggcctgtgggcagcgccccctggacccagagcttctgcacccgcatccgccgctctgctgacagcggccagagcagcttcaccacagagctgagcacccagacagtgaactttggaacagtgggggagaccgtgaccctgcacatctgcccagacagagatggagatgaagctgcccagccctag

SEQ ID NO: 229269 - DNA, 11220 bp, Artificial Sequence
  derived and/or modified sequence
atgctggtgatccggggggccagcctgaaggatgctggggagtacacctgtgaggtggaggccagcaagagcacagccagcctgcacgtggaggagaaggccaactgcttcacagaggagctgaccaacctgcaggtggaggagaagggcacagctgtgttcacctgcaagacagagcaccctgctgccaccgtgacctggaggaagggcctgctggagctgcgggccagcggcaagcaccagcccagccaggagggcctgaccctgcggctgaccatcagcgccctggagaaggctgacagcgacacctacacctgtgacatcggccaggcccagagccgggcccagctgctggtgcagggccggcgggtgcacatcatcgaggacctggaggatgtggatgtgcaggagggcagcagcgccaccttccgctgccgcatcagccctgccaactatgagcctgtgcactggttcctggacaagacccccctgcacgccaatgagctgaatgaaattgatgcccagcccggcggctaccacgtgctgaccctgcggcagctggccctgaaggacagcggcaccatctactttgaagctggggaccagagggccagcgctgccctgcgggtgacagagaagcccagcgtcttcagccgggagctgacagatgccaccatcacagaaggagaggacctgaccctggtgtgtgagaccagcacctgtgacatccctgtgtgctggaccaaggatggcaagaccctgcggggcagcgcccgctgccagctgagccatgagggccaccgggcccagctgctgatcaccggggccaccctgcaggacagcggccgctacaagtgtgaggccggcggggcctgcagcagcagcatcgtgcgggtgcacgcccggcctgtgcgcttccaggaggccctgaaggacctggaggtgctggagggcggggccgccaccctgcgctgtgtgctgagctctgtggccgcccctgtgaagtggtgctacggcaacaacgtgctgcggcctggggacaagtacagcctgcggcaggagggcgccatgctggagctggtggtgaggaacctgcggccccaggacagcggccgctacagctgcagctttggagaccagaccaccagcgccaccctgactgtgacagccctgcctgcccagttcatcggcaagctgaggaacaaggaggccacagaaggagccacagccaccctgcgctgtgagctgagcaaggccgcccctgtggagtggaggaagggcagcgagaccctgagagatggagaccgctactgcctgcggcaggatggagccatgtgtgagctgcagatccggggcctggccatggtggatgctgctgagtacagctgtgtgtgtggggaggagaggaccagcgccagcctgaccatccggcccatgcctgcccacttcatcggccgcctgcggcaccaggagagcattgaaggagccacagccaccctgcgctgtgagctgagcaaggccgcccctgtggagtggaggaagggccgggagagcctgagagatggagacagacacagcctgcggcaggatggagctgtgtgtgagctgcagatctgtggcctggccgtggctgatgctggggagtacagctgtgtgtgtggggaggagaggaccagcgccaccctgactgtgaaggccctgcctgccaagttcacagagggcctgagaaatgaggaggccgtggagggcgccacagccatgctgtggtgtgagctgagcaaggtggcccctgtggagtggaggaagggccctgagaacctgagagatggagaccgctacatcctgcggcaggagggcacccgctgtgagctgcagatctgtggcctggccatggctgatgctggggagtacctgtgtgtgtgtggccaggagaggaccagcgccaccctgaccatccgggccctgcctgcccgcttcattgaagatgtgaagaaccaggaggcccgggagggcgccacagctgtgctgcagtgtgagctgaacagcgctgcccctgtggagtggaggaagggcagcgagaccctgagagatggagaccgctacagcctgcggcaggacggcaccaagtgtgagctgcagatccggggcctggccatggctgacaccggggagtacagctgtgtgtgtggccaggagaggaccagcgccatgctgactgtgcgggccctgcccatcaagttcacagagggcctgagaaatgaggaggccacagaaggagccacagctgtgctgcgctgtgagctgagcaagatggcccctgtggagtggtggaagggccacgagaccctgagagatggagacagacacagcctgcggcaggatggagcccgctgtgagctgcagatccggggcctggtggccgaggatgctggggagtacctgtgcatgtgtgggaaggagaggaccagcgccatgctgactgtgcgggccatgcccagcaagttcatcgagggcctgagaaatgaggaggccacagaaggagacacagccaccctgtggtgtgagctgagcaaggccgcccctgtggagtggaggaagggccacgagaccctgagagatggagacagacacagcctgcggcaggacggcagccgctgtgagctgcagatccggggcctggccgtggtggatgctggggagtacagctgtgtgtgtggccaggagaggaccagcgccaccctgactgtgcgggccctgcctgcccgcttcattgaagatgtgaagaaccaggaggcccgggagggcgccacagctgtgctgcagtgtgagctgagcaaggccgcccctgtggagtggaggaagggcagcgagaccctgcggggcggggaccgctacagcctgcggcaggacggcacccgctgtgagctgcagatccacggcctgtctgtggccgacaccggggagtacagctgtgtgtgtggccaggagaggaccagcgccaccctgactgtgcgggccccccagcctgtgttccgggagcccctgcagagcctgcaggccgaggagggcagcacagccaccctgcagtgtgagctgtctgagcccacagccaccgtggtgtggagcaaaggaggcctgcagctgcaggccaatggaagaagagagccccggctgcagggctgcacagctgagctggtgctgcaggacctgcagagagaagatactggagagtacacctgcacctgtggcagccaggccaccagcgccaccctgactgtgacagctgcccctgtgcgcttcctgcgggagctgcagcaccaggaggtggatgagggcggcacagcccacctgtgctgtgagctgagccgggccggggcctctgtggagtggaggaagggcagcctgcagctgttcccctgtgccaagtaccagatggtgcaggatggagctgctgctgagctgctggtgcggggcgtggagcaggaggatgctggggactacacctgtgacaccggccacacccagagcatggccagcctgtctgtgcgggtgccccggcccaagttcaagacccggctgcagagcctggagcaggagaccggggacatcgcccggctgtgctgccagctgagtgatgctgagagcggggctgtggtgcagtggctgaaggagggcgtggagctgcacgccggccccaagtatgagatgaggagccagggcgccacccgggagctgctgatccaccagctggaggccaaggacacaggagaatatgcctgtgtgactggaggccagaagacagctgccagcctgcgggtgacagagcctgaggtgaccatcgtgcggggcctggtggatgctgaggtgacagcagatgaagatgtggagttcagctgtgaggtgtcccgggccggggccactggagtgcagtggtgcctgcagggcctgcccctgcagagcaatgaggtgacagaggtggccgtgagagatggccgcatccacaccctgcggctgaagggcgtgaccccagaagatgctggcaccgtgtccttccacctgggcaaccacgccagcagcgcccagctgactgtgcgggcccctgaggtgaccatcctggagcccctgcaggatgtgcagctgtctgagggccaggatgccagcttccagtgccgcctgagccgggccagcggccaggaggcccgctgggccctgggcggcgtgcccctgcaggccaatgagatgaatgacatcaccgtggagcagggcaccctgcacctgctgaccctgcacaaggtgaccctggaggatgctggcaccgtgtccttccacgtgggcacctgcagcagcgaggcccagctgaaggtgacagccaagaacacagtggtgcggggcctggagaatgtggaggccctggagggcggggaggccctgtttgagtgccagctgagccagcctgaggtggccgcccacacctggctgctggatgatgagcctgtgcacaccagtgaaaatgctgaggtggtgttctttgaaaatggcctgcggcacctgctgctgctgaagaacctgcggccccaggacagctgccgggtgaccttcctggccggggacatggtgaccagcgccttcctgactgtgcggggctggaggctggagatcctggagcccctgaagaatgctgctgtgcgggccggggcccaggcctgcttcacctgcaccctgtctgaggccgtgcctgtgggggaggcctcctggtacatcaacggggctgctgtgcagccagatgacagcgactggacagtgacagcagatggcagccaccacgccctgctgctgcggagcgcccagccccaccacgccggggaggtgacctttgcctgcagagatgctgtggccagcgcccggctgactgtgctgggcctgcctgaccccccagaagatgctgaggtggtggcccggagcagccacacagtgaccctgtcctgggccgcccccatgtctgatggcggcggcggcctgtgtggctacagagtggaggtgaaggagggcgccaccggccagtggaggctgtgccacgagctggtgcccggcccagaatgtgtggtggatggcctggcccctggagagacctaccgcttccgggtggccgctgtgggccctgtgggcgctggggagcctgtgcacctgccccagacagtgcggctggccgagccccccaagcctgtgcccccccagcccagcgcccctgagagccggcaggtggccgccggggaggatgtgtccctggagctggaggtggtggccgaggccggggaggtgatctggcacaagggcatggagcgcatccagcccggcggccgctttgaggtggtgtcccagggccggcagcagatgctggtgatcaagggcttcaccgctgaggaccagggcgagtaccactgcggcctggcccagggcagcatctgcccagctgctgccaccttccaggtggccctgagccctgcctctgtggatgaggccccccagcccagcctgcccccagaggccgcccaggagggggacctgcacctgctgtgggaggccctggccaggaagaggaggatgagccgggagcccaccctggacagcatcagcgagctgcctgaagaagatggccgcagccagaggctgccccaggaggccgaggaggtggccccagacctgtctgagggctacagcacagcagatgagctggccaggactggagatgctgacctgagccacaccagcagtgatgatgagagccgggccggcacccccagcctggtgacctacctgaagaaggccggccggcccggcaccagccccctggccagcaaggtgggcgccccagctgcccccagcgtgaagccccagcagcagcaggagcccctggccgctgtgcggccccccctgggggacctgagcaccaaggacctgggggaccccagcatggacaaggctgctgtgaagatccaggccgccttcaagggctacaaggtgaggaaggagatgaagcagcaggagggccccatgttcagccacacctttggagacacagaggcccaggtgggagatgccctgcggctggagtgtgtggtggccagcaaggcagatgtgcgggcccgctggctgaaggatggagtggagctgacagatggccgccaccaccacatcgaccagctgggagatggcacctgcagcctgctgatcaccggcctggacagagcagatgctggctgctacacctgccaggtgagcaacaagtttggccaggtgacccacagcgcctgtgtggtggtgtctggcagcgagagcgaggccgagagcagcagcggcggggagctggatgatgccttcagaagagctgcccggcggctgcacaggctcttccgcaccaagagccctgctgaggtgtctgatgaggagctgttcctgtctgcagatgagggccctgctgagcctgaggagcctgctgactggcagacctaccgggaggatgagcacttcatctgcatccgctttgaggccctgacagaggcccggcaggccgtgacccgcttccaggagatgtttgccaccctgggcattggagtggagatcaagctggtggagcagggccccaggagagtggagatgtgcatcagcaaggagaccccagcccctgtggtgcccccagagcccctgcccagcctgctgaccagtgatgctgcccctgtgttcctgacagagctgcagaaccaggaggtgcaggacggctaccctgtgtcctttgactgtgtggtgacaggccagcccatgcccagcgtgcgctggttcaaggatggcaagctgctggaggaggatgaccactacatgatcaatgaagaccagcagggcggccaccagctgatcatcacagctgtggtgcctgctgacatgggcgtgtaccgctgcctggctgaaaattccatgggcgtgagcagcaccaaggccgagctgcgggtggacctgaccagcacagattatgacacagctgctgatgccacagagagcagcagctacttcagcgcccagggctacctgagcagccgggagcaggagggcacagagagcaccacagatgagggccagctgccccaggtggtggaggagctgcgggacctgcaggtggcccctggcacccggctggccaagttccagctgaaggtgaagggctacccagccccccggctgtactggttcaaggatggccagcccctgacagccagcgcccacatccgcatgacagacaagaagatcctgcacaccctggagatcatctctgtgaccagagaagattctggccagtatgctgcctacatcagcaatgccatgggcgccgcctacagcagcgcccggctgctggtgcggggcccagatgagcctgaggagaagccagccagtgatgtgcatgagcagctggtgccccccaggatgctggagcgcttcacccccaagaaggtgaagaagggcagcagcatcaccttctctgtgaaggtggagggccggcctgtgcccaccgtgcactggctgcgggaggaggccgagcggggcgtgctgtggattggaccagacaccccaggctacacagtggccagcagcgcccagcagcacagcctggtgctgctggatgtgggccggcagcaccagggcacctacacctgcatcgccagcaatgctgctggccaggccctgtgcagcgccagcctgcacgtgtctggcctgcccaaggtggaggagcaggagaaggtgaaggaggccctgatcagcaccttcctgcagggcaccacccaggccatcagcgcccagggcctggagacagccagctttgctgacctgggcggccagaggaaggaggagcccctggccgccaaggaggccctgggccacctgagcctggccgaggtgggcacagaggagttcctgcagaagctgaccagccagatcacagagatggtgtctgccaagatcacccaggccaagctgcaggtgcctggaggagacagtgatgaggacagcaagacccccagcgccagccccaggcatggccgcagccggcccagcagcagcatccaggagagcagcagcgagagtgaagatggagatgcccggggggagatctttgacatctacgtggtgacagctgactacctgcccctgggcgctgagcaggatgccatcaccctgcgggagggccagtatgtggaggtgctggatgctgcccaccccctgcgctggctggtgaggaccaagcccaccaagagcagccccagccggcagggctgggtgtccccagcctacctggaccggcggctgaagctgagccctgagtggggcgctgctgaggcccctgagttccctggagaggccgtgtctgaagatgagtacaaggcccggctgagcagcgtcatccaggagctgctgagcagcgagcaggcctttgtggaggagctgcagttcctgcagagccaccacctgcagcacctggagcgctgcccccacgtgcccatcgctgtggccggccagaaggctgtgatcttcagaaatgtgcgggacatcggccgcttccacagcagcttcctgcaggagctgcagcagtgtgacacagatgatgatgtggccatgtgcttcatcaagaaccaggccgcctttgagcagtacctggagttcctggtgggccgggtgcaggccgagagcgtggtggtgtccacagccatccaggagttctacaagaagtatgcagaggaggccctgctggccggggaccccagccagcccccacctccacccctgcagcactacctggagcagcctgtggagcgggtgcagcgctaccaggccctgctgaaggagctgatccggaacaaggccaggaaccggcagaactgtgccctgctggagcaggcctatgctgtggtgtctgccctgccccagagagctgagaacaagctgcacgtgtccctgatggagaactacccaggcaccctgcaggccctgggggagcccatccggcagggccacttcatcgtgtgggagggcgcccctggggccaggatgccctggaagggccacaacagacatgtgttcctgttcaggaaccacctggtgatctgcaagccccggcgggacagcaggacagacacagtgtcctatgtgttcaggaacatgatgaagctgagcagcattgacctgaatgaccaggtggagggagatgaccgggcctttgaggtgtggcaggagagagaagattctgtgaggaagtacctgctgcaggccaggacagccatcatcaagagctcctgggtgaaggagatctgtggcatccagcagaggctggccctgcctgtgtggaggcccccagactttgaggaggagctggccgactgcacagctgagctgggggagaccgtgaagctggcctgccgggtgacaggcacccccaagcctgtgatctcctggtacaaggatggcaaggctgtgcaggtggacccccaccacatcctgattgaagatcctgatggcagctgtgccctgatcctggacagcctgactggagtggacagcggccagtacatgtgctttgctgccagcgctgctggcaactgcagcaccctgggcaagatcctggtgcaggtgccccccaggtttgtgaacaaggtgcgggccagcccctttgtggagggggaggatgcccagttcacctgcaccatcgagggcgccccctacccccagatccgctggtacaaggatggagccctgctgaccactggaaacaagttccagaccctgtctgagcccaggagcggcctgctggtgctggtgatccgggccgccagcaaggaggacctgggcctgtatgaatgtgagctggtgaaccggctgggcagcgcccgggccagcgctgagctgcgcatccagagccccatgctgcaggcccaggagcagtgccaccgggagcagctggtggccgctgtggaggtgacagagcaggagaccaaggtgcccaagaagacagtcatcatcgaggagaccatcaccaccgtggtgaagagcccccggggccagaggaggagccccagcaagagccccagccgcagccccagccgctgcagcgccagccccctgcggcccggcctgctggccccagacctgctgtacctgcctggagctggccagcccaggaggcctgaggccgagcccggccagaagcctgtggtgcccaccctgtatgtgacagaagctgaggcccacagccctgccctgcccggcctgagcggcccccagcccaagtgggtggaggtggaggagaccatcgaggtgcgggtgaagaagatgggcccccagggcgtgagccccaccacagaggtgcccaggagcagcagcggccacctgttcaccctgcccggggccaccccaggaggagaccccaacagcaacaacagcaacaacaagctgctggcccaggaggcctgggcccagggcacagccatggtgggcgtgcgggagcccctggtgttccgggtggatgcccggggctctgtggactgggccgccagcggcatgggcagcctggaggaggagggcaccatggaggaggccggggaggaggagggggaggatggagatgcctttgtgacagaggagagccaggacacccacagcctgggggaccgggaccccaagatcctgacccacaatggaaggatgctgaccctggccgacctggaggactatgtgcctggagagggggagaccttccactgcggcggccctggccctggggccccagatgaccccccctgtgaggtgtctgtcatccagcgggagattggagagcccaccgtgggccagcctgtgctgctgtctgtgggccacgccctgggcccccggggccccctgggcctcttccggcctgagcccaggggggccagccccccaggcccccaggtgcgcagcctggagggcaccagcttcctgctgcgggaggccccagcccggcctgtgggcagcgccccctggacccagagcttctgcacccgcatcagaagatctgctgacagcggccagagcagcttcaccacagagctgagcacccagacagtgaactttggcaccgtgggggagaccgtgaccctgcacatctgcccagacagagatggagatgaggccgcccagccctag

SEQ ID NO: 229270 - DNA, 19863 bp, Artificial Sequence
  derived and/or modified sequence
atggaccagccccagttcagcggcgccccccggttcctgacccggcctaaggccttcgtggttagtgtgggtaaagacgctaccctgagttgtcagatagtggggaatcctactccccaggtgtcctgggagaaagaccagcaaccagttgccgcaggagcccggttcaggctggctcaggatggagatctttatcggctcaccatcctggatcttgcactcggggattcaggccagtatgtctgtcgcgcgagaaatgcaattggtgaggccttcgctgctgtgggattacaggtcgacgcagaagccgcatgcgccgagcaggcaccacactttcttttacgacctacatctattagggtgagagaaggaagtgaggccaccttccgctgtcgggttggcggatctcctagaccagccgtgtcctggtccaaggacggacgcaggctgggcgagcccgacggcccccgggtccgcgtcgaagagctgggcgaggcgtctgcactgaggatcagggccgcaagaccccgcgacggcgggacatatgaagtgcgagctgaaaatcccttaggagctgcttctgcggcggccgctctggtcgttgactccgacgctgcggatacagcttcaaggcccggtacaagcaccgccgcactgctggctcatctgcagcggcgtagggaggcgatgcgcgctgagggtgcaccagcaagcccgccaagtacagggacccggacttgtactgtgacagagggaaaacacgccaggctgtcctgttacgtcaccggggaaccaaagcctgaaaccgtgtggaagaaggatggccagctcgtcaccgagggtcgaagacacgtggtgtacgaagacgcccaggaaaacttcgtgctcaagattctgttttgtaagcagtccgaccggggtctgtatacttgtaccgcatcaaatctggtgggacaaacctactcgagtgtcctagtggtggtgcgggagccagccgtgcctttcaagaagcgtctgcaggatctcgaggtccgcgaaaaggaatctgcaacctttttgtgtgaagttcctcagccaagcacagaagctgcttggtttaaagaggaaacccgtctgtgggcctccgccaaatatggaatcgaagaggaaggaacagaacgccgccttaccgtgagaaacgtgagtgcggacgatgacgccgtgtatatctgtgagacccctgagggaagccggaccgtagctgagctggcagttcaaggcaatttactccgcaagctccccaggaagactgccgttagagttggagatacagcaatgttctgcgtcgagctggctgtgccggtcggacctgttcactggctgcggaaccaggaggaggtcgtcgccggcggtcgggtggctatctctgctgagggcactagacacactctgacgatctcccaatgctgcctggaggacgtgggacaggtcgctttcatggccggcgactgccagacttccacacagttttgcgtctccgcccccagaaagcctccactccagccgccggtcgaccccgtggtcaaagccaggatggagagctctgtgatactgagctggtcaccccctccacacggagagaggcctgttactattgatggatacctggtcgaaaaaaagaagcttgggacttatacttggatccgatgtcacgaggccgagtgggtcgcaactcctgagttaactgtcgccgacgtggccgaagagggcaacttccagttccgcgtgagtgccctgaactcttttggccagtctccctatctggaatttccagggactgttcacttggcccccaaactcgccgtacggacccctctcaaagcggtacaggccgtggagggcggcgaggtgacattcagcgtcgatctgacagtagctagcgctggtgagtggttcctagatggccaggctctgaaagcctccagcgtgtatgagatccattgcgaccgcacacggcatacactgaccattcgcgaggttccggcgagtctgcacggagcacagttgaagtttgttgccaacgggattgagtcatcaatcaggatggaagtgcgagccgccccaggcttaactgccaataagcctcccgcagctgcagctcgcgaggtgctggcccgtcttcacgaggaggcccaactcctggccgaattatcggatcaggctgcagccgtgacctggctgaaagatgggcggacattgtcccctggtcccaaatatgaagtccaggcaagtgccggaaggagggtgcttctcgtgcgggatgtcgctagagatgacgccgggctgtacgagtgcgtatctcgaggtggaagaatagcttatcagctgagtgtgcaggggctggcccggttcctgcataaggacatggctgggtcgtgcgtggatgcagtcgcaggaggtcctgcgcagtttgagtgtgagacctccgaagcccacgtgcatgtgcactggtataaggatggcatggaactgggccatagcggtgaacgcttcctgcaggaagacgtgggcacaagacaccgcctcgtggccgctaccgttacacggcaggacgaagggacctacagctgccgcgtgggggaggactctgttgacttccgactcagagtgtccgagcctaaggtcgtgttcgctaaagaacaactggccaggaggaaattgcaggcagaagccggcgcttcagcaacactgagctgtgaggtagcccaggcgcagacagaagtgacctggtataaagatggaaagaagctgtctagcagctcgaaggtatgtatggaggccactggctgcacccgaaggctggttgtgcagcaggctggacaggccgatgccggggagtactcatgcgaggccggcggccagcgactgagctttcacctggatgtcaaggagccaaaggtagtgtttgctaaagaccaggtagcccatagcgaagtgcaagcagaggcaggagcttcggcgaccctctcgtgcgaggtggcacaggcacagaccgaagttatgtggtacaaagatggcaaaaagctcagcagttctctgaaagtgcacgtggaagccaaggggtgccgacggcgcttggtggtgcagcaggccggcaagactgatgccggagattactcctgtgaagcgcgtgggcagcgtgtgtcttttagacttcacatcacggagcctaagatgatgttcgccaaggagcaaagtgtacacaacgaggtccaggcggaggctggggcctccgctatgctttcatgcgaagtggcccaggcacagacagaagtcacatggtacaaagacggcaagaagctgtcaagctcaagcaaggtgggcatggaagttaaaggctgcacacgcaggcttgttttgccgcaggccggaaaggcagacgccggcgaatatagctgtgaagccggtggacagcgagttagcttccacctccatataactgagcccaagggcgtcttcgccaaggagcaatctgtgcacaacgaagtacaggccgaggccgggactacggccatgctgtcgtgcgaggtggcacaacctcagactgaggttacttggtacaaagacggcaaaaagctcagcagctcaagtaaggtgaggatggaagtcaaaggctgcactcggaggctcgtggttcagcaggtgggtaaagcagacgctggcgagtacagctgtgaggcaggggggcaaagggtgagcttccagctgcacattacggagccaaaggctgtgttcgcaaaagaacaactcgtccacaatgaggtgcggacggaggccggcgcgtctgcaacactgagctgtgaagtggcacaggctcaaaccgaagtgacttggtacaaagacggcaagaagcttagtagcagcagcaaagtgaggattgaggcggctggatgcatgaggcagcttgtcgtgcagcaggccggacaggccgacgccggcgaatatacctgcgaggctgggggccagcgcctgtccttccacctcgacgtcagtgagcccaaagctgtatttgcaaaggagcagttggcacacaggaaggtgcaggcagaggccggtgccatcgctaccctctcttgcgaagttgcccaggctcaaaccgaggtgacgtggtataaggatgggaagaaactcagtagttcgagcaaggtaaggatggaagcagtgggttgcacccggaggttggtcgtccaacaggcatgccaagcagacactggggaatactcgtgcgaagcagggggccagaggctgtctttctccctggacgtggctgagcccaaggtggttttcgctaaagaacaaccagtgcatcgagaagtgcaggcccaggctggagccagcacaacattgtcatgcgaagttgcgcaggcccagacagaagtgatgtggtacaaagacggaaaaaaactctccttcagctctaaggtgcgtatggaggcagtgggatgtactcgtagactggttgtgcagcaggcaggccaggccgtggcgggagaatactcctgtgaggcaggttcccagcggctgtctttccatctgcacgtagctgagccaaaagccgtatttgctaaggaacagccagcgagccgggaggttcaggccgaggcaggaacttctgccactctctcctgtgaagtggctcaggcgcaaactgaggttacgtggtacaaggacgggaaaaagctgtcctccagtagtaaggtccggatggaagctgtcggatgcacacggaggttggtcgtacaggaggctgggcaagccgatgctggagagtattcatgcaaggcaggggatcaacgcctttcttttcacttacatgtagccgagccaaaagtagtatttgcaaaggagcaaccagcacacagagaagttcaggctgaagcaggagctagtgcaacccttagctgcgaggttgcacaagcgcaaaccgaagtgacctggtacaaagacggcaagaagctcagttcgtcgagcaaagtgcgcgttgaggcagtggggtgcacgagacggctggtggtccaacaggctggacaggcagaagccggtgagtactcttgcgaagccgggggccagcagctgagttttcgactgcaggtcgccgaactagagccacaaatatcagagaggccttgtagacgtgagccactcgtggttaaggagcacgaagacataattctgacggctaccctggcgacccccagcgcggccaccgtgacgtggctgaaagacggcgtcgagatcagaagatctaagaggcatgagactgcctcgcagggagacacgcatactcttaccgtacacggagctcaggtgttagattccgccatctacagctgccgcgttggtgccgaggggcaagattttcccgttcaggttgaagaagttgcagctaagttctgtcggttactggagccagtatgcggggaactgggcggcactgtgaccttagcctgcgaattatcaccagcctgcgccgaagttgtttggcgctgtggcaatacccagctccgggtgggaaagcggttccagatggtggctgagggacctgtcagatcactcacggtgttaggactgcgtgctgaagatgccggcgagtatgtgtgcgagagcagagatgaccacaccagcgctcagctcacggtgtccgttccaagagtggtgaagttcatgtccggcctgtccactgtagtagcggaggaaggcggagaggctacttttcagtgcgtagtgagtcctagcgacgtggcagtggtgtggtttcgggacggggccctgctacagcctagcgaaaaatttgccattagccagtctggtgcgtctcacagcttgacaatatccgatttggtgctcgaagacgccggacaaattacagttgaggccgagggtgcaagcagttcagcggctctccgagtgcgggaggcaccggtgctgttcaaaaagaagctcgaaccacagactgttgaagaacgaagctccgtcacattggaggtagagctgactagaccatggcctgagctcaggtggactagaaatgcaactgccttggctcctggaaagaatgtggagattcacgctgagggagcccgacaccggctcgtgctccataatgttgggttcgcagacaggggcttcttcgggtgcgaaacccctgacgacaaaacccaagctaaactgactgtcgagatgcggcaagttaggctagtgagaggactgcaggctgtggaagcaagagaacaaggcactgccactatggaggtacagttgagtcacgccgatgtggatgggtcatggactcgagatggactgcgctttcagcaaggccctacatgccacctggccgtacgtggccccatgcataccctgaccttatccggcctgagacccgaggattccggcttgatggttttcaaggcagaaggcgtgcacaccagcgcacggcttgtggttaccgaactgcccgttagcttctcaaggccccttcaggacgtggtgacaactgaaaaggaaaaagtaaccctggaatgtgaactgagccgcccaaacgtagacgtgagatggttaaaggacggagtagaactgcgagccgggaagactatggccatcgccgctcaaggagcctgccgaagcctcactatctacagatgtgagtttgcagatcagggggtgtatgtgtgtgacgctcacgacgcccaatcgagcgcctccgtcaaagtccaggggcgcacctacaccttgatttataggcgagtcctagctgaagacgcaggcgagatccagtttgtagctgagaacgctgaaagccgggctcagctgcgggtgaaggagctgcccgtgaccctggtgcgtccgcttcgggataaaatcgcaatggaaaagcatcgcggtgtgctggagtgtcaagtgtcccgagcctctgcccaggtgcgttggtttaaggggtcacaggaactgcaacctggtcctaaatatgaactggtctccgacggcctctatcgcaagctcatcatcagcgacgttcatgcagaagatgaagacacatacacctgtgatgctggcgatgtaaagaccagcgctcagttcttcgttgaagagcagtccatcacaatcgtgagaggtctgcaagacgtgacagtgatggagcctgcacctgcctggtttgagtgcgaaacatcaataccaagcgttcggcccccaaaatggctcctgggaaagactgtgcttcaagccggcggtaatgtaggacttgaacaggaggggaccgtccacagactgatgcttagacgcacctgttccacgatgacggggcccgttcatttcaccgttggcaaaagtcggtcgagtgccagattggttgtgagcgacataccagtcgtgcttactcggcctttggagcctaaaacagggcgcgaactacagagcgttgtcttgagctgcgatttccggcctgctccaaaagcagtgcagtggtataaggacgacacacctctgtccccatccgagaaatttaaaatgagcctcgagggccagatggcggagctgcgcatacttcggctcatgcctgcagatgcaggagtttatcgctgccaggcagggagtgctcactcttcaactgaggtaacagtagaggctagggaagtgaccgttacgggccctctacaggacgctgaggccaccgaggagggctgggcaagcttctcatgcgagttgagccacgaagacgaagaggtcgagtggtccctgaatgggatgccactgtataatgattcgttccacgagatctcgcataagggccgtagacacacgcttgtccttaagtcgattcagcgggcagatgctggcatcgtgcgggcatcctcgcttaaagtttccacttccgcacggctggaagtgcgcgtgaaacccgtggtcttcttgaaagcgttggacgacctttcagccgaggaaagaggcactctggccttgcagtgtgaggtatccgaccccgaggcgcatgtcgtctggagaaaggatggagttcaactgggacctagcgacaagtacgacttcctgcacacggctggcacccggggactggtggtgcatgacgtgtcccctgaggacgcagggctttacacctgccacgtgggcagcgaggagaccagggcacgagtccgcgtgcatgatcttcatgtggggattaccaaacggttgaagacgatggaggtgctggagggagagagctgttccttcgagtgcgtcctctcacacgaaagtgcgtctgatcctgcaatgtggacagttggcgggaaaactgtgggaagcagcagcagattccaggccactaggcaggggcggaaatatatcctcgtggtcagagaggcggccccctcagacgcaggagaggtggttttctccgtgcggggcctcacatctaaggcctcgcttatcgttcgggaacgaccagctgccattatcaagccattggaggaccaatgggtggccccgggggaggatgtggagttgcgatgcgagctctctagggcaggcaccccagtacattggctgaaggaccggaaggcgattcgcaagagccagaagtatgatgtcgtgtgcgaggggaccatggccatgctggtcataaggggcgcttcattgaaagatgctggcgaatacacgtgtgaagtggaagcgagcaagagcacggcctcacttcatgttgaagagaaggccaactgttttacggaggagctcaccaacttgcaagtggaggagaagggaacagccgttttcacctgcaagaccgaacatccggcagccacggtgacctggagaaaaggtctgctggaactgcgcgcctcaggcaagcaccagccttcgcaggaagggctgacactgagacttactatttcagcactagagaaggctgatagtgacacatacacttgcgatatcgggcaagcacagtctcgtgcccagttattagtgcagggaagacgggtgcatattattgaagaccttgaggacgtcgatgtacaagaggggtcttcagctacatttcgttgcagaatatcaccagccaactatgagcccgtacactggttcctggataagactcccctgcacgcaaatgagcttaatgagatcgacgctcagccgggtgggtatcatgtgctgaccctgaggcagttagctctgaaggattctggaaccatatacttcgaggctggcgaccaaagagcttccgccgccctgcgggtgaccgagaaacctagtgtgtttagccgggagcttaccgacgccacgataaccgagggcgaagaccttacactggtctgcgagactagcacctgtgatattccagtgtgctggacgaaggacgggaagacacttagaggctccgccagatgtcagctgtcccatgaggggcaccgtgctcagctgctgataactggtgctactctgcaggactcaggcaggtataaatgcgaggccggaggagcatgtagctcatcaatcgttcgggtgcatgcaagaccagtgaggttccaggaagcactcaaagacttggaagttcttgaggggggcgccgccaccctgcggtgtgtgctctcaagcgtcgctgcgcccgtgaaatggtgttacggcaataatgtcttacggcccggggataagtattccttgcgacaggagggggctatgctggagctggtggtccgaaaccttcggccgcaggacagtgggcgatacagctgctcattcggtgaccagactactagtgccactttaactgtgacggcactccctgctcagtttatagggaagctgaggaataaagaggctacggagggtgccacagccaccctcaggtgtgaactatccaaggcagcccctgtcgaatggaggaaggggagcgaaacattgcgagatggggatcgttattgtttaagacaggacggagctatgtgcgagctccaaattcgcgggctggcaatggtggatgcagctgagtactcttgtgtatgtggggaggaaaggacctcggcctccttgacgatccggcccatgccagcccactttattgggcgactgagacatcaagagagcatcgagggtgccaccgccaccctgagatgcgaattgagtaaggctgcccctgtggagtggcggaaaggccgggaatcgctgcgcgacggtgaccgtcattctttgcggcaagatggtgcagtgtgcgagctgcagatatgtggactggcagtggccgatgctggggagtactcctgcgtttgtggggaggagaggacctctgctacacttacggttaaagcccttccagcgaaattcaccgaaggattacgcaatgaagaagcggtcgaaggggctaccgccatgctgtggtgcgagctgtcaaaagttgcccccgtggagtggcggaaaggcccagagaacctgcgtgacggagacaggtatatattgcgccaggaggggactagatgtgagctacaaatttgcggcttagccatggctgacgccggtgaatacctttgcgtgtgcggtcaagagcgaacatccgcaactctgacaatccgagccttgcctgccaggtttatcgaagacgtgaaaaatcaggaggcgagggaaggagctaccgcagtccttcagtgcgaactgaactccgccgcacccgtcgaatggagaaaaggtagtgaaaccctcagagatggcgatcggtactctttgcggcaggacggcacaaagtgcgagctgcagattagaggcctggccatggctgacacaggagagtactcttgtgtgtgcgggcaagaacgaacatctgccatgcttaccgttagagccctccccattaagtttaccgaaggtctcaggaatgaggaagccacagagggggctacagctgtactgcgctgcgagctgtccaagatggctcccgtggagtggtggaagggtcacgagacactcagagacggcgacaggcacagcctcagacaggacggagcaaggtgcgagctccaaattagagggctagttgccgaagatgccggcgaatacctttgcatgtgcgggaaggaaagaacctccgcgatgctaaccgtgagggctatgccttctaaatttatagaaggtctccgcaacgaggaggcgacagagggcgacacagctacactgtggtgtgagcttagcaaagcggcccccgtagagtggaggaagggacacgagacccttcgggatggggaccgtcattcattgcggcaggacggatcccgttgcgagcttcagattcggggattagcagtcgtggatgccggagagtatagctgcgtctgtggacaagagcgcacttccgcaactctcactgtcagagctctcccagcacgcttcatcgaagacgtcaaaaatcaggaagcgcgcgagggggccaccgccgtcctgcagtgcgaattgagtaaagcggcccctgttgaatggagaaaaggttcggaaaccctacggggcggcgacaggtatagccttcgccaagatggcaccaggtgtgagctccaaatccacggcttgagtgtcgctgatacaggtgaatactcatgtgtttgtggtcaggaacgaacatccgcaacactgacagtccgagctccgcagccagtgtttcgagagccccttcaatcccttcaggccgaggaagggtctaccgccaccctgcagtgcgagctttccgagccaacagccaccgtcgtgtggtcaaagggcggcctgcagctccaggcaaacggccgacgcgagccgcgactgcaaggctgcacagctgaattagtactgcaggacctgcagagagaggacaccggcgagtacacttgtacgtgtgggtctcaggccacttcagccactctcactgtgactgccgcccccgttaggttcttgagggagctccagcatcaggaggtcgatgaaggaggcaccgcgcacctgtgctgcgagctgagcagggcgggggcaagtgtagaatggcgaaaaggcagcctacaactcttcccttgcgcaaagtaccagatggtgcaggacggggccgcagctgaactgctcgtgagaggggtcgagcaggaggatgccggcgattatacgtgcgacaccgggcatacgcagagcatggcaagtttatcggtccgagtcccccggccgaaatttaagactagattgcagagccttgaacaggaaaccggggacattgcgcgcctctgctgccagctttctgatgctgagtccggggcggtggtccagtggctgaaggagggcgtggagcttcatgctggaccaaaatacgagatgagatcacagggggctacgcgtgagctgctgattcatcagctcgaggctaaggataccggagaatatgcgtgtgtaacagggggacagaaaacggccgcgtccctcagagttacagaaccagaagttacaattgtgaggggccttgttgatgctgaagtgacagcagatgaggacgtggagttcagctgcgaagtgtcaagggccggagctacaggcgtccagtggtgcctgcaaggtctcccactgcaatctaatgaggtgactgaagttgcggtgcgggatggtagaattcatacactcaggctcaaaggggtaactccagaagatgccggaacagtctccttccatcttggtaaccacgcctctagtgcccagcttacagtccgggcgcctgaggtgacaatccttgagcccctacaggatgtgcaactgtcggaggggcaagatgccagcttccaatgccggttatcacgggctagcggccaagaggccagatgggccctcggtggcgttcccttacaggctaatgaaatgaatgatatcaccgtagagcaaggaaccctgcacctgctgacccttcacaaggtcaccttggaagacgcaggtacggtgagctttcacgtaggcacatgttcctccgaggcacagctgaaagttacggccaaaaacaccgtcgttaggggtctggaaaatgtagaggcactcgaggggggggaggccctcttcgaatgtcagctatctcagccagaagttgctgctcacacgtggctcctcgacgacgagcctgtgcacacctcagagaacgcagaggttgtgttctttgaaaacgggctccggcacttgttgctgctgaagaacctccggccacaggactcttgccgcgtcacattcctcgccggcgacatggtaacaagtgcgttcctgaccgtaagagggtggcggctcgagattttggagccgcttaaaaacgctgcagtgcgggcaggagcccaggcctgtttcacctgtacactctccgaggccgtgccagtgggggaggcaagctggtacatcaatggagcagccgtgcagcccgatgactctgattggaccgtcacagcagacggcagtcaccatgccctgttgctgcggtctgctcagccgcatcatgcaggcgaggttaccttcgcttgtagggacgctgtggcatctgccagactgaccgttttaggccttcctgacccacctgaggacgctgaggtggtcgcacgcagtagccacacggttaccctcagttgggctgctcccatgtcagacggtggggggggactgtgcggttatcgcgtagaagttaaggagggcgccacagggcaatggcggctatgccacgaactagtaccgggcccagagtgtgtggtagatggcttggccccaggagagacatacagattccgcgtggctgccgtcgggccagtcggcgccggggagccagtgcacctcccccagacagtaagactcgcggagccccctaagcctgtgcctccgcagccatcagcacccgagagcaggcaggttgctgctggtgaggatgtgtccctggagctagaggttgtagccgaggctggggaagttatatggcataaaggtatggaacggattcagcccggtggacggttcgaagtcgtttcgcagggccgccaacaaatgttggtcatcaagggatttactgctgaggatcagggcgaataccattgcggactggctcagggatctatttgccctgctgctgcaacgttccaggtagcgctttcacctgcctctgtggatgaggcgcctcaacccagcttaccccctgaggcggcccaggaaggagacctgcaccttctatgggaggcccttgcacgtaagagaagaatgtcacgagaacccacactagactctatatctgagttgccagaggaggatgggcgttcacaacgcctgccgcaggaggcagaagaggtggctccagatctgagcgaggggtattccacagcggacgagctggcccggaccggggatgccgatctcagtcatacaagcagcgacgacgagagcagagcagggactcctagcttggtaacttacctaaagaaggcaggccggcccggaaccagtcctctggccagcaaggtgggagctcctgcagctccttctgtgaaaccacagcagcaacaggagccgctggctgcagttcgacccccactcggcgatttgtcaaccaaggatctcggtgacccttcaatggacaaagccgccgtgaaaattcaggcggcctttaagggctacaaggttagaaaagagatgaaacaacaggaaggaccaatgttttctcacacctttggcgacacagaggcccaggttggtgatgctctgcgcttggagtgtgtggtggcttctaaagctgacgtaagggcccgttggctgaaagatggcgttgaattgactgatggccgacatcatcatattgatcaacttggcgatggaacttgctcacttcttattactgggctcgatcgggctgacgctggctgctatacttgccaggtgagcaataaatttggacaggtcacccactcggcttgtgtagtggtgtctggttccgaatccgaggcagaatcatccagtggcggagagctagatgacgccttccggcgagccgcacgccgactgcaccgcctcttccgcaccaagtctcccgccgaagtatcagacgaagagctcttcctgtccgcggacgaggggcctgcagagcccgaagaaccggctgactggcagacctatagggaggatgagcactttatttgcatccgctttgaagctctgacagaagctcggcaggccgttactcggtttcaggagatgttcgcaacgctcggcattggcgtcgagattaagctagtggagcaagggcctcgccgggtcgagatgtgtatctctaaagagacaccggcgcccgtggttccacccgaacctttaccatcgttactgacttcggatgcagctcccgtgttcttgaccgaattacagaatcaggaggtgcaggacggctaccccgtctccttcgattgtgttgtgactggccaacccatgccctccgtaagatggtttaaagacgggaaactgttagaggaagacgatcactatatgataaacgaggatcagcagggtgggcaccaactgatcattacagccgtggtgccagctgacatgggcgtctacaggtgtttagccgagaatagtatgggcgtgagctcaactaaagctgaactgagagtggacctcacatctacagactatgatactgctgctgacgccacagagtccagcagttacttttcagcccagggctatctcagttccagggaacaggaaggaaccgaaagtacgacagatgaggggcaactgccacaggtggtggaagaactgcgtgatctacaggtcgctcctggtactaggctggcaaagtttcaacttaaggtgaaaggctacccagcaccccgcctgtactggttcaaagatgggcagcccttaacggccagcgcccacattcgcatgaccgataagaaaattcttcacactttagagataatcagcgtaacaagggaggactctggacagtacgctgcctatatctctaacgctatgggagccgcgtattcaagtgcccggttattggtgaggggtcctgacgagcccgaagagaaacccgcctccgatgtgcacgaacagctggttccccctcggatgttggagcgctttacaccaaagaaagtgaaaaagggttcgagtatcaccttcagcgtgaaggtggaggggagacctgtcccgacagttcattggctccgggaggaagccgagcgcggtgtgctgtggattggaccagatacccccgggtacaccgtggcaagctcagcgcagcaacatagcctcgttctgctggacgtgggacgccaacatcaggggacgtatacgtgcatcgcgtctaatgcggccggccaagctctttgtagtgcttccctgcatgtgtcaggtctgccaaaagtcgaggagcaagagaaggtgaaggaggctctgatcagcacattcctgcagggcaccactcaggctatcagtgcccaggggctcgaaaccgcaagtttcgccgatctagggggccagagaaaggaggagcccctagcggccaaagaagctttgggtcatttgtcgcttgccgaggtggggactgaggaatttctccaaaagctgacgtcccagattaccgagatggttagtgccaaaatcacccaagcaaagcttcaagtgcctgggggagacagcgatgaagatagtaaaacacctagtgccagccctaggcacggtcgcagcaggccatcctccagcatccaggaatccagttcggaaagcgaagatggcgacgcccgaggcgagatctttgacatctatgtggtgaccgcggattacctccccctgggtgcagagcaggacgcgattaccttgcgtgaaggccagtacgtcgaagtgttggatgccgcccaccctctgcggtggctggtgagaaccaagccgaccaagtcgtctccatctagacaaggatgggtatctcccgcttaccttgaccgacggctcaaactgagcccggagtggggtgctgccgaagctcctgagttccctggagaggcagtgagtgaagatgagtataaggccaggctttcctctgtgattcaggaactactgagctcagagcaggctttcgtggaggaactccagttcctgcagagccatcacttgcagcatctggagcggtgtccccacgtgcctattgcagtggcgggacaaaaggccgtgatatttcgaaatgtgcgtgacattggaaggtttcatagctcttttctgcaggagcttcagcagtgtgacacagacgacgacgtcgcgatgtgtttcattaagaaccaggcagcatttgagcagtacctggagttcctcgtaggccgcgtccaagctgagagcgttgtcgttagtaccgcgattcaggaattctacaagaaatatgccgaggaagcactcctggcaggggatccctcccagcccccccccccgcctctgcagcactacctggaacaaccagtggaacgagtgcagagataccaggctctgctgaaggagctaattaggaataaggctagaaataggcaaaactgcgcgctgctagagcaggcctacgcagtggtgagtgcgttgccacagcgcgctgaaaataaactacatgtgagtctgatggagaactacccgggcaccttacaggcgctgggggaaccgatccgacaaggtcactttatcgtgtgggagggcgcgcccggcgctcggatgccctggaagggtcacaatcgccatgtctttctgttcagaaatcacctggttatatgcaaaccccgtagggattctcgtaccgataccgtgtcctacgtttttagaaatatgatgaaactgtcctctatcgaccttaacgatcaggtcgagggcgacgatagggctttcgaagtgtggcaagagagagaagactcggtgaggaagtatctgctgcaagcccgtaccgccattataaagtcctcttgggtgaaggagatttgcgggatccagcaaagacttgcactgccagtttggagaccaccggactttgaggaagaactggcggattgtaccgcagagctgggagagacggtgaaactggcttgccgtgtgactggaactcccaagccagttattagttggtataaagatgggaaggctgtgcaggtggatccacaccatatccttattgaggatccagacggtagctgtgctctgattttagactcacttacaggagtggatagcgggcagtacatgtgtttcgccgcttccgccgcaggaaattgttccaccttaggcaaaatcctggttcaggttccgccccgttttgtgaacaaggtgagagcttctccatttgtggaaggagaagacgctcaattcacctgtactatcgagggtgccccttaccctcagataaggtggtacaaggacggggcgctgttgaccacgggaaacaaattccagacactctccgagccacgctccggcctccttgtcttggttatcagagcggcttccaaggaagatcttggcttgtatgagtgcgaactggttaacagattgggctcagcgcgtgcgtctgcggaattgcggattcagtcaccgatgttacaggctcaggaacaatgccatcgagagcaacttgttgcggccgtggaggtgactgaacaggagacgaaggttcccaagaaaactgtgattatagaggagaccatcaccaccgtcgtgaaatcaccccggggacaaaggcggagccctagtaaaagcccttcgcgtagcccaagccggtgtagcgcaagcccacttagaccgggcctcctcgcccctgacctactgtacttgcctggggcgggacagccacggcgcccagaggctgagcctggacagaaacccgtagtgccaacactgtacgtgacggaggcagaagcacattcgcctgcgctgcctggcctgtccggaccccaaccaaaatgggtggaggttgaggaaacaatcgaagtgagggttaagaaaatgggacctcaaggcgtgagtccgactaccgaagtgcctcggtcctcaagcgggcacctctttactctccccggagccacgcctggaggtgatcccaatagcaacaacagtaataacaaactgcttgcccaggaagcttgggctcaaggaaccgcgatggtgggtgtgcgcgaaccgcttgtcttccgcgtggacgcccgcggctccgtcgattgggcagcatcagggatgggctccttggaagaggagggcactatggaggaggctggggaggaggagggagaagacggtgatgcattcgtgacggaagagtctcaggacacccactccctgggcgatagggacccaaaaattttgacacacaatgggcgcatgttgacactcgcagatctggaggactacgtaccgggggaaggggaaaccttccactgtggaggcccaggcccgggcgctcccgacgatcctccctgtgaagtctcagtgattcaacgtgagatcggggagcccactgtgggtcagcctgtcctcctttccgtgggtcacgctctgggtccacgcggaccgttgggactatttcgccccgagccacggggcgcttctccgccgggaccacaggtcagatcactggagggaacctctttcctcttaagggaagcccccgccaggcctgttggctctgctccttggactcaaagcttctgcacccggatcagaaggagtgccgattcgggacaatcttccttcacaactgaactcagtactcagaccgtgaatttcggaaccgtcggtgaaaccgtgactttgcacatatgtcccgatcgagacggcgacgaagcagctcaaccctag

SEQ ID NO: 229271 - DNA, 11220 bp, Artificial Sequence
  derived and/or modified sequence
atgctggtgatccggggcgccagcctgaaggacgccggcgagtacacgtgtgaagtggaagcttccaagagcacagcgtctcttcacgtggaggaaaaagcgaactgtttcaccgaggagcttaccaatctgcaggtcgaagagaaggggactgccgttttcacctgtaagacagagcaccctgcagcaacagtcacctggaggaagggacttctggagctaagggcatccggcaaacaccagccctcacaagaaggattgacactgcggctgactattagcgcgctggagaaagccgacagtgatacatacacctgtgacatcgggcaggcccagagccgcgcgcagctcctagtacaggggcggcgagtgcatatcatagaagatctggaggatgtcgatgtccaggaaggaagctctgcaacattccgttgccggattagtccagccaactacgaacccgtgcactggtttctggataagacacctctgcacgctaatgagctcaatgagattgacgcccagcctgggggatatcacgtgctgacactgcgccagttagctcttaaggactctggcactatttacttcgaggctggagatcagcgcgccagcgctgccctgcgcgttaccgagaaaccatccgtattctcgcgggagctgaccgacgccactataaccgaaggtgaggacctgacgctcgtgtgcgagacatctacctgtgacataccagtgtgctggactaaggatggaaagacactgcggggctcagcgaggtgccaactgtcccatgaggggcatcgggctcagctgctgataacgggcgctacactccaggattcgggccgctataagtgtgaggcaggaggagcctgttccagtagcattgtccgagttcacgctaggccagttaggttccaggaagccctaaaagatttggaggtgctcgaaggcggagcagctaccctgcgttgcgtgctgtcttctgtcgcagctcccgtaaaatggtgctacgggaataacgtgcttaggcccggggataaatactcactgagacaggagggggcgatgctagagttagtggtcaggaaccttcgtccacaggattcagggcgctatagctgctccttcggggaccagacaacaagcgccacgctaactgttaccgctctgccagctcagtttattgggaagctgagaaataaggaggccactgaaggggctacagcaacccttagatgtgagcttagcaaggccgcccccgtagagtggagaaagggtagtgaaactttgcgagatggtgaccggtattgcctccggcaggatggagccatgtgcgaattacagatccgggggcttgccatggttgacgccgctgagtatagttgtgtgtgcggcgaggaaaggacttctgcatctctgaccattcgccccatgccggctcactttatcggcagactgagacaccaggagtctattgaaggcgccacagccacgctcagatgcgagttgtctaaggcagcccctgtggaatggcgcaagggtagggaaagcctgcgagatggtgatcgccatagtcttcgccaggacggcgccgtctgcgaactgcagatttgcggtctggcggtagccgacgcaggtgagtacagttgcgtctgtggcgaggagcgtaccagcgcaaccctcaccgtgaaagccctgcccgctaaattcactgagggtctcaggaatgaggaggccgtagagggggccaccgccatgttgtggtgcgagcttagcaaagtggcccctgtcgagtggcggaaggggcctgaaaatctcagagatggcgaccgctacattttacggcaggaaggcacaagatgtgagcttcagatatgcggtcttgctatggctgatgcaggcgaatacctctgcgtgtgcggacaggagaggacctctgccaccctgaccattcgtgctcttcccgcgagatttatcgaagatgtgaaaaaccaagaggcgagggaaggtgctacggcggttttgcagtgcgagctcaattcagcggcccccgtggagtggaggaagggatccgagaccttacgggacggcgacaggtactctctcaggcaggacggaaccaaatgtgaactgcagattagagggctggctatggctgacactggcgagtattcttgcgtgtgtgggcaggagcgcacatccgcaatgttgactgtgagagcccttccaatcaagttcacagaaggcttaaggaatgaggaggccaccgaaggggcgaccgcagtgctgcggtgtgagttatccaaaatggccccagtggagtggtggaagggccatgagacgctgcgggatggcgacaggcattctctgcggcaggacggcgctagatgtgaactgcagatccgtggactggtagccgaggatgccggtgagtacctttgcatgtgcggtaaagagagaacttcagctatgctcacagtgagggctatgccttctaagtttattgagggtctgcgtaacgaagaagctacagagggcgatactgcaaccctatggtgcgagctgagtaaggccgctccagtggaatggcgcaaaggacatgaaactctgcgggatggcgatcgtcactccctaagacaggacgggtctagatgcgagctgcaaatcaggggtctggcagtcgtggatgctggagaatacagctgcgtgtgtgggcaggaaagaaccagcgccactctgaccgtgcgggcccttcccgcacgttttatagaggacgttaaaaatcaggaggcccgcgagggcgctactgccgtgcttcagtgcgagctttcaaaagctgcccccgttgaatggcggaaagggtctgaaaccctgcgcgggggagaccggtatagcctccggcaggacggtacccgatgcgagctgcagattcacggcctgtccgtggccgatacaggagagtattcttgcgtctgtggacaggagaggacaagtgctacactcaccgtaagagcccctcaacccgtcttccgtgaaccactccagagcctgcaagcagaagagggaagcaccgctacccttcagtgcgagctgtcagagcccacagctactgtagtgtggtctaaagggggcctgcaattgcaggcaaacggccggcgggaacccagattgcaggggtgtaccgccgagttagtcctgcaagatctgcagagagaagataccggcgagtatacatgtacttgtggcagccaagccacaagtgcaacgctcaccgtgaccgctgcccctgttcgttttctgcgcgagctgcagcaccaagaggtcgacgaaggcggaacagctcatttgtgttgtgagttatctcgggcaggggccagtgtagagtggagaaaaggctcactccagctttttccttgtgccaaataccaaatggtgcaggacggcgccgccgccgaacttctcgtgcggggggtggagcaagaagacgctggagattacacttgtgatacaggacacacgcaatccatggctagcctttccgttagagttcctaggccaaagtttaaaactaggcttcagagtctggaacaagagaccggtgatatcgcgcgactgtgctgccagctgtctgacgctgaatccggggcggtggtacaatggcttaaggaaggggttgagctccacgccggccctaagtacgagatgcgatcccagggcgccaccagggaattactgatacatcagctcgaagctaaagatacaggcgaatatgcttgtgtcactggaggacagaagactgctgcctcgctccgtgtgactgagccagaggtaacaattgttcgcgggctcgttgatgccgaggttaccgcagatgaggacgttgagttctcatgcgaagtgtcccgcgcaggcgccaccggcgtccagtggtgccttcaaggactgccattgcaatccaacgaggtgaccgaggtagcagtgagggacgggagaatccacacgctgagactgaaaggcgttacacctgaagacgctggcacagttagtttccacctgggcaaccatgcatcttctgcccagctcactgtgcgcgcgcctgaggtaacgatccttgagccactccaggatgtgcagctcagcgaaggtcaggacgcgtcttttcagtgtcgtttaagcagggccagcggtcaggaggcgcggtgggccttaggaggggtccccctgcaagcaaatgagatgaatgacataactgtggaacagggcactctgcatttactcacactgcataaggtgactcttgaggatgcgggtaccgtgagcttccacgtcggcacatgcagctctgaggcgcaactcaaggtcacagccaagaacacggtggtcaggggattggaaaatgtggaagcactggaggggggggaggcattgttcgagtgccagttgagccagccagaggtcgccgcacacacctggctgctggatgatgaaccggtccatacaagtgagaacgcagaggtcgtcttttttgagaacggactacggcatctgttgctgttgaaaaatttgcggcctcaggacagctgcagagtgactttcctggcaggggatatggtcacgagcgctttcctgactgttaggggttggagacttgaaatcctggagcccctcaagaatgccgcagtgcgggctggagcacaggcatgttttacatgtactctttccgaagcagtgcctgtaggggaagcttcctggtacataaacggtgccgcagttcaaccagacgattcagactggacagtgaccgccgacggttcccaccatgctctcctgctgcgctccgcccagcctcatcacgcaggcgaggtcaccttcgcctgtcgcgacgcagtcgcatcagcacgcctaactgtcctgggactccctgatccccctgaggacgctgaggtggtggctaggtcgagccacacagtaacactgagctgggccgcaccgatgtccgacggcggtgggggcctgtgtggttaccgggtggaggtcaaagaaggcgcaacgggacagtggcgcctgtgtcacgaactcgtgcccggcccggagtgcgttgtcgacgggctggcccccggggagacttatcgctttagggtcgcggccgtaggcccagttggggccggagagccggtgcatttgcctcagaccgttcgtttggctgagccacccaaaccggtaccgccccagccgtctgcacccgaatcacgccaagtcgccgccggggaagacgtgtccctggaattggaggtagtagcggaagcaggcgaagtcatttggcacaaagggatggaacgcatccagcccggagggagatttgaggttgtgagccagggcagacaacaaatgcttgtaataaagggcttcacagctgaagaccagggcgaatatcactgcggccttgcccaaggatctatttgccccgccgcggctacctttcaggtggctcttagcccagcatcagtggacgaagcgccccaacccagtctgcctccggaggccgcacaggagggagacctgcacctgctatgggaggctctggcgcggaaaagacggatgtcacgggaacccactcttgattccatcagtgagctccctgaagaagatgggcgtagccagagactccctcaagaggcagaagaagtggcccccgacctgagcgaggggtactctacagccgacgaattggctcgaaccggggacgccgacctgagtcacacctcctcagacgacgagtcacgtgccggaacaccgtctctggtgacatacctcaaaaaagctggcaggccagggactagtcccctcgcatccaaagtgggggcccccgccgcacccagtgttaaaccccagcagcagcaagagccactcgcagccgtgcgcccacccctcggagacctatccacaaaggacctgggggacccttcgatggataaagccgcagttaaaatccaagcagcattcaaaggctacaaggtgcggaaagagatgaaacagcaggagggtcccatgtttagccacacttttggggatactgaagcacaagtcggcgatgctctgaggctagagtgcgtggttgcttctaaggctgacgtccgggctcgttggctcaaagacggagtggaacttactgatggccgtcaccaccacattgaccagctgggggacggaacttgttccttactgattaccgggctagacagagctgatgccggctgttacacttgtcaggtgtcaaacaagttcggtcaggtaacgcactcagcctgtgtagtcgtctcagggagcgagagcgaagccgagtcctcatccggcggagaactagatgacgcattcagaagagctgctcggcggctacaccgtctgtttcgaactaagtctccagccgaagtctcggacgaggaattgtttttatccgccgatgaaggcccagctgagcctgaagaacctgccgattggcagacttatagagaagacgagcactttatctgtattagattcgaggccctcacggaagccaggcaggcagtcacacggttccaggagatgttcgcgacactgggcatcggcgtcgagattaaattggtcgagcaaggacctcggcgagtggagatgtgtatttcgaaagagacccctgcacccgtggtccctcctgagccgctccccagtctgctgacaagtgacgcggcacctgtttttttaaccgagttacagaatcaggaagtacaagatggctacccagtctcctttgactgcgtggtgacagggcagcctatgccttcagtgcggtggtttaaggatggcaagttgctcgaagaggatgatcattatatgataaatgaggatcaacagggcggacatcaactcataatcaccgccgtcgttcccgctgacatgggagtatacagatgcctggccgaaaacagtatgggcgtatctagtaccaaagcagagttacgcgtggacctgactagtaccgactacgacacagccgccgatgccaccgagtcaagcagttatttcagcgcgcaagggtatctcagcagccgggaacaggaggggacagagagtacaacggatgagggccagctgccccaggtggtagaggagctgagggaccttcaggttgctccagggacaagactagctaaatttcagctgaaggtgaaggggtatccagcccctcgtctgtattggtttaaagacgggcagccactgaccgccagcgcacacattcggatgaccgataagaagatcctgcatacgttagaaatcatttcggtaactcgtgaggatagcgggcaatacgcagcctatatctccaatgccatgggggccgcatacagctcggccagacttttggtgagaggcccggacgagccagaagaaaaacccgccagcgacgtgcacgaacagttggtgccaccaagaatgctagagcggtttacaccaaagaaagtaaagaaaggtagtagtatcaccttcagtgtgaaggtggagggtcgtccggtgcccaccgttcactggctacgcgaggaggcggagaggggcgtgctgtggatcgggcccgacacaccaggatacaccgtggcttcctcggcacagcagcacagcttagttctcctggacgttggacggcagcatcaggggacctatacatgcattgcatcaaacgccgccggtcaagctctgtgcagtgcgtctctgcacgtctcaggactccccaaggtcgaagaacaagaaaaagtgaaagaggctctcattagcactttcctgcaggggactactcaggccatcagtgcacaggggctggaaacagccagcttcgctgatctgggcggccagcggaaggaggagccgctggcagccaaagaggctcttggtcatttgagtctggccgaggttggcactgaagaatttttacagaagctcacttcccagattacagagatggtgtctgccaaaatcacccaggcgaaactgcaagttcctggtggggactccgacgaggacagcaaaaccccaagtgccagcccccgacatggccgcagtcggccatcctcaagcatacaggaaagtagtagtgaatctgaggatggtgacgcccggggagagattttcgacatttacgtagttaccgctgactaccttcctctgggcgccgaacaggacgcaataaccctccgcgagggccaatacgtggaggtgttggacgccgcccacccccttcgatggctggtgcggacaaaacctacgaaaagctccccgtcacggcagggctgggtctccccagcataccttgaccggcggctgaagctgtcaccagagtggggcgccgctgaggcccctgaattcccaggggaagcagtttctgaagatgagtataaggcccgccttagctccgtcatccaggagcttctctctagtgagcaagctttcgttgaggagctgcagttcctccagtcccaccacctacaacatctggaacggtgcccacatgtccccatcgcagtggcgggccaaaaagctgtgatctttcgtaacgtgcgtgacatcgggcgcttccacagctcatttcttcaggaactgcagcagtgcgatacggacgacgatgtcgccatgtgtttcattaagaaccaggcagcgtttgaacagtatttggaatttctggtggggagagtacaagcagagtccgtcgtggtgtctactgctatccaggaattctacaaaaagtatgccgaggaagcgctcctagcaggcgaccccagtcagccaccccctccccctctgcaacattacctggaacaaccagtcgagagagttcagcgttaccaagcgctcttgaaggagctcatacggaataaggctagaaaccggcagaattgcgcgttacttgagcaagcttacgccgtggtgagcgccctgccccaaagagccgagaacaagctccacgtgtccctgatggaaaattaccccggcacgcttcaagcacttggggagcccatcaggcaaggccatttcatcgtgtgggagggagccccaggcgcgcgcatgccttggaagggacataaccggcatgtgttccttttccggaatcacctggtcatatgcaaacctcgaagggattctagaactgatacagtctcctacgtcttcaggaacatgatgaaactgagctccatcgacctgaacgatcaagtggaaggcgatgatcgggccttcgaagtgtggcaggaacgcgaggatagcgtgcggaagtacctcctccaggcgcgaaccgctattattaaatccagctgggttaaggagatatgcggcattcaacagcggctggctcttcccgtttggagaccacccgatttcgaggaagagctcgcggactgtacagccgaactgggggagaccgtgaaacttgcatgtagagttacaggaacacccaaaccagttattagctggtacaaggatggcaaggccgtgcaggtggatccccatcatatcctcatcgaggaccctgacggatcctgtgcactcatactggattcactcaccggcgtagactccggtcaatatatgtgcttcgccgcatcagccgctggaaattgtagcaccctcgggaagatcctggttcaggtcccaccacgcttcgttaacaaagtgagagcctccccttttgtggagggggaggacgcacagttcacctgcactatcgagggagccccctaccctcagattcgatggtacaaagatggtgctctgctcaccactggaaacaaattccaaactctgtcagagcccaggagcgggctgcttgttctggtcataagagccgcatccaaagaggacctgggtctctatgagtgcgaactcgtgaaccggctgggttctgcccgagcatcagctgagctgcgcatccagagcccaatgctccaggcacaagaacaatgccatcgagaacaattagtggccgctgtcgaggtgaccgaacaagagaccaaggtacctaagaaaacagtcataattgaagagactatcacaaccgtcgtcaaaagccccagaggacagagaagaagcccgagcaagtcaccctcccggtcaccttctcgatgtagtgcttccccgctccgccctggactgttggcccccgacctgctctatctcccaggtgcaggccagccgaggcggccagaggccgagccgggacagaagcccgtagtacctacactgtacgttaccgaggccgaagcacatagccctgctctcccaggactttctgggccgcaaccgaaatgggtcgaggttgaagagaccatagaagtgcgagtgaagaagatgggtccacagggcgtgtcacccacaaccgaggtacctaggtccagttctgggcatctgttcaccctgccaggggccactccggggggcgatcctaactccaacaatagcaataacaagcttctggcacaggaggcttgggcacaggggacagccatggtaggtgtgcgggagccactcgtgtttagagttgatgcccgcggatctgtggactgggccgcctctggcatgggaagtctggaggaggaaggcacaatggaggaggccggagaagaggagggagaagatggtgacgcgtttgtaacggaggagagtcaggatacccattctctgggagacagagaccctaaaatccttacacacaacgggagaatgcttacactggcagacctggaagattatgtgccaggagaaggggagactttccattgcggggggcctggcccaggagcgcccgatgatcctccttgcgaggtgtctgtgattcagcgggagataggcgagccaaccgtagggcagcccgttctgctgtctgtgggtcatgccctgggtcccaggggacccctgggcctgtttcggccggagcctcgcggtgcttcaccccctgggccacaggttcgcagcctcgagggtactagcttcctactccgcgaggcgccagcccgccctgttggtagcgccccctggacacagtctttctgcactcggatcagacgttccgcagattcagggcagtctagctttaccaccgagctgtctacccagacggtgaattttggaaccgtcggtgagaccgttacgctccacatatgccctgatcgagacggagacgaagctgcgcagccctag

SEQ ID NO: 229272 - DNA, 19863 bp, Artificial Sequence
  derived and/or modified sequence
atggatcagccccagtttagcggtgctcctaggttcttgactaggccaaaggcctttgtcgtttcggtcggaaaagatgcgactttgtcctgtcaaatagtaggcaatcccacacctcaggtttcgtgggagaaggatcagcagcctgtcgcagccggagccaggtttcgtttagcacaggacggagacctctacaggctgactattctggacctggctctaggcgactctgggcagtatgtctgcagagcgcgtaacgctattggtgaggcttttgccgctgttggacttcaggttgatgctgaagccgcttgcgccgaacaggctcctcatttcctgctacgaccaactagcattagagtcagagaaggttcggaagccaccttcaggtgtagagtggggggatccccccgacctgcagtctcttggtcaaaggatgggagaagactgggcgagccagacggccctcgggtgagggtggaggagctgggcgaagcaagcgctctgcgaatccgggcagccaggcctcgcgatggaggcacctacgaggtacgtgctgagaaccccttgggtgccgcttctgctgccgctgccctggtggtcgactccgacgcagcagatactgcctccagacctgggacgtccaccgctgcactgctggcccacttacagcggcgtagagaggcgatgagagcagagggcgctcctgcctcccctccttcgaccggtactaggacatgtactgtgacagagggaaagcatgccagattgtcctgctatgtaactggggaacccaaacctgagaccgtgtggaaaaaggacggccaactggtcacagaagggagacgccatgtggtgtatgaggacgctcaggaaaactttgtgctgaagattctcttctgcaagcagtctgacaggggcctgtacacatgcactgcatcaaatctcgtggggcaaacttacagtagcgtgctggtcgtcgtcagggaaccggctgtgcctttcaagaagcggctgcaggatctcgaggtgcgggagaaggaatcagccacttttctgtgcgaagttccccaacccagcactgaagcagcttggttcaaagaagaaacacggctctgggcatccgctaaatacgggatcgaggaagaggggacagagagacgccttacagtaaggaacgtgtctgctgacgacgatgccgtgtacatttgcgagacaccagagggaagtcgaaccgtggctgagctggcagtccaggggaatttactccgcaagctaccgcgtaaaaccgcggtgcgcgtgggcgacaccgcgatgttctgcgtcgaacttgcagtccctgttggccctgtccattggctgcggaaccaggaagaggtggtcgcgggagggcgtgtcgcaattagcgcagaaggaaccaggcacaccctcacaatcagtcaatgctgcctggaggacgttggccaggtggcttttatggcgggtgactgccagacatcaacacaattttgcgtttcagcacccagaaagccaccgttgcagccacccgtggaccccgtggtgaaggccagaatggagtctagcgtgattctgagctggtcgcccccaccacatggcgaacgtcccgtgacaattgacggatatctggtggagaagaaaaaactcggaacctacacatggatccgttgccacgaggcagaatgggtggctacgcccgagctgactgtggcagacgtggctgaggagggcaacttccagttcagagtcagcgccctcaactcattcggccagtccccctacctcgaatttcctgggaccgtgcaccttgctcctaagctcgctgttcggactcctctaaaagctgtgcaggccgtggaggggggtgaagtgaccttcagcgtggatctgactgtggctagcgcgggagagtggtttctcgacgggcaggccctaaaggccagctccgtgtatgagatccattgcgataggacccgtcacacgttgacaatcagagaggtgcccgcatctctgcatggtgctcagctgaaatttgtggctaatgggatagaatcaagcatacgaatggaagtgcgagctgccccaggattgaccgcaaataaacctccagctgctgctgcccgagaggtcctggctaggttgcacgaagaagcccagctgctggccgagctgtcagatcaggccgcagccgtgacctggttaaaagacggtcggacactctccccagggccaaaatacgaagtgcaagccagcgccggtaggagggtgctgctagtgcgcgacgtggcccgagacgatgccggtttgtatgaatgcgtgtccagaggcggacgaattgcataccagctgagcgttcaagggctggctagatttttgcacaaagatatggccggttcctgcgtcgacgcagtggcaggagggccagcacaattcgaatgcgagacatccgaagcacatgtgcatgttcactggtacaaagacggcatggagctcggccatagcggggagcgattcctgcaggaggatgtgggcaccaggcacagactcgttgccgcaactgtcactcgtcaggatgaaggtacgtattcttgtcgggtgggtgaagactcggttgattttagactgcgcgttagtgaaccaaaggttgtatttgccaaggaacagcttgccaggaggaagctgcaagctgaagctggcgcttcagcgaccctgagctgcgaagtcgcgcaggcccaaaccgaggtgacttggtataaagatggaaagaagttgtcttcttcttcaaaggtgtgtatggaggccacgggctgtaccaggcgtctagtggtacagcaagccggacaagccgacgcgggagaatattcctgtgaagcagggggtcagcggttaagctttcatctcgacgtgaaagagcctaaagtggtttttgctaaggatcaggtcgcccatagtgaggtgcaggcagaagctggcgcttcagcaactctgtcttgtgaagttgcacaggctcagacagaggtaatgtggtataaggatggcaagaaattgtcatcctctttgaaggtacatgtggaggccaagggttgtcgacggcgtcttgtggtgcaacaggcaggcaaaactgatgctggtgactatagctgcgaggccagaggccaacgcgtctccttcaggctgcacattaccgagcccaaaatgatgttcgctaaggaacagtccgtgcataatgaggtgcaggccgaggctggggcatctgccatgctcagttgcgaggttgcccaggctcagaccgaggtaacttggtataaggacgggaaaaagctctctagctcctctaaggttggaatggaagtgaaaggatgtactcggcgtctggttctgccacaagctggcaaggctgatgctggggaatattcatgtgaagccggtggtcagcgtgtcagctttcatcttcatattacggagcctaaaggagtgtttgcgaaagagcagtcagtacataatgaggttcaggccgaagccggaacaaccgccatgctgtcatgtgaggtggcccagccccagaccgaggtgacctggtacaaggatggaaagaaattatccagctcctcaaaggttcgcatggaagtgaaagggtgcacccgaaggctggtagtccagcaggttggcaaagcggatgcgggagagtactcctgtgaggcgggaggacaaagagtgagcttccagttgcatatcactgaacctaaggctgtatttgcaaaggaacaactggtacataacgaggtccgcaccgaagctggcgcttctgccaccctatcctgcgaagttgctcaggcacagacggaggttacctggtacaaggatgggaagaaactatcctcgagcagtaaagtgagaattgaggcagccggttgcatgaggcagttggttgtccagcaggccggacaggcagacgctggcgaatacacatgtgaggccggaggtcagcggctctcttttcacctggatgtctccgagccgaaagccgtatttgcgaaagagcagttggcacatagaaaggttcaggccgaggcaggggcaattgccacactttcctgcgaggtggcacaggcacagactgaagtgacctggtataaggatgggaagaagttatcgagttcgagcaaggttaggatggaagccgtggggtgtacccgacgcctggtggtccaacaggcctgccaggcggatacgggtgaatactcttgcgaagctggcggacaacggttaagttttagcctggacgtcgccgagcctaaggtcgtgttcgcaaaggagcagcccgtacatcgtgaagtgcaggctcaggctggggcttctactaccctttcttgtgaggtggctcaggcccagactgaagtcatgtggtacaaggacggaaaaaagttatctttttcgagtaaggtccgtatggaagctgtagggtgtaccagaaggctcgtcgtgcaacaagcgggtcaggctgtcgctggcgaatattcttgcgaggcgggaagccagagactctcctttcatctgcacgtggcggaaccaaaagcggttttcgcgaaggagcagcccgcttctagagaggtgcaggcggaggctgggacatctgccactttgagttgtgaggtggcccaggcgcagacagaagtaacctggtacaaagacggaaagaagctctctagctcaagtaaagttcgaatggaagccgtgggttgcaccagacggctcgtagtgcaggaggctgggcaagcggacgctggcgagtattcatgtaaagccggagaccagcgactttcattccacctgcatgtggctgagccgaaggtggtctttgcaaaagaacagcctgctcaccgggaggtgcaggctgaagccggagcctccgccaccctgtcctgcgaagtcgcccaggcccaaactgaggttacttggtataaagacggcaaaaaattatctagctcatcaaaggtgagagtggaggcagtcggatgcacccgcaggctggtcgtccagcaagcaggccaggccgaggctggcgagtacagttgcgaggccggtggacagcagctgagcttcagattgcaagtcgccgagcttgaaccacaaatttcagagaggccctgtcgccgtgaacccctggttgtcaaggagcacgaggacatcatcttgactgccacactcgccacaccctcggctgctactgtgacgtggctcaaagacggagtcgagattagaagatccaagcgacacgagaccgccagccagggggatacgcatactctgacagtccatggcgctcaggtgctagactccgccatttattcctgccgcgtgggagctgaggggcaagattttccagtgcaggttgaagaggtggcagccaagttctgccgcctcctggaaccagtgtgtggagaactcggagggacagttacgctcgcttgtgagctgtcccccgcttgtgcagaagtggtctggaggtgtggcaatactcagctgcgtgtaggaaaaagatttcaaatggtcgcagagggacctgtgcggtcactgacagtccttggcttgagagctgaggacgcaggcgaatacgtctgcgaatccagggacgatcacacgtcagcacagttaacagtcagcgttccaagagtggtcaagttcatgtcaggtctctccaccgtcgtcgctgaagagggcggagaggcaacgttccaatgcgtcgtgagtccttcagacgtggctgttgtttggttccgggacggagcactactacagccatctgagaagtttgctatctcacaaagtggcgctagtcattcactgactattagcgacttggtcctggaggacgccggtcaaattacagtcgaagcagagggcgctagttcatccgcagccctgagggtgagagaagccccagtgctgttcaagaaaaaactcgagccccagaccgtagaggaaagaagctccgtaactctggaagtcgagctcaccaggccatggcccgagctaaggtggacgcggaacgcaaccgcgctggctcccggtaagaatgtggagatccacgccgagggcgctcgacaccgactcgtgctacataacgtggggtttgccgacagaggtttcttcggctgtgaaacacccgacgataagacgcaggccaaactcaccgtagagatgcggcaggtacgcctcgtccgtggccttcaggcagtagaagcaagagagcagggaactgccacaatggaagtacagctatcacacgcagatgtggacggtagttggactagagacggattacgatttcaacagggaccaacctgtcacttggccgtccggggtcctatgcatacattgactctctccggactcagacccgaggactccgggctgatggtgttcaaggccgaaggagtgcatacgagtgcacgactagtggtgaccgaacttccagtgtcgttctcacgacctctccaggacgttgtgactacagaaaaagagaaggtgaccctcgaatgcgagctcagcagacctaacgtggacgtgagatggttaaaggatggagttgagctgagagcaggcaaaaccatggctatcgccgcacaaggtgcttgcaggtctctgacaatctacaggtgtgagttcgccgaccagggcgtgtacgtgtgcgatgcgcacgacgcacagagttcagcatctgtgaaggtacaaggcaggacgtacaccctgatttatagacgcgtccttgccgaagacgcgggtgagatccaattcgtggcggagaatgctgagagtcgtgcacaactcagggtgaaagaactgccagtgacactggttagacctttgagggacaaaattgccatggagaagcaccgtggagtcttggaatgccaggtatcaagagcctctgcccaagtcaggtggtttaagggcagccaagaactacaaccagggccaaagtacgaacttgtctctgatggtctgtatcggaagctgatcatttcagacgtgcatgccgaggatgaagacacctatacgtgtgatgctggggacgttaaaaccagcgcgcagttcttcgtagaagaacaatccatcactatcgtacggggtctgcaagacgtgaccgtcatggagcctgcccctgcatggtttgaatgcgaaacgagcatcccttccgtccgcccacccaagtggttactaggaaaaacagtcctgcaagccggagggaatgtagggctagagcaggaagggaccgtacatcggctgatgttacgccgaacgtgctccaccatgacgggccctgttcattttacagttggcaagtcgaggtcctctgcacgccttgtggtctcagatattcctgtggttctgaccagaccattggaacctaaaaccgggagagagctacagagcgtcgtcttgagctgcgacttcaggcccgctcccaaggccgtgcagtggtacaaagatgacacacccttgagcccatccgagaagttcaagatgtccttagaaggccagatggcggagctccggatcttgcggcttatgcccgcagacgcaggggtctaccgctgtcaggcaggtagcgcccatagctccacagaggtgactgttgaggcgcgagaagtgactgtaaccggacctttgcaggatgcagaggccaccgaggagggctgggccagcttctcttgcgaactgtctcatgaggacgaggaggtagaatggtctctcaacggcatgccattgtataacgattctttccacgagataagccacaagggacgacgccataccctggtgctgaagtcgatccagcgcgctgatgctggaattgtccgtgccagcagtttaaaagtatctacctctgcaaggctagaggttagggtgaagcccgtggtatttctgaaggcccttgatgacctcagcgccgaagaaaggggcaccctggcactgcagtgcgaggtcagcgaccctgaggcacacgtggtttggcggaaggacggggtgcagctcgggccttcagataaatatgatttcttgcacactgcgggtaccagaggcttggtcgttcacgacgttagtcccgaagacgccggtttgtatacttgtcacgttggaagcgaagagacgcgtgccagggtacgtgtccatgatttgcacgttggcatcacaaagagactaaaaacgatggaagtcttagaaggggagtcttgctccttcgagtgtgtgctgtcacacgagtcagcctccgacccagcgatgtggaccgtcggcggaaaaacagtgggctcctcatccagatttcaggccacccggcagggcaggaagtacatcttggtcgtgagagaggcagcccctagcgacgccggagaggttgttttctccgtcagaggtcttacgtcaaaagccagcttaatcgtgagagaaaggcctgcagctatcattaagcccctggaagaccagtgggtggcccctggggaggatgtggagctgcggtgcgagctgtccagggctgggactccagtgcattggttgaaagacaggaaagcaatacgaaaatcacagaaatacgatgtcgtctgtgaaggcacaatggcaatgcttgtgattcgcggagctagtctgaaagacgctggcgagtatacctgtgaggtagaggcaagtaagtccacagctagtcttcacgtggaagaaaaggcaaactgttttacagaagagttaactaacctgcaggtagaagaaaaggggaccgctgtctttacctgcaaaactgaacaccccgcagctacggtcacatggcggaaggggttactggaattgagagcgtccggtaagcaccaacccagccaggaaggactaacccttcggttgacaatatccgctttagagaaagccgactccgacacctacacttgcgacattgggcaggctcagagtcgcgcacagctgctggtgcagggccgtagagtgcacatcattgaagatttggaagacgtggatgtccaggagggcagctcggctactttccgctgcagaatttcacccgctaattatgaacccgtccactggttccttgacaagacaccactgcatgccaatgaattaaatgagatagatgctcagccaggtggatatcatgtactgactctaaggcaactggccctgaaggactccggtacaatctattttgaagcaggcgaccagcgcgcttctgccgctctacgcgtgacagaaaagccttctgtcttcagtcgagaactgactgacgccaccatcactgagggcgaggacttgaccctggtttgcgagacatcaacttgtgacattccagtgtgttggacaaaggacgggaagacactccggggatctgcccgatgccaactgtctcacgaagggcaccgcgctcagctgcttattactggagccacattgcaggactccggtcggtataaatgtgaagccggaggggcatgttcctctagtatcgtgagagttcacgccaggccggtacgcttccaggaggcgctgaaggatctagaggttttggaggggggtgccgctaccctgcggtgtgtcctgagctcggtcgccgcaccggtaaagtggtgctacgggaacaacgtgctgcggcctggtgacaagtattctttgagacaagaaggggcaatgctcgaactggtggtacggaatctccgtcctcaagacagtgggaggtatagctgctccttcggagatcagaccacctcagccaccttgactgtgaccgcgctcccggctcagtttatcggaaaacttcggaacaaggaagcgaccgagggtgccactgctacactccggtgtgagctgtctaaagccgcaccagtggagtggaggaaagggagcgagactttgcgcgacggagatcgatactgtctgcggcaggacggcgcaatgtgcgagctgcagatccgcggactggccatggttgacgccgcagaatattcttgtgtgtgtggagaagaacgaacttctgctagtctcactatccgtccgatgcccgctcactttattggacgtctgcggcatcaggaaagcatcgagggagccaccgccacactcagatgcgagctctccaaggcagcccctgtggaatggaggaagggtcgtgaatctttgagggacggggatcgccacagtctgcgccaagacggggcagtttgtgaattacagatctgtggcctggctgtggctgacgccggtgagtactcctgcgtttgcggagaagaaagaacatccgcgactttgacagtgaaggctctgcccgctaagttcaccgagggcctgaggaacgaggaggccgtggaaggtgccactgcaatgctgtggtgtgaactgtcgaaagttgctccggttgaatggcgcaaagggccagagaatctaagagacggagataggtacatcttaagacaagagggcaccaggtgtgagttacaaatttgcggtttggcaatggctgacgctggcgaatatctctgtgtgtgtggccaggaacggacctctgccaccctcaccatccgcgctttgcccgctcggttcatcgaggacgtaaagaatcaagaagctcgtgaaggtgcaactgctgtacttcagtgcgagctgaattctgcggctccagtcgagtggaggaagggctctgaaaccctgcgcgacggcgacagatacagtctgcgccaggatggtacgaagtgcgagttgcaaatccgcggactcgctatggctgacacaggcgagtatagctgtgtctgcggacaagaaaggacctctgcaatgctgaccgtgcgcgcactaccgattaagtttaccgaggggctgaggaatgaggaggctacagaaggcgctaccgccgtgctgaggtgtgaactgagcaagatggcccctgtggagtggtggaagggtcacgagacactgcgtgacggcgatagacacagcctcagacaagatggtgcaaggtgtgagttacaaatacgaggcttggtggctgaggacgccggagagtacctctgtatgtgcggaaaagaaaggacctctgcaatgttgacagtgcgggcaatgccaagcaagtttatcgaaggcttacgcaatgaagaggccaccgaaggggacaccgcgactctgtggtgcgagctgagcaaagccgctcccgttgaatggcggaaggggcacgagacactgagggacggtgatcgacacagcttacgtcaggatggaagcagatgcgaattacaaatcaggggactggcagtggtggatgcaggagagtatagctgtgtgtgtggccaagagaggacaagcgccaccttgaccgtgcgggcactccctgccaggttcatcgaggacgtaaaaaatcaggaagctcgagagggcgcaactgccgttctccagtgcgagttgagtaaggctgccccagtggagtggagaaaaggctcagaaactctaagggggggagaccgctactctctgagacaggatgggaccagatgcgagctccaaatccacggcctgtccgtagcagacaccggagaatacagctgcgtctgtggtcaagagcgcacgtctgccacccttacggtgcgggctccacagccagtgttccgcgagccgctccaaagcctgcaagctgaggagggaagtactgcaacccttcaatgcgaactttcggagccaacagccacagtggtttggagtaaggggggtttacagctccaggcaaatggaagacgcgagccccgattgcaggggtgcaccgctgaactagtactccaagacttgcaacgcgaggacaccggcgagtatacgtgtacttgtggctcacaggccaccagcgccactctcacagtgacggctgcccctgtgcgtttccttcgggagctccaacaccaagaagtcgatgagggtggtacggcccacctgtgttgcgaactgtccagagccggtgcctcggttgagtggcggaagggcagcctgcagctgttcccgtgcgctaaatatcagatggtacaagatggcgcagcagccgaactattggtgcgcggtgtggagcaggaagatgcaggtgattacacatgcgacaccggacacacacagtctatggcctctttgtcagtgcgggttccgcgtcctaagttcaaaactcgcctgcaatccctggagcaggagacgggggatattgccaggctgtgttgccaactatccgacgccgagtctggcgcagtagtccaatggctaaaagagggggttgagctgcacgccggtcccaagtatgagatgcgctcacaaggtgctacgcgtgagctcctgatccatcaactggaagccaaggatactggggagtatgcttgtgtcaccggagggcagaagaccgccgcatccctgcgtgtgaccgaacctgaagtgaccatcgtgcgtggcctcgtagatgcggaagtgacagctgacgaggatgtggaattcagctgtgaggtgtccagggctggagctaccggcgtccagtggtgtctgcagggactgccccttcagtcgaatgaagtcacagaggtcgccgtccgcgacggtcggattcatactctgcgcctcaaaggcgtgactcctgaggacgctggaaccgtatcttttcatttgggaaatcatgccagcagcgcacagttgacagtgcgcgctcctgaagtgacaatcctggaacctctgcaggacgtgcaactatccgaaggccaggacgcttccttccagtgtagattgtctagagcatcggggcaggaggcaaggtgggctctgggtggcgttcctctgcaggccaatgaaatgaacgacatcaccgttgaacagggaactcttcatcttctgacccttcacaaggtcacacttgaggacgccggaaccgtctcgtttcacgtgggcacttgttcgagtgaggcccagcttaaggtcaccgctaaaaacacggttgtgcggggactcgaaaacgtggaggcactggaaggaggggaggcattgttcgaatgccagctatctcagccggaggtggccgcacacacgtggctgctcgacgatgagcctgtgcacacgtccgagaatgccgaagttgtcttctttgaaaacgggttgagacatctgctgcttcttaaaaatctgaggccccaggattcttgtcgggtcacattcttggcaggagacatggttacctccgcgtttctgactgtgaggggctggagactggagatattggagcccctgaagaatgccgcagttcgggctggcgctcaggcctgtttcacatgtacactttctgaggccgtaccagtgggcgaggccagttggtatatcaatggagctgccgtgcagcccgacgattccgactggacagtaaccgccgatgggtcacaccacgccctcctgctcaggagcgcccagccccaccacgccggagaggtgacatttgcatgccgtgatgctgtcgcctctgctagattgactgtattgggactgcccgatcctcctgaagacgctgaagtagtagccaggagctcacatactgttacacttagttgggccgctccaatgtcagatggaggcggaggtttgtgcggctaccgggttgaggttaaagaaggcgctactggacagtggagactctgccacgaactcgtcccaggcccagagtgtgtcgttgacggactggccccaggcgagacctataggttccgggtagcagctgtcggacccgttggggcaggcgagccagttcacctgcctcaaactgtgcgactggcagaacctcccaaaccagtgcctccacagccttcggcccctgagagccggcaggtggcggctggcgaggatgtctcactcgaactggaggtggtggctgaggctggcgaggttatctggcataaagggatggaaagaattcaacccggagggagattcgaagtggtgtcccaggggaggcagcagatgctggtaattaaagggttcactgcggaagaccagggggaatatcactgtgggcttgcccagggatcaatctgccctgcggctgccaccttccaggtcgccctttcacccgcaagtgtggacgaggcacctcagccctcccttccacccgaagccgctcaggagggcgacttgcacttactctgggaggcactggctcggaaacgaaggatgtcccgcgagccgaccctggacagcattagcgaacttcccgaggaggatggccgttcacagcggctacctcaggaggccgaagaggtcgctccggacttgagcgaaggatattccacagccgatgaactggctagaaccggcgatgcagacctatctcatacatcttcggatgatgaaagccgcgctggcacccccagtctggtgacatacttaaaaaaagccggaagaccgggaacaagccctttggcctccaaagttggcgctcctgcggctccttccgtcaagccacagcaacagcaggaacctctcgccgctgtgcgaccaccgttgggcgatctatcaaccaaggatctcggggacccctctatggataaggccgctgtgaagatacaggcagcctttaagggatacaaagttcggaaagagatgaagcaacaggagggcccaatgttcagccacacatttggcgatactgaggcacaggttggcgacgcccttcgcctggaatgcgtcgtggcaagcaaagcagacgtgcgggctcgctggctgaaagatggcgtcgagctgacagacggaaggcatcatcatatcgaccagctgggtgacgggacgtgctctctcctgattaccgggctggaccgtgccgatgctggatgctacacctgccaagtgtccaacaaatttggtcaggttacccattctgcatgtgtagtggtgtcggggagtgagagcgaagctgaatccagttctggtggcgagctggatgacgcattccgaagagcggcacgccgtttacaccgacttttccggactaagagtcctgcagaagtctctgacgaagaattgtttttgtcggcagacgaaggacccgcagagccagaggaacctgctgactggcagacgtatagagaagatgaacatttcatctgcatcagatttgaggctctcacagaagctagacaggcagtgacccgttttcaggaaatgtttgccacactgggcatcggggtggaaattaaactagtggaacaagggcctcgccgagttgagatgtgtatctctaaggagacacccgcaccagtggtaccaccggaacccctgccctcactgttgacaagcgatgcagctcccgtttttcttactgagctgcagaatcaggaggttcaagacggctaccctgtctcgtttgactgcgtggttacaggccaacctatgccctcagttcggtggtttaaggatggtaagttgctcgaggaagatgaccactacatgattaatgaggaccaacagggaggtcatcagctgattatcactgcggtggtgcctgctgatatgggtgtgtatcgctgccttgcagagaacagtatgggtgtcagctctaccaaagcggaactgagggttgatctgacgtcaaccgattatgatactgctgcagatgctaccgagagttcctcttatttcagtgcacagggatatctgagttctagagaacaagagggaacagaaagcaccaccgatgaaggccagctcccacaggtggtcgaggaactgcgcgacctgcaggtcgcgccaggtacccgcctggctaaattccagctgaaggttaaaggctacccagcgccacgcctatactggtttaaagacggccagccactgactgctagcgcccatatccgcatgacagataagaagattcttcacacccttgaaataattagcgtgactcgggaagactcaggtcagtatgccgcatatatttcaaacgctatgggagcagcatattcatctgcaagactgctggtcagaggcccagatgaacccgaagagaaacccgctagtgatgtgcatgaacagcttgtgccacccaggatgcttgagagatttaccccaaaaaaagtgaaaaaggggtcgtctatcaccttctctgtcaaagtagagggtcgacctgtgccaacggtgcattggctccgcgaggaggcggagcgaggagtgctgtggatcggtcccgatacacctggatataccgtcgcctcctccgcccagcaacacagcctcgtgctgttggatgtaggacggcagcatcagggaacttacacatgtattgccagcaatgccgctggccaggccctatgtagtgcctccttgcatgtgtctgggctaccaaaagtggaagagcaggagaaagttaaagaggccctgatttcaacctttctgcaagggacgactcaggccatctctgcacagggccttgaaacggcatccttcgccgacttgggtggtcagcgaaaagaggaaccgctggccgcaaaggaagcgctggggcacctgtcactggccgaggtagggactgaagagttcctgcagaaattgacctctcagataactgagatggttagcgccaaaatcacacaggccaagctccaagtgccgggtggggactccgatgaggactcaaaaacaccctcggctagccctcgtcacggcaggagtcgccctagtagctccatccaggagagtagcagcgagtccgaggacggcgacgccagaggagagatctttgacatctacgtggttacagctgattatctgcccctcggagcggagcaagatgccatcacgttacgcgaagggcagtatgtggaggtgctggatgcggcacatccactccggtggttggttagaacgaagccaacaaagtcctctccctcgaggcaagggtgggtgagcccagcttatctggaccgacggctgaagctgagcccagagtggggtgctgctgaggcccctgaatttccaggcgaagccgtgagcgaggatgagtataaggcccgactgtcgtctgttattcaggagcttctgtcctcagagcaggccttcgtcgaagagctgcagttcctccagagccaccatctgcagcatcttgaacggtgcccccatgttcccattgccgtcgcgggtcagaaggcagtgatcttcaggaacgtaagggacatcgggcgtttccatagcagttttcttcaggaactgcagcagtgtgatactgatgacgacgtggctatgtgcttcatcaaaaaccaggctgccttcgagcagtacctggagtttcttgtgggtcgagtgcaggccgagtccgtcgtggtgagcacagccatccaggagttttataagaagtacgctgaagaggctctactagccggagacccttctcaaccccctcccccaccactccagcactacttggaacagcccgtggagcgggtccagcgatatcaggccttactaaaggaactgatccggaataaagcgcgtaaccgccagaattgcgccctgttggagcaagcttatgccgtggtctcagcgttgccacaacgtgccgaaaacaaactgcatgtgtctttgatggaaaattaccctggaactcttcaagcacttggcgagcctattaggcaggggcattttattgtttgggaaggggcacccggtgccagaatgccatggaaggggcacaacagacacgtgtttctcttccgtaaccacctcgtgatctgcaaaccccgacgggattcaagaacagacaccgtgagttatgtgtttcggaacatgatgaagctgagttctattgacttgaatgaccaagtagagggcgatgacagagcattcgaagtgtggcaagagcgcgaggattccgttagaaagtaccttctccaggccagaacagccatcattaagagctcctgggttaaggaaatttgcggcattcagcaacgtcttgccctgcctgtatggcgccctcccgattttgaagaggagctggccgactgtaccgcagaactgggcgaaacagttaagctcgcctgtagggtcaccgggacccctaagccggtgatttcatggtataaggatggcaaagctgtgcaggttgaccctcatcatatactgatagaagacccggatggatcctgcgctctgatcctggatagtttgacgggggtcgacagtggtcaatatatgtgctttgctgcctccgctgccggaaattgcagtaccctcgggaagatcctcgtgcaggtgccgccaagatttgtgaacaaggtgcgggcttctcctttcgtggagggagaggacgcacaatttacatgtactattgagggggcaccctatcctcagatccgctggtataaggacggcgctctgctgaccactggcaacaagttccaaactttgtctgagccgcgtagcggcttactggtactggtgattagagccgcttcgaaagaggacctggggttgtacgaatgcgaacttgtgaatcgattgggaagcgcaagagctagcgcggagctccgtatacagtcacccatgctgcaggctcaagagcagtgccacagggaacagttagtggccgcagtcgaggttaccgaacaggagaccaaggtgcctaaaaagaccgtcatcatcgaagagaccatcaccacagtggttaagtcccccagggggcaacggaggagtccgtcaaaaagcccgtcacgtagtccatctaggtgtagcgctagcccattgaggcctggtcttctcgcacccgatcttctgtacctgccaggtgccggtcagccgaggaggccagaggccgaaccgggacagaaacctgttgttcctactctgtacgtaacagaggccgaagcccattcacccgctctgcccggactcagtggccctcagccaaagtgggtcgaggtcgaggagacaatcgaggtgagggttaagaaaatgggtcctcaaggcgtctctcccacgacagaggtgcctaggtcttcctccggacacctcttcacacttcccggtgccactcccggtggtgacccgaactctaataacagtaacaataagctgcttgcccaggaggcctgggcccagggtactgcaatggtgggcgtcagggaaccccttgtttttcgagtggacgcccgaggctccgtagactgggcggcatctggaatgggttccctggaggaagaaggaaccatggaggaggccggagaagaggaaggagaagatggagacgcctttgtgacagaggaatcccaggatacccactctctgggagatcgtgatcccaagatcttgacacataacgggcgaatgctcactctagctgacctagaggattacgttcctggcgaaggtgagacttttcattgcgggggtccgggtcctggggcaccggatgatccaccgtgcgaggtgtcagtcatccagagggaaatcggggagcccaccgttggccagcccgtcctgctatccgtgggacacgccttaggacccaggggccctctcggtttattcagacccgagcctaggggcgcaagtccaccaggcccacaagtgagaagccttgaaggaacgtcgtttctgctaagagaggctccggcacggccagtaggctcagcgccatggacacaatctttttgcaccaggatcaggcgcagtgccgactcgggccagagttcgttcacgactgagttatcaacgcagaccgtgaacttcgggacagtcggtgagaccgtaactctacacatatgccccgatagggacggtgatgaggctgctcagccctac

SEQ ID NO: 229273 - DNA, 11220 bp, Artificial Sequence
  derived and/or modified sequence
atgcttgtgattcgaggagctagtctgaaggacgccggagagtacacgtgcgaggttgaagcctcaaagagtaccgccagccttcatgttgaagagaaagcgaactgttttaccgaggagctgactaatctacaggtggaggaaaaaggcacggcagtgttcacctgcaaaacagagcaccccgcagcaaccgttacttggcgcaaaggcctgctcgagctgagggctagcgggaagcatcagccatctcaggagggcctgaccttgcgtctgactatcagtgctctagaaaaagccgactccgatacctacacgtgtgacatcggacaggcacagagccgggcacagctcctggtgcagggcaggcgtgtgcacataattgaggacctggaggacgtcgacgtgcaggaaggtagctcagccacattccgctgcaggatatctcctgcgaactacgagcctgtacattggtttctggacaagactccactgcacgccaatgaactgaatgaaatcgatgcacagcctggaggatatcacgtgctgaccctccgacaactggcgctcaaggattctggcacaatatacttcgaggctggcgatcagcgcgcatcggccgctctgcgcgtcacagaaaagccttctgtgttcagtagagaactgactgacgccaccatcacggaaggggaggatcttacgctggtctgcgagacctcaacttgtgacatccctgtatgctggaccaaggacggcaaaaccctgcgaggttcagcaaggtgtcagctgtcccacgagggtcatcgggctcagctcctgataactggcgcaactctgcaagactccggccgttacaagtgcgaagcgggaggtgcttgtagttcttctatcgtgagggtccacgcgcgaccagtgaggtttcaggaggctctgaaagatcttgaggtgttagagggtggtgccgcaactcttaggtgcgtgttatcttcggtggccgctcccgtcaaatggtgctacggaaacaatgtgctcagacctggagataaatatagcttgcgccaggagggagccatgctcgaactcgtggtgcgaaatctccgccctcaggacagcggacgatatagttgttcctttggtgaccagacaacttctgctacattgaccgtcactgctctgccagctcagttcattgggaagttacgcaacaaagaggcgacggaaggggcaactgccactcttcgttgcgagctgagcaaggcagccccagtagaatggcggaagggaagcgagacactccgggacggagaccgctattgcctgcgccaggacggggctatgtgtgaactgcagatacggggactggccatggtcgatgctgcagagtacagctgcgtatgcggcgaggagcggacctctgcctctttaaccatacgtcccatgcccgctcattttatagggcgactgcgtcaccaggagagtatcgagggggctacggcaacactcaggtgcgaactcagtaaggccgcacctgtcgagtggcgcaagggacgggagtctctcagggacggcgatagacattcacttagacaggatggcgcagtgtgcgaactccagatctgcgggttagcggttgctgatgctggggaatacagctgcgtttgtggcgaagagagaacgagcgcgactctcaccgtgaaagcacttcccgcaaagtttactgagggattacgtaacgaagaggccgtggaaggcgcaaccgccatgctttggtgcgaactgtctaaggtggcacctgtggaatggcgaaaaggccctgagaatctgcgcgatggcgatcggtatattctcagacaggaaggcaccagatgtgaattacaaatctgtggattggctatggcagacgctggcgagtacctttgcgtgtgtggccaggaacgcacttctgccacccttacaatccgggctctgccagctcgatttattgaggatgtgaagaatcaggaggcgagggagggtgctaccgcagttcttcagtgcgagttaaattccgcggctcctgtagagtggcgcaaggggtccgagaccttgagagatggcgataggtattcattgcgacaggacggcaccaaatgcgagttacagataagggggctagcaatggcagataccggggaatacagttgcgtgtgcggtcaggagcggacatcagctatgttgaccgtgcgcgctttgccaattaaattcaccgaagggttgcgcaacgaagaggctacagagggcgctacagccgtgctcaggtgtgaattgagtaaaatggctccagtggaatggtggaaggggcacgaaacactgcgtgatggagatagacactccttgaggcaagatggggcaagatgcgaacttcagatcaggggccttgtcgctgaggatgccggagagtacctgtgcatgtgcggaaaggagcgcacaagtgccatgctgaccgtaagagccatgccatcaaagttcatagaaggattgcgcaacgaggaggctactgaaggagacactgctactctgtggtgcgaactttcaaaggccgcacccgtggagtggcgcaagggtcatgagaccctgcgggacggcgatcgtcacagtctcagacaggatggcagccgttgtgaattacaaataagagggctggcagtagtcgatgctggtgagtactcgtgtgtgtgcgggcaggaacggaccagtgctaccctgacagtcagggccttgcctgccaggtttatcgaagatgtgaagaatcaggaggctagggaaggcgcaacggccgtactgcaatgtgaactgagcaaggccgctccggttgaatggaggaaaggatccgaaacactgcgcggtggagatcggtacagcctgcgacaagacggaacacgttgtgaactccaaatccacgggctgagcgtcgcagacaccggtgagtactcatgtgtgtgcggacaagaaagaacatccgcaacgctcaccgtgagagcaccccagcccgtgttcagagaacctctgcagtccctccaggcggaagaaggatctacagctactctgcagtgcgaactcagcgaaccaaccgcaaccgttgtctggtctaagggcggtctccagttgcaggcaaatgggaggcgggagcctcggctgcagggctgtactgcggagctcgtgctgcaggatctccaacgtgaggacaccggggagtatacctgtacctgtggatcacaggcgacaagcgccacactgaccgttacagccgctccagtgagatttctgcgcgaactccagcaccaagaggtggacgagggcggaacagcgcacttatgctgtgagctctcaagggcaggagcgagcgtcgagtggaggaagggctcactgcaattgtttccctgcgcgaagtaccagatggtgcaggacggcgctgccgctgagcttctcgtcaggggtgtggaacaggaggacgctggcgattacacttgtgacactggtcacacccagagtatggccagtttgagcgtccgcgtgcccaggccaaagttcaaaacccgcctacagtcactcgagcaggagaccggggatatcgctcgcctttgttgtcagctctcagatgcagagagcggggctgtggttcaatggttgaaggagggggtggagctacacgccggtccaaagtatgagatgaggtctcagggcgctacaagagaactgttgatccatcaactggaagccaaggataccggcgagtacgcctgtgttactggtggccagaaaaccgcagcctccctccgagtgacagagcccgaagtgaccatcgttcgcggactggtggacgcggaggtgacggctgacgaagacgtggagttttcctgtgaagtgagtagggctggcgctactggtgtgcagtggtgcctccaaggcctgccactgcagtcaaacgaagtgacggaagtggccgtccgggacgggcgaatccacactctgcgtctcaaaggcgtgaccccggaggacgccggaacagttagcttccatcttggaaatcacgcgagcagtgctcagttgacggtgcgcgctcctgaggtaacaatcctcgagcccttacaggatgttcaactgtctgagggtcaagacgcttcattccaatgccggctgagccgggcatctgggcaggaagctcgctgggctctgggtggcgtccctctacaggcgaacgaaatgaacgacatcacggtcgagcaaggaaccctccatttgctgacgctccacaaggttacccttgaggatgctgggacagtgtcttttcacgtaggaacgtgctccagtgaggctcaactcaaggtgaccgctaagaataccgtcgtcagggggttggagaatgtggaggccctcgagggcggagaagctctgtttgagtgccagctgtcccagccggaggtggctgcacacacatggttgctcgatgatgagcccgtgcatacgtccgagaacgccgaggtcgttttcttcgaaaacggactccgccaccttctgctgctgaaaaacctgagaccccaggactcctgccgggtcacatttctcgcgggagatatggttacctctgctttcctcaccgtgcgaggctggaggcttgaaattctcgaaccactgaaaaacgccgctgtgagggcaggagctcaagcatgcttcacttgtacccttagcgaagccgtgcccgtaggggaagcatcttggtatatcaatggcgctgccgtgcagcccgacgactcagactggaccgtgaccgctgatggctcccaccatgccctgttgctccgatcagctcagccacaccacgcaggagaggtgacatttgcctgccgcgacgctgttgctagcgcgcgtctgacagtgttagggctgcctgatccacctgaagatgctgaagtagttgcaagatcttcccataccgtcaccctatcttgggccgcaccaatgagcgacggtggtgggggactttgcggttaccgcgtagaagtgaaagaaggggcaacaggtcaatggcgtttgtgtcacgagttggtaccaggaccagaatgcgtggtggacggtcttgctccaggggaaacataccgcttcagggtcgcagccgtagggccagtgggggcaggagaaccagtacacttgcctcagactgttagattggccgagccaccaaagccggtcccaccccagcctagtgcacccgagtccagacaggtggcggctggggaggacgtgtccctggagctcgaggtggtcgcagaggctggtgaggtgatctggcataagggcatggagagaatacagccaggcggtcggttcgaagtggtgtctcaaggtagacagcagatgctagtgatcaaaggtttcacggccgaggaccagggtgaataccattgcggactggcacaaggatcaatttgtcctgccgctgcaactttccaagtcgccttgtcaccagcatcagtggatgaggctccacagccttctttaccaccagaagcagctcaggaaggggacctccaccttctgtgggaagcacttgctcgaaagaggcgaatgtctagagaacccactctggacagcataagcgaactccctgaggaagatggccgttctcagcgccttccacaagaggcagaggaagtggctcctgacctcagtgaaggctatagtactgccgacgaactagccagaacaggtgatgccgacctgtctcacacttcctccgatgatgaaagtcgggctggcacacccagcctggtgacatatcttaaaaaagccggaagacccggtaccagtccactagcaagtaaagtgggagcccctgccgcacccagcgtgaagcctcagcaacagcaggagcctctggcagcagtgaggccaccattgggggacttgtctacaaaggacctgggggatccgagtatggacaaggccgcagtgaaaattcaagctgccttcaaagggtacaaagtgcggaaggagatgaaacaacaagagggcccaatgttttcacacacattcggcgacaccgaggcgcaggtaggggacgctctccgcctcgagtgtgtcgtggcttccaaggctgatgtgcgggctcgctggctcaaggacggagtggagctaacagacggccgtcatcaccatattgatcaattaggcgacggcacctgctctctcctcattacaggtctggaccgggctgatgccggatgttacacttgccaagtgagcaataagtttggacaggtgactcacagcgcatgtgttgtggtgagcgggtccgagtctgaggctgagagctctagtggcggtgaactcgacgacgcgtttcggagagccgcacggaggctgcacaggcttttcagaaccaagtcacccgctgaggtcagtgacgaagagctcttcttgagtgcagacgagggaccggctgaacctgaagagccagcagattggcagacatatcgagaggacgagcacttcatctgcattcgattcgaggccctgactgaggctcggcaggccgtcacgagattccaggaaatgtttgctacccttggaatcggtgtagagataaagctggtagaacaaggccctcgaagagtagagatgtgcatctccaaagagacccccgctccagttgtgccacccgaacctctcccaagcctgctgacctctgacgccgctccagttttccttactgaattgcagaatcaggaggtacaagacggctatcccgtctctttcgattgcgtggtgacagggcaacctatgccttccgtgagatggttcaaagacgggaagctgcttgaggaagacgaccattatatgattaatgaggatcagcagggtggtcatcagttgattataacagccgtcgttcccgctgacatgggcgtgtatagatgcttggctgagaatagcatgggggtgtccagtacgaaagcagaactcagggttgacctgacctctacagattatgatactgcagctgacgctacagaatccagttcttacttttcggcacagggatacctgagttcacgtgaacaggagggtaccgaatctacaaccgacgaagggcagttaccgcaggtggtagaggagctgagagacctccaagtggcgccaggtacccgtctggccaagtttcagctgaaggtaaaggggtaccccgctcccagactctactggtttaaggacggacaacctctcacggcatctgcacacattcgaatgaccgacaagaagatactccacactctggagattatttccgtgaccagggaggacagcggacaatacgctgcctatatctcaaacgcgatgggtgcggcatattcctcggcacgtctgctggtcagagggccagatgaaccagaggagaagcctgcttccgatgttcacgagcagctggtgcccccaaggatgcttgaacggttcacgcccaagaaagtcaagaaggggtcatctatcaccttttctgtgaaggtggaagggcgacccgtcccgacagtccattggctaagggaggaagctgagcggggagttctgtggatcgggcctgatacccccggatacacagtggcaagcagcgcacaacagcactccttggtgctgctggacgttggacggcagcaccaaggcacttatacctgcatcgcttctaatgccgctggtcaggctctgtgttctgcgtccctacacgtgagtggcctgccaaaggtggaggaacaggagaaagtcaaagaggccctcatttctacatttctccaggggaccactcaagctattagtgctcagggactggaaaccgccagttttgcagatctaggcggacaacgcaaggaagagccactggctgccaaggaggcccttggccatctttctctagctgaagtcgggaccgaagagtttttgcagaaacttacaagtcagattactgagatggtctccgcaaagataacccaagctaagctgcaggtgccgggtggcgactctgatgaagatagcaaaacgccttcagccagtccgcgacacggcagatctcgcccatcttcttcaatccaagaatccagctcagagtctgaagatggcgacgctaggggggaaatcttcgatatctatgtcgtgacagccgattacctgccccttggggctgaacaggatgccatcaccctccgcgaaggccaatacgtggaagtgttggatgctgcccatcccctgcgttggttagtccggaccaaaccaacgaaaagcagcccaagtcgccagggatgggtgtcacccgcatatctcgatcgcaggctgaagctcagcccggaatggggcgctgccgaggcaccagaattcccgggtgaggctgtttccgaagatgagtataaagcaagattgtcttctgttatccaagagcttctgtccagtgaacaggcttttgtggaggaactccagttcctgcaaagccatcacctgcaacacctggagagatgtcctcatgtccccatcgctgttgcgggtcaaaaggccgtcattttccgaaacgtcagggacatcggcaggttccactcatcttttctgcaggaactccagcagtgtgacacagacgacgatgtggcaatgtgctttattaagaaccaggcggcattcgaacagtacctcgaatttctagtgggcagagtgcaggccgaaagtgtggttgtctctactgcgatccaggaattttataagaaatacgctgaggaggccctcctagctggcgatccctctcagcctccgccaccgcctttacagcactacctggaacaacctgttgagcgtgtgcaaagatatcaggctcttctgaaggaacttattcggaacaaggctcgaaatcgtcagaactgcgctctcctagagcaggcctacgctgtagtgtccgcccttccgcagcgagctgagaacaagttgcacgtatccttaatggagaactatccaggcacactgcaagccctaggagaacctattaggcaaggccatttcatcgtctgggaaggcgcacccggagccagaatgccctggaagggacacaaccgccacgtgttcttatttcgcaaccacctggttatttgtaagcctagacgcgactcccgaaccgataccgtcagttatgtatttaggaatatgatgaagctcagtagtattgacctaaacgatcaggttgaaggggacgacagagccttcgaggtctggcaggaaagagaagattcagtgagaaagtatctgctccaggccaggaccgcaataatcaaaagcagttgggtgaaagagatctgcggcattcagcagagactcgccctgccagtatggcgaccgccagacttcgaagaggagctggcggattgcaccgccgaactgggggagacagtaaagctcgcatgcagggtcaccggaactcctaagcctgttatatcctggtacaaggatggtaaagcggtacaggtcgacccgcatcatatcctgattgaggaccctgacggttcctgcgccctgatacttgactcattgacgggagtggattctggtcagtatatgtgcttcgctgcatcagctgctggaaattgtagtaccctcgggaaaattctggtccaagtgccccctcgatttgtcaataaagtgagggcctctccttttgtggagggggaggacgcacagttcacttgcacaatcgaaggcgctccttacccgcagatccggtggtacaaagacggtgccctcctgacaacaggcaataagttccagaccctgagcgaaccaagatccggtctccttgtcctggtaatccgagcggcaagcaaggaggatttgggactctacgagtgtgaactggtgaacagactaggcagcgccagagccagcgccgaacttaggatccaatcaccaatgttgcaggctcaagagcaatgccatagggagcaattagttgccgctgtcgaggtcacagagcaggagactaaagtacccaaaaaaaccgtgatcattgaggagaccataaccacagtggtgaaaagcccacgcggacaaagaaggtcccccagtaagagcccatctagatctccttcacgatgcagcgcaagccccctgcgaccgggactgttagcccctgacctgttgtacctccctggagccggtcaaccaagacgcccagaggcagagcccggacaaaagcccgtcgttcctacattatatgtcaccgaagccgaagctcacagcccagccttacccggactgtccggccctcaacctaaatgggtcgaagtcgaagagaccatcgaggtacgagttaagaaaatggggccacagggggtcagcccgacaactgaagtacctcggagctccagtgggcatctgttcaccctgccaggtgctactccaggcggagaccctaacagcaataatagtaacaataaactgctggcacaggaggcttgggctcaaggaacagccatggtgggcgttcgggagccattggtgtttcgcgtggacgcaaggggttctgtggactgggccgctagcggaatgggtagtctggaagaggaagggaccatggaggaagctggggaagaagagggcgaagatggtgacgcgttcgttacagaagaatcccaggacacacactctctcggagacagggatcccaagatcctcacccacaacggcagaatgcttacactggccgacctcgaggactatgtgccaggagagggggagaccttccactgcggtggccctgggcctggggcacccgacgaccctccatgtgaagtttcggtgattcagcgagagattggggagccaacagttggacagcccgttttacttagcgtcggccacgctctggggcctagaggaccattaggtttgtttcgacccgaacccaggggggctagtcctcctggtccacaggtacgcagtctcgagggtacaagcttcttgttaagagaagcccctgccagacctgtaggttcggctccctggacacagtccttctgtactcgaattagaaggtcagcggactccgggcaatcctctttcacgacagagttgtccacacaaaccgttaactttggtactgtgggggagacagtgaccctgcacatctgtccggacagagatggggatgaggctgctcagccataa

SEQ ID NO: 229274 - DNA, 20432 bp, Artificial Sequence
  derived and/or modified sequence
tgcctcccagcctgtgcccccagcctgcgtgctgcccagagcccccatagagagaggtccccgccgccaccctcatggatcagccacagttcagcggggcgccccgctttctcacccggcccaaggccttcgtggtgtcggtgggcaaggacgccaccctcagctgccagatcgtgggtaatcccacgccacaggtgagctgggagaaggaccagcagccggtggcggccggcgcgcgcttccgtctggcccaggacggcgacctctaccgcctcactatcctggacctggcgctgggcgacagtgggcaatacgtgtgccgcgcgcgcaatgccataggcgaggccttcgctgctgtgggcctgcaggtggacgcggaggccgcgtgcgccgagcaggcgccgcacttcctgctgcggcccacgtccatccgcgtgcgcgagggctcagaggccaccttccgctgccgcgtgggtggctccccgaggccggcagtgagctggtccaaggacgggcggcgcctgggtgagcccgacggcccccgcgtgcgcgtggaggagctcggcgaggcaagtgcgctgcgcattcgggcggcgcggccgcgcgacggcggcacttacgaggtccgcgccgagaacccgctgggcgctgccagcgccgccgcggcgctagtggtggactcggacgccgcggacacggccagccggcccgggacctccacggccgcgctcctggcgcacctgcagcggcggcgcgaggctatgcgcgccgagggcgcccccgcctcaccgcccagcaccggcacgcgcacctgcacggtgactgaaggcaagcacgcgcgcctcagctgctacgtgaccggcgagcccaagcccgagacggtgtggaagaaggacggccagctggtgaccgagggccggcgccacgtggtgtacgaggacgcgcaggagaacttcgtgctcaagatcctcttctgcaagcagtcggaccgcggcctctacacctgcacggcgtccaacctcgtgggccagacctacagctctgtgctggtcgtagtgcgcgagcccgcggttcccttcaaaaagcggctgcaagatctggaggtgcgggagaaggagtcggccacgttcctatgtgaggtgccccagccgtccactgaggccgcgtggttcaaggaggagacgcggttgtgggcgagcgccaagtacggcatcgaggaggagggcaccgagcgccgcctgaccgtgcgcaatgtctcggccgacgacgacgcggtgtacatctgcgagacgccagagggcagccgcacggtggcggagctcgcagtccaaggaaacctcctccgaaagctccctcggaagacggcggtgcgcgtgggcgacacggctatgttttgcgtggagctggcggtcccggtgggccccgtccactggctgcggaaccaggaggaagtggtggcggggggccgcgtggccatctccgcggagggcacgcgccacacactaaccatctcccagtgctgcctggaggatgtgggccaggtggcctttatggctggcgactgccagacgtccacccagttctgcgtgtcggcccccaggaagcctcccctgcaaccccctgtggatcctgtggtaaaggccaggatggagagttccgtgattctcagctggtccccaccaccccatggggaacgccctgtcactatcgacggctacctggtagagaagaagaagcttggcacctacacctggatcaggtgccacgaggctgaatgggtggctacacctgagctgaccgtggctgatgtggcggaggaggggaacttccagttccgagtgtccgctctcaacagctttggtcagagtccctacctcgagttcccggggactgtccacctggcccccaagctggccgtgaggacaccgctgaaggcggtgcaggcggtagagggtggcgaggtcactttctccgtggacctcacggtggcctcagcgggtgagtggttcctggatgggcaggccctgaaggccagcagtgtgtatgagatccactgtgatcgcacccggcacacgctcaccatccgggaggtgcccgccagcctgcacggggcgcagctgaagttcgtggccaacggcattgagagcagcatccggatggaggtccgggcggccccagggctgactgccaacaagccgccagccgcagctgcccgggaggtgctggctcggctgcacgaggaggcgcagctgctggctgagctgtcagatcaggctgcggctgtgacgtggctgaaggatggtcgcacactgtccccaggccccaagtatgaggtgcaggcatcggccgggcggcgggtgctccttgtgcgagatgtggcccgggacgatgcaggcctctacgagtgcgtcagccgcgggggccgcatcgcctaccagctctccgtgcaaggcctcgcgcgctttctgcacaaggacatggcgggcagctgtgtggatgccgtggctgggggcccggcgcagtttgagtgtgagacctccgaagcccacgtccacgtgcactggtacaaggatggcatggagctgggccactccggtgagcgcttcttgcaggaggatgtggggacgcggcaccggctggtggcagccacagtcaccaggcaggatgaaggcacctactcctgccgcgtgggcgaggactctgtggacttccggctccgcgtctctgagcccaaggtggtgtttgctaaggagcagctggcacgcaggaagctgcaggcagaggcaggagccagtgccacactgagctgcgaggtggcccaggcccagacggaggtgacgtggtacaaggatgggaagaagctgagctccagctcgaaagtgtgcatggaggccacaggctgcacgcgcaggctggttgtgcagcaggcaggccaggcggatgccggggagtatagctgcgaggctgggggccagcggctctccttccatctggatgtcaaagagcccaaggtggtgtttgccaaggaccaggtggcacacagtgaggtgcaggctgaggcaggggccagtgccacgctgagctgcgaggtggcccaggcccagacggaggtgatgtggtacaaagatgggaagaagctgagctccagcttgaaagtgcatgtagaggccaagggctgcagacggaggctggtggtgcagcaggcaggcaagacagatgccggggactacagctgcgaggccaggggccagagggtctccttccgcctgcacatcacagagcccaagatgatgtttgcaaaggagcagtcagtgcataatgaggtgcaggctgaggcgggggccagtgccatgctgagctgtgaggtggcccaggcccagacggaggtgacgtggtacaaggatgggaagaagctgagctccagctcaaaagtgggcatggaggtcaaagggtgcacacggaggctggtgctgccacaggcgggcaaagcagatgctggggagtacagctgtgaggctgggggccagagagtctccttccacctgcacatcacagagcccaagggggtgtttgcgaaggagcagtcagtgcataatgaggtgcaggctgaggcggggaccactgccatgctgagctgtgaggtggcccagccccagacagaggtgacgtggtacaaggacgggaagaagctgagctccagctcaaaagtacgcatggaggtcaagggctgcacacgaaggctggtagtgcagcaggtgggcaaagcagatgctggggagtacagctgcgaggctgggggccagagagtctcctttcaactgcacatcacagagcccaaggcagtgtttgccaaggagcagttggtgcataatgaggtgcggactgaggcaggggccagtgccacactgagctgtgaggtggcccaggcccagacagaggtgacgtggtacaaggatgggaagaagctgagctccagttcgaaagtgcgcatagaggctgcgggctgcatgcggcagctggtggtgcagcaggcaggccaggcagatgctggggagtacacctgtgaggctgggggccagcggctctccttccacctggatgtttcagagcccaaggcggtgtttgcaaaggagcagctggcacacaggaaggtgcaggccgaggcgggggccattgccacgctgagctgcgaggtggcccaggcccagacagaggtgacgtggtacaaggacgggaagaagctgagctccagctcgaaagttcgaatggaggctgtgggctgcacacggaggctggtggtgcagcaggcatgccaggcggacaccggggagtatagctgcgaggccgggggccagcggctctccttcagcctggacgtggcagagcccaaggtggtgtttgccaaggagcagccagtgcacagggaggtgcaggcccaggcgggggccagcaccacactcagctgcgaggtggctcaggcccagacggaggtgatgtggtacaaggacgggaagaagctgagcttcagctcgaaagtgcgcatggaggctgtgggctgcacacggaggctggtggtgcagcaggcgggccaggcggtcgccggggagtacagctgcgaggcggggagccagcggctctccttccacctgcacgtggcagagcccaaggcggtgtttgccaaggagcagccagcgagcagggaggtgcaggctgaggcggggaccagtgccacgctgagctgcgaggtggcccaggcccagacagaggtgacgtggtacaaggacgggaagaaactgagctccagctcgaaagtgcgaatggaggccgtgggctgcacacggaggctggtggtgcaggaggcaggccaggcggacgccggggagtacagctgcaaggccggggatcagcggctgtccttccacctgcacgtggcagagcccaaggtggtgtttgccaaggagcagccagcacacagggaggtgcaggctgaggcgggggccagtgccacgctgagctgcgaggtggcccaggcccagacagaggtgacgtggtacaaggatgggaagaagctgagttccagctcgaaagtgcgcgtggaggccgtgggctgcacacggaggctggtggtgcagcaggcgggccaggcagaggccggggagtacagctgcgaggcagggggtcagcagctctccttccgcctgcaggtggcagagctggagccccaaatttcagagagaccctgccgcagggagcctctggtggtcaaggagcatgaagacatcatcctgaccgccacactggccacaccctctgcggccacggtgacctggctcaaggatggtgtggagattcgccgcagcaagcggcatgagacagccagccagggggacacccacaccctgaccgtgcatggcgcccaggttctggacagcgccatctacagctgccgtgtgggcgcagaggggcaggacttcccagtgcaggtggaagaggtggccgccaagttctgccggctgctggagcctgtgtgcggcgagctgggtggcacggtgacactggcctgcgagctaagcccagcgtgtgcagaggtggtgtggcgctgcggcaacacgcagcttcgggtgggcaagcgcttccagatggtggccgaggggcccgtgcgctcactcactgtgttggggctgcgcgcagaggacgcaggggagtacgtgtgtgagagccgtgatgaccacaccagtgcgcagctcaccgtcagtgtgccccgagtggtgaagtttatgtctgggctgagcaccgtggtcgcagaggagggcggcgaggccaccttccagtgcgtggtgtcccccagtgatgtggcagtcgtgtggttccgggacggtgccctgcttcagcccagcgagaagtttgccatatcacagagtggcgccagccacagcctgaccatctcagacctggtgctggaggacgcgggccagatcaccgtggaggctgagggcgcctcatcctctgctgccctgagggtccgagaggcgcctgtgctgttcaaaaagaagctggagccgcagacggtggaggagcggagctcggtgaccctggaggtggagctgacgcggccgtggccggagctgaggtggacacggaacgcgacggccctggcgccgggaaagaacgtggagatccacgccgagggcgcccgccaccgcctggttctgcacaacgtaggttttgccgaccgtggcttctttggctgcgagacgccggatgacaagacacaggccaaactcaccgtggagatgcgccaggtacggctcgtacggggcctgcaggcagtggaggcacgggagcagggcacggctaccatggaggtgcagctgtcgcatgcggacgtggatggcagctggactcgtgacggtctgcggttccagcaggggcccacgtgccacctggctgtgcggggccccatgcacaccctcacactctcggggctgcggccagaggatagtggccttatggtcttcaaggccgaaggagtgcacacgtcggcgcggctcgtggtcaccgagcttcccgtgagcttcagccgcccgctgcaggacgtggtgaccactgagaaggagaaggttaccctggagtgcgagctgtcgcgtcctaatgtggatgtgcgctggctgaaggacggtgtggagctgcgggcaggcaagacgatggccatcgcagcccagggcgcctgcaggagcctcaccatttaccggtgcgagttcgcggatcagggagtgtatgtgtgtgatgcccatgatgcccagagctctgcctccgtgaaggtacaaggaaggacatacactctcatctaccggagagtcctggcggaagatgcaggagagatccaatttgtagccgaaaatgcagaatcgcgagcccagctccgagtgaaggagctgccagtgaccctcgtgcgcccgctgcgggacaagattgccatggagaagcaccgcggtgtgctggagtgtcaggtgtcccgggccagcgcccaggtgcggtggttcaagggcagtcaggagctgcagcccgggcccaagtacgagctggtcagtgatggcctctaccgcaagctgatcatcagtgatgtccacgcagaggacgaggacacctacacctgtgacgccggtgatgtcaagaccagtgcacagttcttcgtggaagagcaatccatcaccattgtgcggggtctgcaggacgtgacagtgatggagcccgctcctgcctggtttgagtgtgagacctccatcccctcagtgcggccacctaagtggctcctggggaagacggtgttgcaggctggggggaacgtgggcctggagcaggagggcacggtgcaccggctgatgctgcggcggacctgctccaccatgaccgggcccgtgcacttcaccgttggcaagtcgcgctcctctgcccgcctggtggtctcagacatccccgtagtcctcacacggccgttggagcccaagacagggcgtgagctgcagtcagtggtcctgtcctgcgacttccggccagcccccaaggctgtgcagtggtacaaggatgacacgcccctgtctccctctgagaagtttaagatgagcctggagggtcagatggctgagctgcgcatcctccggctcatgcctgctgatgctggtgtctaccggtgccaggcgggcagtgcccacagcagcactgaggtcactgtggaagcgcgggaggtgacagtgacagggccgctacaggatgcagaggccacggaggagggctgggccagcttctcctgtgagctgtcccacgaggatgaggaggtcgagtggtcgctcaacgggatgcccctgtacaacgacagcttccatgagatctcacacaagggccggcgccacacgctggtactgaagagcatccagcgggctgatgcgggcatagtacgcgcctcctccctgaaggtgtcgacctctgcccgcctggaggtccgagtgaagccggtggtgttcctgaaggcgctggatgacctgtccgcagaggagcgcggcaccctggccctgcagtgtgaagtctctgaccccgaggcccatgtggtgtggcgcaaagatggcgtgcagctgggccccagtgacaagtatgacttcctgcacacggcgggcacgcgggggctcgtggtgcatgacgtgagccctgaagacgccggcctgtacacctgccacgtgggctccgaggagacccgggcccgggtccgcgtgcacgatctgcacgtgggcatcaccaagaggctgaagacaatggaggtgctggaaggggaaagctgcagctttgagtgcgtcctgtcccacgagagtgccagcgacccggccatgtggacagtcggtgggaagacagtgggcagctccagccgcttccaggccacacgtcagggccgaaaatacatcctggtggtccgggaggctgcaccaagtgatgccggggaggtggtcttctctgtgcggggcctcacctccaaggcctcactcattgtcagagagaggccggccgccatcatcaagcccctggaagaccagtgggtggcgccaggggaggacgtggagctgcgctgtgagctgtcacgggcgggaacgcccgtgcactggctgaaggacaggaaggccatccgcaagagccagaagtatgatgtggtctgcgagggcacgatggccatgctggtcatccgcggggcctcgctcaaggacgcgggcgagtacacgtgtgaggtggaggcttccaagagcacagccagcctccatgtggaagaaaaagcaaactgcttcacagaggagctgaccaatctgcaggtggaggagaaaggcacagctgtgttcacgtgcaagacggagcaccccgcggccacagtgacctggcgcaagggcctcttggagctacgggcctcagggaagcaccagcccagccaggagggcctgaccctgcggctcaccatcagtgccctggagaaggcagacagcgacacctatacctgcgacattggccaggcccagtcccgggcccagctcctagtgcaaggccggagagtgcacatcatcgaggacctggaggatgtggatgtgcaggagggctcctcggccaccttccgttgccggatctccccggccaactacgagcctgtgcactggttcctggacaagacacccctgcatgccaacgagctcaatgagatcgatgcccagcccgggggctaccacgtgctgaccctgcggcagctggcgctcaaggactcgggcaccatctactttgaggcgggtgaccagcgggcctcggccgccctgcgggtcactgagaagccaagcgtcttctcccgggagctcacagatgccaccatcacagagggtgaggacttgaccctggtgtgcgagaccagcacctgcgacattcctgtgtgctggaccaaggatgggaagaccctgcgggggtctgcccggtgccagctgagccatgagggccaccgggcccagctgctcatcactggggccaccctgcaggacagtggacgctacaagtgtgaggctgggggcgcctgcagcagctccattgtcagggtgcatgcgcggccagtgcggttccaggaggccctgaaggacctggaggtgctggagggtggtgctgccacactgcgctgtgtgctgtcatctgtggctgcgcccgtgaagtggtgctatggaaacaacgtcctgaggccaggtgacaaatacagcctacgccaggagggtgccatgctggagctggtggtccggaacctccggccgcaggacagcgggcggtactcatgctccttcggggaccagactacttctgccaccctcacagtgactgccctgcctgcccagttcatcgggaaactgagaaacaaggaggccacagaaggggccacggccacgctgcggtgtgagctgagcaaggcagcccctgtggagtggagaaaggggtccgagaccctcagagatggggacagatactgtctgaggcaggacggggccatgtgtgagctgcagatccgtggcctggccatggtggatgccgcggagtactcgtgtgtgtgtggagaggagaggacctcagcctcactcaccatcaggcccatgcctgcccacttcataggaagactgagacaccaagagagcatagaaggggccacagccacgctgcggtgtgagctgagcaaggcggcccccgtggagtggaggaaggggcgtgagagcctcagagatggggacagacatagcctgaggcaggacggggctgtgtgcgagctgcagatctgtggcctggctgtggcagatgctggggagtactcctgtgtgtgtggggaggagaggacctctgccactctcaccgtgaaggccctgccagccaagttcacagagggtctgaggaatgaagaggccgtggaaggggccacagccatgttgtggtgtgaactgagcaaggtggcccctgtggagtggaggaaggggcccgagaacctcagagatggggacagatacatcctgaggcaggaggggaccaggtgtgagctgcagatctgtggcctggccatggcggacgccggggagtacttgtgtgtgtgcgggcaggagaggacctcagccacgctcaccatcagggctctgcctgccaggttcatagaagatgtgaaaaaccaggaggccagagaaggggccacagctgtgctgcagtgtgagctgaacagtgcagcccctgtggagtggagaaaggggtctgagacccttagagatggggacagatacagcctgaggcaggacgggactaaatgtgagctgcagattcgtggcctggccatggcagacactggggagtactcgtgcgtgtgcgggcaggagaggacctcggctatgctcaccgtcagggctctacccatcaagttcacagagggtctgaggaacgaagaggccacagaaggggcaacagccgtgctgcggtgtgagctgagcaagatggcccccgtggagtggtggaaggggcatgagaccctcagagatggagacagacacagcctgaggcaggacggggccaggtgtgagctgcagatccgcggcctcgtggcagaggacgctggggagtacctgtgcatgtgcgggaaggagaggacctcagccatgctcaccgtcagggccatgccttccaagttcatagagggtctgaggaatgaagaggccacagaaggggacacggccacgctgtggtgtgagctgagcaaggcggcaccggtggagtggaggaaggggcatgagaccctcagagatggggacagacacagcctgaggcaggacgggtccaggtgtgagctgcagatccgtggcctggctgtggtggatgccggggagtactcgtgtgtgtgcgggcaggagaggacctcagccacactcactgtcagggccctgcctgccagattcatagaagatgtgaaaaaccaggaggccagagaaggggccacggccgtgctgcaatgtgagctgagcaaggcggcccccgtggagtggaggaaggggtctgagaccctcagaggtggggacagatacagcctgaggcaggatgggaccagatgtgagctgcagattcatggcctgtctgtggcagacactggggagtactcgtgtgtgtgcgggcaggagaggacctcggccacactcaccgtcagggccccacagccagtgttccgggagccgctgcagagtctgcaggcggaggagggctccacggccaccctgcagtgtgagctgtctgagcccactgctacagtggtctggagcaagggtggcctgcagctgcaggccaatgggcgccgggagccacggcttcagggctgcaccgcggagctggtgttacaggacctacaacgtgaagacactggcgaatacacttgcacctgtggctcccaggccaccagtgccaccctcactgtcacagctgcgcctgtgcggttcctccgagagctgcagcaccaggaggtggatgagggaggcaccgcacacttatgctgcgagctgagccgggcgggtgcgagcgtggagtggcgcaagggctccctacagctcttcccttgtgccaagtaccagatggtgcaggatggtgcagctgcagagctgctggtacgcggagtggagcaggaggatgcgggtgactacacgtgtgacacgggccacacgcagagcatggccagcctctctgtccgtgtccccaggcccaagttcaagacccggcttcagagtctggagcaggagacaggtgacatagcccggctgtgctgtcagctgagtgatgcagagtcgggggccgtggtgcaatggctcaaggagggcgtggagctgcatgcgggccccaagtacgagatgcggagccagggggccacgcgggagctgctgatccaccaactggaggccaaggacacgggcgagtatgcctgtgtgacaggcggccagaaaaccgctgcctccctcagggtcacagagcctgaggtgaccattgtacgggggctggttgatgcggaggtgacggccgatgaggatgttgagttcagctgtgaggtgtccagggctggagccacaggcgtgcagtggtgcctacagggcctgccactgcaaagcaatgaggtgacagaggtggctgtgcgggatggccgcatccacaccctgcggctgaagggcgtgacgcccgaggacgctggcactgtctccttccatttgggaaaccatgcttcctctgcccagctcaccgtcagagctcctgaggtgaccatcctggagcccctgcaggacgtgcagctcagtgagggccaggatgccagcttccagtgccggctatccagagcttcaggccaggaggcccgctgggctttaggaggggtgcccctgcaggccaacgagatgaatgacatcactgtggagcagggcacactccacctgctcaccctgcacaaggtgacccttgaggatgctggaactgtcagtttccacgtgggcacgtgtagctctgaggcccagctgaaagtcacagccaagaacacggtggtgcgggggctggagaatgtggaggcgctggagggcggcgaggcgctgttcgagtgccagctgtcccagcccgaggtggccgcccacacctggctgctggacgacgaacccgtgcacacctcggagaacgccgaggtggtcttcttcgagaacggcctgcgccacctgctgctgctcaaaaacttgcggccacaagacagctgccgggtgaccttcctggctggggatatggtgacgtccgcattcctcacggtccgaggctggcgcctggagatcctggagcctctgaaaaacgcggcggtccgggccggcgcacaggcatgcttcacctgcacgctcagcgaggcggtgcccgtgggagaggcgtcctggtacatcaatggcgcggcagtgcagccggatgacagcgactggactgtcaccgccgacggcagtcaccacgccctactgctgcgcagcgcccagccccaccacgccggggaggtcaccttcgcttgccgcgacgccgtggcctctgcgcggctcaccgtgctgggcctccctgatcccccagaggatgctgaggtggtggctcgcagcagccacactgtgacactgtcttgggcagctcccatgagtgatggaggcggtggtctctgtggctaccgcgtggaggtgaaggagggggccacaggccagtggcggctgtgccacgagctggtgcctggacccgagtgtgtggtggatggcctggcccccggggagacctaccgcttccgtgtggcagctgtgggccctgtgggtgctggggaaccggttcacctgccccagacagtgcggcttgcagagccaccgaagcctgtgcctccccagccctcagcccctgagagccggcaggtggcagctggtgaagatgtctctctggagcttgaggtggtggctgaggctggtgaggtcatctggcacaagggaatggagcgcatccagcccggtgggcggttcgaggtggtctcccagggtcggcaacagatgctggtgatcaagggcttcacggcagaagaccagggcgagtaccactgtggcctggctcagggctccatctgccctgcggctgccaccttccaggtggcactgagcccagcctctgtggatgaggcccctcagcccagcttgccccccgaggcagcccaggagggtgacctgcacctactgtgggaggccctggctcggaaacgtcgcatgagccgtgagcccacgctggactccattagcgagctgccagaggaggacggccgctcgcagcgcctgccacaggaggcagaggaggtggcacctgatctctctgaaggctactccacggccgatgagctggcccgcactggagatgctgacctctcacacaccagctctgatgatgagtcccgggcaggcaccccttccctggtcacctacctcaagaaggctgggaggccaggcacctcaccactggccagcaaggttggggccccagcagccccctctgtgaagccacagcagcagcaggagccactggctgctgtgcgcccaccactgggagacctgagcaccaaagacctgggtgatccctcaatggacaaggcagctgtgaagatccaggctgcctttaagggctacaaggtccggaaggagatgaagcagcaggaagggcccatgttctcccacacatttggggacaccgaggcacaggtgggggatgccctgcggctggagtgtgtcgtggccagcaaggcagatgtgcgagcccgctggctgaaggatggtgtggagctgaccgatgggcggcaccatcacatcgaccagcttggggatggcacctgctctctgctgatcactggcctggaccgtgctgatgctggctgctacacctgtcaggtgagcaacaagtttggccaggtgacccacagtgcctgtgtggtggtcagtgggtcagagagtgaagccgagagctcctctgggggtgagctggacgatgccttccgccgggctgcccgtcggctgcaccggctcttccgcaccaaaagtccggctgaagtttcagatgaggagctcttcctgagtgcagacgagggccctgcagagccagaggagcccgcggactggcagacataccgcgaagatgagcatttcatctgcatccgttttgaggcgctcactgaggcccgccaggcggtaactcgcttccaggagatgtttgccacactgggcattggggtggagatcaagctggtggaacaggggcctcggagggtagagatgtgcatcagcaaagagactcctgcccctgtggtgcctccagagccattgcccagcctactgacttctgacgctgccccagtgttcctgactgagttgcagaaccaagaagtgcaggatgggtatcctgtgagctttgactgcgtggtgacaggtcagcccatgcccagtgtgcgctggttcaaggatgggaagttgttggaggaggatgatcactacatgattaatgaagaccaacagggtggccatcagctcatcatcacagccgtggtgccagcagacatgggcgtctaccgctgcctggccgagaacagcatgggtgtctcctccaccaaggctgagctccgtgtggacttgacaagcacagactatgacactgcagcagatgccacggagtcctcatcctacttcagtgcccaaggctacctgtccagccgggagcaggagggaacagagtccaccactgatgagggccagctgccccaggtggtggaggagctgagagacctccaggtggcccctggcacacgcctggccaagttccagctcaaggtgaaaggctaccctgctcccagattatactggttcaaagatggccagcccctgaccgcatctgcccacatccgcatgactgacaagaagatcctgcacaccctggagatcatctccgtcacccgggaggactctggccagtatgcagcctatatcagcaatgccatgggtgctgcctactcgtctgcccggctgctggttcgaggccctgatgagccagaagagaagcctgcatcagatgtgcatgagcagctggtgccgccccgaatgctggagaggttcacccccaagaaagtgaagaaaggctccagcatcaccttctctgtgaaggtagaaggacgcccggtgcccaccgtgcactggctcagggaggaggctgagagaggcgtgctgtggattggccctgacacaccgggctacaccgtggccagctctgcgcagcagcacagcctggtcctgctggacgtgggccggcagcaccagggcacctacacatgcattgccagcaacgctgccggccaggccctctgctccgccagcctgcacgtctcgggcctgcctaaggtggaggagcaggagaaagtgaaggaagcgctgatttccactttcctgcaggggaccacacaagccatctcagcacaggggttggaaactgcgagttttgctgaccttggtgggcagaggaaagaagagcctctggctgccaaggaggccctcggccacctgtccctcgctgaggtgggcacagaggagttcctgcagaaactgacctcccagatcactgagatggtatcggccaagatcacgcaggccaagctgcaggtgcccggaggtgacagtgatgaggactccaagacaccatctgcatccccccgccatggccgatcacggccatcctccagcatccaggagtcttcctcagagtcagaggacggcgatgcccgaggcgagatctttgacatctacgtggtcaccgctgactacctgcccctaggggctgagcaggatgccatcacgctgcgggaaggccagtatgtggaggtcctggatgcagcccacccactgcgctggcttgtccgcaccaagcccaccaagtccagcccctcacggcagggctgggtgtcaccagcctacctggacaggaggctcaagctgtcacctgagtggggggccgctgaggcccctgagttccctggggaggctgtgtctgaagacgaatacaaggcaaggctgagctctgtgatccaggagctgctgagttctgagcaggccttcgtggaggagctgcagttcctgcagagccaccacctgcagcacctggagcgctgcccccacgtgcccatagctgtggccggccagaaggcagtcatcttccgcaatgtgcgggacatcggccgcttccacagcagcttcctgcaggagttgcagcagtgcgacacggacgacgacgtggccatgtgcttcatcaagaaccaggcggcctttgagcagtacctggagttcctggtggggcgtgtgcaggctgagtcggtggtcgtcagcacggccatccaggagttctacaagaaatacgcggaggaggccctgttggcaggggacccctctcagcccccgccaccacctctgcagcactacctggagcagccagtggagcgggtgcagcgctaccaggccttgctgaaggagctgatccgcaacaaggcgcggaacagacagaactgcgcgctgctggagcaggcctatgccgtggtgtctgccctgccacagcgcgctgagaacaagctgcacgtgtccctcatggagaactacccaggcaccctgcaggccctgggcgagcccatccgccagggccacttcatcgtgtgggagggtgcaccgggggcccgcatgccctggaagggccacaaccgtcacgtgttcctcttccgcaaccacctggtaatctgcaagccccggcgagactcccgcaccgataccgtcagctacgtgttccggaacatgatgaagctgagcagcatcgacctgaacgaccaggtggagggggatgaccgcgccttcgaggtgtggcaggagcgggaggactcggtgcgcaagtacctgctgcaggcacggacagccattatcaagagctcgtgggtgaaggagatctgtggcatccagcagcgtctggccctgcctgtgtggcggcccccggactttgaagaggagctggccgactgcacagccgagctgggtgagacagtcaagctggcctgccgcgtgacgggcacacccaagcctgtcatcagctggtacaaagatgggaaagcagtgcaggtggacccccaccacatcctcattgaagaccctgatggctcgtgtgcactcatcctggacagcctgaccggtgtggactctggccagtacatgtgcttcgcggccagcgccgctggcaactgcagtaccctgggcaagatcctggtgcaagtcccaccacggttcgtgaacaaggtccgggcctcaccctttgtggagggagaggacgcccagttcacctgcaccatcgaaggcgccccgtacccgcagatcaggtggtacaaggacggggccctgctgaccactggcaacaagttccagacactgagtgagcctcgcagcggcctgctagtgctggtgatccgggcggccagcaaggaggacctggggctctacgagtgtgagctggtgaaccggctgggctccgcgcgggctagtgcggagctgcgcattcagagccccatgctgcaggcccaggagcagtgtcacagggagcagctcgtggctgcagtggaagtcactgagcaagagactaaagtccccaagaaaaccgtcatcatagaagagaccatcaccactgtggtgaagagcccacgtggccaacgacggtcccccagcaagtccccctcccgctcaccttcccgctgctctgccagcccgctgaggccaggcctactggcccccgacctgctgtacctgccaggtgctggccagccccgcaggccggaggcagaaccaggccagaagcccgtggtgcccacactgtatgtgacggaggccgaggcccactctccagctctgcccggactctcggggccccagcccaagtgggtggaggtggaggagaccattgaagtccgggtgaagaagatgggcccgcagggtgtgtctcccaccacagaggtgcccaggagctcatcggggcatctcttcacactgcccggtgcgacccccggaggggaccccaattccaacaactccaacaacaagctgctggcccaggaggcctgggcccagggcacagccatggtcggcgtcagagagccccttgtcttccgcgtggatgccagaggcagtgtggactgggctgcttctggcatgggcagcctggaggaggagggcaccatggaggaggcgggagaggaagagggggaagacggagacgcctttgtgacggaggagtcccaggacacacacagccttggggatcgtgaccccaagatcctcacgcacaacggccgcatgctgacactggctgacctggaagattacgtgcctggggaaggggagaccttccactgtggtggccctgggcctggcgcccctgatgaccctccctgcgaggtctcggtgatccagagagagatcggggagcccacggtggggcagcctgtgctgctcagcgtggggcatgcactgggtccccgaggccctctcggcctctttaggcctgagccccgtggggcgtcaccaccgggaccccaggtccgtagccttgagggcacctccttcctcttgcgggaggccccggctcggcctgtgggcagtgctccctggacgcagtctttctgcacccgcatccggcgttctgcggacagtggccagagcagcttcaccacagagctttccacccagaccgtcaacttcgggacagtgggggagacggtcacccttcacatctgcccagacagggatggggatgaggcggcacagccctgatgctgctgccatggtggcttggggcagcggggagaaaggagtgtccttgaggcctaggacgctgcccggcctcagcagcagccctgggagcctcctgagggccctccctgtccctggccacgggcccttcttacctcactcaacttcagccaggaggactgggtggtgcttgcaatgttggaatgaccggctcaaagacctcagctctgggctgtttcctgtcagcctggcaggagcctcaggactgtggacgaaggatgtggccttgggcatttgtcctgttcccacatgggcctggtccctccctcctggccccagccacagctgccaggcctgacatggccttgcctctcctgcagtcttggtgactgagacccttgggtggcgcttcccagctctgcaggccctcctggccttttctgcagggtggacacagggtctgtgtgtgggcagcagcccctgtctctcagcaagaataaagcagcttcctgtgca
